United States Patent Application Publication US 2006/0228715 A1 - sequence listing, part 2

SEQ ID NO: 1613 - DNA, 327636 bp, Homo sapiens
  misc_feature (1)...(327636): n = A,T,C or G, or insertion/deletion polymorphism (see Tables 1-2)
acatcacaattaaaagaactagaaaagcaagagcaaacacattcaaaagctagcagaaggcaagaaataagtaaaatcagagcagaactgaaggaaatagagacacaaaaaacccttcaaaaaattagtgaatccaggagctggttttttgaaaggatcaacaaaattgatagaccactagcaatattaataaagaagaaaagagagaagaatcaaatagacgcaataaaaaatgataaasgggatatcaccaccgatcccacagaaatacaaactactatcagagaatactacaaacacctctccgcaaataaactagaaaatctagaagaaatggataagttcctcgacacatacaccctcccaagactaaaccaggaagaagttgaatctctgaatagacgaataacaggctctgaaattgtggcaataatcaatagcttaccaaccaaaaagagtccaggaccagatggattcacagccgaattctaccagaggtacaagraggaattggtgccattccttctgaaactattccaatcaatagaaaaagagggaatcctccctaactcattttatgaggccagcatcatcctgatatcaaagccgggcagagacacaaccaaaaaagagaattttagaccaatgtccttgatgaacattgatgtaaaaatcctcaataaaatactggcaaaccgaatccagcagcacatcaaaaagcttatccaccatgatcaagttggcttcrtccctgggatgcaaggctggttcaatatatgcaaatcaataaatgtaatccagcatataaacagaaccaaagacaaaaaccacatgattatctcaatagatgcaggaaaggcctttgacaaaattcaacaacgcttcatgctaaaaactcaataaattaggtattgatgggacgtatctcaaaataataagagctatctatgacaaacccacagccaatatcatactgaatgggcaaaaactggaagcattccctttgaaactggcacaagacagggatgccctctctcaccactcctattcaacatagtgttggaagttctggccagggcaattaggcaggagaaggaaataaagggtattcagttaggaaaagaggaagtcaaattgtccctgtttgcagatgacatgattgtcatctgggctagaaaaccccattgtcttagcccaaaatctgcttaagctgataagcaacttcagcaaagtctcagtatacaaaatcaatgtgcaaaaatcacaggcattcttatacaccaatgacagacagagaggcaaatcatgagtgaactgccattcacaattgcttcaaagagaataaaatacctaggaatccaacttacaagggaygkgaaggacctcttcaaggagagctacaaaccactgctcaatgaaataaaagaggatacaaacaaatggaagaacattccatgctcatgggtaggaagaatcaatatcatgaaaatggccatactgcccaaggtaatttatagattcaatgccatccccatccagctaccaatgactttcttcacagaattggaaaaaactactttaaagttcatatggaaccaaaaaagagcccgcattgccaagtcaatcctaagccaaaagaacaaagctggaggcatcatgctacgtgacttccaactatactacaaggctacagtaaccaaaacagcatggtactggtaccaaaacagagatatagatcaatggaacagaacagagtcctcagaaataatgccacrtatctacaactatctgatctttgacaaacctgagaaaaataagcaatggggaaaggattccctatttaataaatggtgctgggaatactggccagccatatgtagaaagctgaaactggatcccttccttacaccttatacaaaaattaattcaagatggattaaagacttaaatgttagacctaaaaccataaaaaccctagaagaaaacctaggcattaccattcaggacataggcatkggcacggacttcatgtataaaacaccaaaagcaatggcaacaaaagccaaaattgacaaatgggatctaattaaactaaagagcttctgcacagcaaaagaaactaccatcagagtgaacaggcaacctacaaaatgggagaaaattttcgcaacctactyatctgacaaagggctaatatccagaatctacaaagaactccaacaaatttacaagaaaaaaacaaacaaccccatcaaaaagtgggccaaggacatgagcagacacttctcaaaagaagacatttatgcagccaaaaaacacatgaaaaaatgctcatcatcactggccatcagagaaatgcaaatcaaaaccacaatgagataccatctcacaccagttagaatggcaatcattaagaagtcaggaaacaacaggtgctagagaggatgtggagaaataggaacacttttacactgttggtgggactgtaaactagttcaaccattgtggaargcmgtgtggcgattcctcagggatctagaactagaaataccatttgacccagccatcccattactgggtatatatccaaaggactataaatcatgctgctataaagacacatgcacacgtatgtttattgtggcactattcacaatagcaragacttggaaccaacccacatgtccaacaacgatagactggattaagaaaatgttgcacatatacaccatggaatactatgcagtcataaaaaatgatgagttcatgtcctttgtagggacatggatgaaattggaaatcatcattctcagtaaactatcgcaagaacaaaaaaccaaacaccgcatwttctcactcataggtgggaattgaacaatgagaacacatggacacaggaaggggaacatcacactctggggactgttgtggggtggggggacgggggagggataacattaggagatatacctaatgctataatgacgagttaatgggtgcagcacaccagcatggcacatgtatacatatgtaactaacctgcacattgtgtacatgtaccctaaaacttaaagtatawaaaaaaaaaagaatctacctacacttggctgggtgtgtggtggctcatgcctataatccccatgctttggaaggctgaggcaggaggatggcttgagcctatgaatttgagactgcagtgagctaggaacccactgctgcactctagcctgggtaacagagcaagaccctgtctcttaaaaagaaaataaaataagttaacaaatctgcctactcttgattgttctcctattgttgatacttgtatttagtccagagtttatggttgttatgtgtggcagcatttgtctagtgggaactcagtcatatcagaagcaaaactgggaactctaaatatggtcctcaaagtgtctttaatttgatggagaattcctggaacatcatgtgtaatagaatttactcatttgcacaaagccagaacaatgtttattttgtgttaagagtagaggttcttcttttagtaaaatttgaaattcttctttttaaatatttcaggcctagaggaaaggagaaatgaaatgtttgatttactgcaattgtaatttccccgattcatgctcaatttgcctgtgaaaaatcaataggaagctttagcttcaggtattatccaccattacacttgagagatgtgcagttcaatgtctatgctcaattcttatcttgggtatctaygggttttggaaaagtaatactggtaaaactaaattaattaaraataccaaagtaaataccttttttcccccttcttacttcctagaaagtagcacgtctggaaattgagaacaaagtccttcaggagcaattgaaacaggctttacaggtaaaggatgtcatgtttctttaacattgttaacaagtaaagaaaatatccacaaagaacttttcaaatgaataatttttactttgtaagctaagaggtctacatattctactatttgrctaggtttaaactatattcattttatgcattaggggtatattaataaaatttaatattcattcttatcaaaaatagcgagatataaagaaaagtaaactttcttaagctaataaaggcaatctattcatctgtcatggttgcagtgtgaacaaaagaaaaggaaaagaaaaaaagacaatgtatttcaagctgataagcaatatacttaaaggtaaaatactgcaggcattccaattaaactcagttgaaccaagatgttgactcttactactctttttaaaattttagttaaataatacaacaagaaatgaaaaaaagctataagcatttcataaatgaatagacaaaagtgtatttgtgtattataaaattgttttgcctaccatcttggtaaaaatgtaaaggacagaaatatgtagtatttgtggttgtatgctgaaatgagcaacctttcacgtacttctattatcaaaaaagtatgaattgatatattcatctgtttttgttaatagaagtataaaagatatttgttatgtctttctgggagacagaaaagacatagcaaaattggaaagatgtagccttttcactcaataaaagcttttaaaagtttatcctaaagaagaaaaaagtgtacagagattttgtacaagtatgtacaatgtcrtatgttttaatagcaaaaattttgaaatgatctaaatgtccattgttaaggagtttgctaagacaattatagtatattattaaatgtacttctattacctattctgatttaaatgtatgtttattgttatagaaacatatctatgacattatttaatgaaaagagcataagatgtaagtgtgtatagtaggacccaatttagataaacatttaaaaaatttggctgggcatcatggttcatgcctgtaatcccagcactttagggggccaaggccggtggatcactttgagcccaagaatttgcgaacagcctgggcaacatagtgaaamcctgtctctattaaaaatacaaaaactgactgggtgtggtggtgtgggcctgtagtctcagctacttgggaggctgaggtggggggataacttaagcccaggagactagaggttgcaaaaaaaccccgcagatatatatatatatagctaatatatatattagctatgtataattatatrttatatatattrtaatatgtattagctatatatatgcagggttttttatatataaatatataacatatttatatataaaaaaatatctttgtgtaatttccctctaacctttctaatatagctaatatatatataatatatatagctaatatataatatatattatatatatattagttatatttagaaaaatttaaaaaggatatatctcaaaatgttaatagtaatttttctttatgaggtgagattatttatgaattttctttttatttatataktcttttatataagtaagttaattgtatgactaaataaaaattataaaaagtgacatttttaaggagacttttattccagaagaaataaattgttttccacattttatttcattctttgatattataggtgctaattatccttcttatagtctatcaatttttataatgtataccttatatgaatttttattttgcttgtataataattagagccttaaaaataacagccaggaaaaactcctgggtataaaaatagccctcaaaggtggaagaggtttcttyacaacttctgattttaactgtggaattgttaaagtatcarttatagcaatagcttacctttgctcccttcaactcagtaaaaatgagttgagaaatcatgtaggcgtaaatatatgtagattcctgaatgtggtagtattggcaggaaaatatcagaaaatgcttaataaactggtacttttttaaaaacaggaagctgaaaaagctaagcatcaacttaactatttcctaaatcaagagaagttacttaaaagtgaggggaaaactgagacaacaatgcaagtgggtaatagtcaaacaaaagttaaaggtgaagattcaaaaaatataccattggagamagaaacaagaaaatcactggtttcagattcaggtggacaaaggacaagtgataaaatccaagaatatccacaggtgaggaaataaccaaaatggagacagtagtatatgttgtgagaaatttgtcttttatattattatttacttcatttgtatatgttatttaaaaattcatgcctctgtttttgggttkttttttttttttttttgagatggagtcttgctctgtcgccaggctagagtgctatggtgcgatcttggctcactgcaacctccaactccctggttcaagggattctcctgcctccgcctcctgagtagctgggattacaggcatgcgccaccatgcccggctaatttttgtatttttagtagagatggagtttcactgtgttggccaggatggtcttgatctcctgacctcgtgatctgcctgcctcggcctcccaaagtgctgggattacaggcatgagccaccgcgcccrgcctttggatttgtttttacttttgccctttaccttctgtatatgtcaactcattattatcttgaataccaaactatgacttaaatatatactgattttgaatgaccacataagcatctgagatttgagtcctttatttttaccttctctttttgtgtataatttttattgtgaactacctcaacttcttcctggaaagataaataataaaaatagtttctccgagggcaataaaaattattaaagttgttagatcatgtatataaacgaagtaaggtacaccgaattgaatataaaaacaaatatctaaagaaatataggattgtctgtcagctgctttaagacaaagaacaaaagaagcagcacaacttaaaatctgctagtcattttatatctgccattattataaaatctgctagttattttatatctgtgtatacgggctagtcatttacacaagaccataagctagctattagcacctccattctgagaatgaaaccaaaggtttaaaaaattagccatgccgcattacagtgagtaatattgagttagatttcaaattcaggtctttctcgctccaaaatcacatctgaagatatcttctttgcttgtctatatggctgcatttgaaacttgctttgttaaaagctttattgttttctatttcccagtatttatctcctaatccaaaacagaggttttcatatatgacagaaaaagttaaatagtaaaatgaacctgagcagaacagtaactaaaacatcacattgctttcacataagtgattctcattttagtgggtttatatatacatcaatacacacctgtcttcttatgtatctagcttaacattcattaataaaacatcttatatgctaggttctttgcaaagatgatgtatataatgtcatgtattcagctggcttgttctggtaatagtgaaacaggagatatcattattggagattttgatgtaatagaagtttatactcattgtccatgttcttatagtaatttaactgtaaccttctttctcaatcactgtattaaaactatttttgctgaggttatagcaaatctatttgatgctattctgaaggatgctttatagtttttttctttctttcttttcattttttgagatggagtttctcttttattgcccaggccagagtgcaatggtgtgatctcagctcactgcaacctccgcctcctggattcaagtgattctcctgcctcagcctgccaagtagctgagattacaggagcctgacaccatgcctggctaattttttatatttttagtagagayggagtttcaccatgttggccaggctggtctcgaactcgtgacctcaggtgatccacctgcctcagcctcccaaaatgctgggattacaggcatgagctaccacacccagccagatgatttatagtttaatctcatttgtcctcttagcagcatttaatatgtttaatcatttattttttaatayttttgtattatactttaagttctggggtacatatatagtctatagtttgagaaatagcataattatttgattttccttgtatatttttgggacacctcttttgtctcctcttgctctgctcattctttaaatgttagtagttctctgggttttgtcctagagtttctttttattccatatactctttctgaacatgctcatataccttcatggcttctagggccatataaatctcttatctctaactcgaataacacctaatttccagacctgttattcattaacttactgaatttttctgtttcaatgggcttcaaacatctagaattcaccatgtccccaaatgaaccaattgcgctcttctcagacctgctttatctctcagtattcagtctcctggcatcctcatccatctaattgctgaaactagaaagcccagcatcactgttatttcttcttttcctttgtcttgatccaattattatccatcaaattctgtccagttttctcaatattaatgacagttctgttagtcaggctcacaccaggactaattggtctctctctttccaggccagtctcatgttggtggctagttgaaaatccttggttatttattagttagtatataggataactattgtgactattatgacatatagacacaaaatgtatgatggctcaaacacaatggaagcttctttcctggtgttaatagtccaaggaagttcaaggtcagtcttcgtggtagggagttctgctcyacagggttgttaaggtatcccagcatatggaaggtttgccatcttatgtgtggcttcctgagccacactaggcatagttatctagctatcagaaaagaatatggaggacaaacatgagtaattttcattgacctggctggaggagatgcacattcttttttctcacgtcctatttgctacatttaactacagggggaattaacaaatgtagactaacaatgtgtctaagaagaagagaaaattagtttgttgaccatttaggagtctttgccacaggggaataaggataaaaccagttaatctctgcataaaagaaactgaattagatgaaaatcaggtccagaataaaacctagaatcaacatttatactataggaaaatatgtattatattcacaagaggtaatttattaataaaaatcacacttttaaggtcactgsscttttttttttttttttttgagagagagtctcactctgttgcccagactggagtgcagtggtgagatcttggctcactgcaacctctgcctccttggttcaggttcaracaattctgtctcagcctccygagtagctgggattacaggcgcccgccaccatgcccagctaatttttgtatgtttagtagagagggggtttcaccatgttggccatggtagtcttgaactcctgacctcaggtgatctgcctgcctcggcctcccaaagtgctgggattacaggtgtgagccaccttgcccggctggcctaaccttttggttacatacttctgtaracatatttgaacatgtattctcagtatacttattttaaaattgataaattacaaaaagtacctccacagtttattatatatartattagcattataaacacttcaacaagaatatttaaaaggattagataattatgtaatagataagtttaaaataaattttgagctactctgcctgtggagcaggcctgctctgtctatggatcagctattttcttgtactctgttgctctaataaacatgcttttctttaactcaaaaaawtttttttttgtttactaaaagtataaaaccttatttgctcttaatttagaaatataagtgtaattttagggcctactctccttctataatgtctcttccaatgctaaaatatgataatttctttgcttttttgataccttaatcttacgaaattgtcatattaaaaaactaccttaaatgatatttttctaaatgactgtaaacatttcatatgcatacttgatatttttaaatgtagtattatctttatcacagatcactgcccaaagcggaagactgattgaaaagaggtaaaacactttttaaaaatttgttccctcattttctaatctttatcagttcacatacctaagcaatgaaaataaccattctaaatttaatgtcacaaaactctttgaaactaattttaagtagaaaatgttagaaactttagatatcaaagttagaagagttgatgcagtcaaaatcaaaattaaatgaaaaatttaaatttaaatttaaattaaggacaatgtagaaacaaacttttttttcctgacaacagcaattaaaatttccagatagtgaggaactaacccttattttcaacttagttatcatcaagatgcatgagctagatacataaacaacttagtgaaaaatcatttttaccttccattttaactcagttactatatgcacacatatgtatgtacatgcatacacataaataattgagttgattgattcatccaattaawtcttatagttttcactagtgagtctctttgattagtatattatgatcgactcacagactttcttgattcacattaccatggagtaaagaggaattacctagaagtatgcatttatgtacttcattgccattttaaatatttatggattatagacccaggtgaattagcaagaattaggtaataagtgtaatgattaatggccagaagttttgaaaatgttcattttaaatgtttgtagtgaatgtttatatttatatgttttaaatactaactaaacatatactaaaaactatatgttttaaatacaatgtccaagagaaaattagacgttggtccacttgttgctttgcaaacttataatgrttggtttcttattattgatttctttatattttaaatatgtatagtcagtattataaacatttgagaatgtataagaaaaagtattaataattatcttcaacagtaatgggaacttatgtatcatgtagaaataggaaggaataaagcaaaagcatgktgcttttttttttttttttttttttttcttcaratggagtctcgcttttaattgcccaggctggagggcagtggcatgatctcggctcactgcaacctctgcctcccaggttcaagtgattctcctgcctcagcctycccaggagctgggattacaggcgtccaccaccatgcccggctaatttttatatttttagtaragacggggtttcgccatgttggccaggctggtctcaaactcctgtcctcaagtgatccacccacctcggactcccaaagtgctgggattacaggcgtgagccaccatgcccagctggtgctcttatattcatactcarattatggtaragcatggaatgctactatagttttccatgcaatcatggtgaygtatagcctttgaaaatcctacagagccagtagtttatcaccctgaagaacatgaggtggttaacttttgatataagttgttttaatattgaacatttagttgctgctgataaatgtgataggctctttgtacattggtaaatctcaraaaatagaaacactggcttacaaaaagcattktaaagagagtttctggtctctatgaagacatggtaaggcagtttcagttactttccatgggtgtttggaaaaatcttaaagaggggttatgataatgttacctagtgagttattacccctggcagccctcattctacttttctgataagtcacattttagaattttaatgggaagtgatagaatggaagaagggttcaatggagaacaacagaatgaggatgatggggaatatagtacatcaagattaaaaaaatcatagaatggatatatcaaataattcctcttaaatgcctttttccccctagaaatgttgattgatgtaataacttcaggaggaagattattttaattcatttcaattcagtttagctctaatgaggaaacactgactgagcatctatgctgtgcaaggcactgtgctgggtattatgggatataaagggcttcaaatatatggtcattgccctcaatgcattaacagtctagtagggccgactagacatgtwcaaaaataagtgaagtataatgcagacgttgcattctataaaacattaccaagaagctacatcaaagaagaggaaaagctatttctgactggattaagaattacataccatttaattttagaaagatggttgggttggattttaacagggaaatgtgaggaaagggtgtgccaagtggacagaactttgctttgaggcaaagatgaagatgtttagaatctatacagtgtgctcaggaagaggccaaaaattcattttgtttgcatcctagactaaggacaataatgggaaatatgagatgaartaggttgtttcagcttgataggttttatagaattgcacttaatagctttaggttaattattatatattatataataatataatatattacatattatattatgttgctaaatataataaaaattcaaactattaagcacatggcacaatattattcatcaaccttcattttgggttacttcttagatgctaatagagtttctgaaatactttggaaaagtctcccaaaccttcagagagtggatgggagcgaagtaaggagaccccacctgagcagatacatggtattgcttacaataaagtacatttttgctctttacaacatttatcagtttattttggcttagggaatgagttagtggtaaatagttaatcaaacaatagattttaataatttattgtttcacatcatgtgcrttgttagcttttcttaaatgttttgtggcattgaaattcacactttttagaaatgaaaatgtgaactaattcatggtgttttattttgaagagttacacagtcaacctagttctttctaaatactttcattaggactttcattattacttgggtttgctatcaagcacgaaaacatacaagagaagagtgttggaacatgtccattttttttctccatagattagatgattagctgttaaatttactcattcatttattcacccaactcattcaagagatacttttgtcaccttcatatgtccagttctcttttgggtattgtgttttactgaaaaatcagacagataagatgccttttcttgtggtacttacattataacaggagagacaaaaaataaacaagtaaaaataaatgaacaagataattttagagactaatacatggagataatgaaactacatatctgacagtcacagggaaggataatttagattgggtggtcaaggaaggtattaacaatgaagaaaaggcattatctaattgtgaaataaaggctgttaaaatattttgtttcttttcaatttttatcaaaataaatttctgcaaatgaaaatgtatgttataactaaaagatctagactagaggagcttttaatatcctcagttaactgttacacaaggggcatattactagtgacccaaatagtacgcataaggtagattttatagaggaaaccttgcaatccaggaagcaatagaggatataatatcccctgagctgtcattattccgtagagaaatagacttagattaagcaaagctggattcaccatagaagatgctcctgagaggaacccccttctcacatatcacttcacaaaattataggggaattgggagggcatagagagcacctagtcaaccatgtatcactgagagcttcctggttggggcagtggccttgttggaaaaagggagaagggagtatgtactttgtataccaatgtagctggtatcagtgagtcaaacagtcctggtgagccagctctgtgaaaccacaaaaagagggaagaaagagaatcaccgggaccatccgtaaataaagatttgcctcactgctgtctatcctttgatcttagaractcattattatagatctctccatcagccctggctgacacctggttctgagcataccaatttccttagtattgtctgggagaagaatattagtaaggtcaccagctgggttagatgaggatgtagaaccaacatcctaataagttcacattatgaactctttttcctggccaagcacagaaacctttgtttaggaatgtctgttccatatctgccataggaaagagaaagtcgttcatcacctcccttgaacatccatctccaaccatttcccagggtcagatatgttcacatctgacaaacagatctgtttttctccatggagatgagccagattgtcctttgtctggaatgatagttcagtggggaccccaaagttaccattttgccatcataggtcacctgcaggtttcaaagaggatgtctgcagcaccatctgttgcttttaaatgagcaatatgttgtgtgttcccatgcactgaggtcaaagcaaagggggttaaaaaaaaaaaaaaagaaaaggagtatactattcctcttgaaatgatatttttctctactccctaacttctaggtgctttggagtttaaccatggtaagaggggcccttgcttggtacggtagcctatagcttgtaaacaattagggaaaactggactgacaagccttgtggaggttgttttcaaaaaggctgccttaaatggcaagtagaataagcctgatggacaacagtggcctgtgtgtctttttttttttttttttttttgagatagggtatcactttgtcccctaggctggagtgcagtggcaccatcatggcttactgcttcttcaacctcccacactgaagccatcctcccaccttagctgtctgattggcggggaccacaggcatgcatcaccatgcccagccaattgttttattttttatagagactcagtctccctatgttgcccaggctggtctagaactcctggactcagggacttttcgcacctcagcttcctaaagacttctatgtcttttgaataaattccttattggccattgtgttccttcatagcgggatggatttgaacaggsacccaagactatactggagatgatggttacacattcttaattggctttttcatgtcacatgttttcctttagattcagttctttctcatggacatataaacatagaatataagaattgagcttgtgactaagttgttgtaactatttccttgggcaaatgttacctcagaaaagcatgtgtaaagagttctgttggccargtgtggtggctcacgcctgtaatcccagcattttggggaggctgaggcaggcagatcacgaggtcaagagttcaagaccagcctggccaatatggtgaaaccccatctctactaaaaatacaaaaattagctgggcatggtcgtgcgcgcctgtagtcccagctacttaggaggctgaggcagaggaatcacttgaacctgggaggcggaggttgcagtgagctgagatcgtgccactgggtgacagagcgagactccatctcaaaaataaaataaaataaaataaagagttctgtcctagggaacccaatagcctgacagtgtaactaggctcattactaatggctcattagtctttataatagtgcaattcagtcaatctgaggagattgtgctctatggccatgaagaatgcctgaagtttacccagttttgaagcatgtccaataccatgggatctcaacaactcaccatcattatggtgaaggaatgtatcactccataagattttatgacctttgagagaggcttttccattagtgaatcatgctttcttgtcaggtggcaaatctttcaggcaagtgccttactgagtcaatggcttgtttaaaacagcagagggatctctgtgcctgtgagtgtagggccatattttatgaatttgtctaaggtctaattgattggatgtgctatatcccccttttaatagaattttcctgggcatgtaccaccttatcagattttggattagagaagacccataatgcgataggaatgtcgggttgaagagtgagaaaagtctgccccattagggctcagtaataggctagcagtcactggcatgtgccactcagcaggagaagaaaatcatttcatccaaagatgtaggaaatgacaaataacttgaagtatttttgccaaaagcttccgtcagaaaatggtttcttacaggtatgtgtaatcccatgagtttgaaagatacggcaaaatctaaagttagaacttgtttttaggatgcctagacctcttccaaggcatgttaatatatgggcttctattttaaattagttgcattgatatagtgctttgaagaatcaccaggtgtaaaatgtgatatcaccactacctaacaaggaaaatcgtttgtggttgggactggaggcccgataaattttcctttaaagcagcagtttyctgcctttttagcaccagggaccagtttcgtggaagactccacagaccaggatggagggggtggtttcaggatgattcaagcacattacctttattgtacactttattattattattatttcattataatatataatgaaataattatacaactcaccttaatgtagagtcagtgggagccctgagcttgttttcctgcaactagatggtcccatctgggggtgatgggagacagtgacagatcatcagacattaggttctcgtaaggagcacgcaaactagatccctcacatgtgaagttaacaataggatttgtgcttctatgagaaactaatgcggctgctgatctgacaggaggtggagctcaggtggtaatgcaagcgatgggagagtggctgtaaatacagaggaagctttgcttgctcactcgccactcacctcctgttgtgttgcccagttcctaacaggccatggactggtatcagtttgtggtccaggggttggggatgcctgctttaagtgatatagaatgtatctttttgatgctgtccagatgatgactgccttctccaaatttatctgaataacagggccctggatcatttaaagttatctttaatcaggtatgcctagacaacatgtaatgtttcttcggtgttgatcacagtcatcagtgtgatataatatctggagattctagcaatgcacattttactgggttttgtcccacattgaaaatgtgtaacaggaattaaaacattctcaagaaggattattaaaggtatatgtactaatcttggcatatcttgcsaaatcctcagctacatatgtgtgtcagtagtggcagcaatttattctatagcttgtgtaaggacagagactggagtaagtagagctgtttctttccttgtttaagtttcagtagtccactatggagtgtcaagtactagtttttgttttttttttcttaaccaaacagactagcattgcatagtgcattgattacattttgtttgaaaaatactttatttttatgtttcttgtatgaaatattatggaatgatcttgccagttcagacaggttttcaccatgtgcttggccagccattatggaggttatcaatagataattatccaactaatatggctgtgtacctgttctcggtttaataattcagaatgtccttatatcaattatataatctgagaaagaaacagcaaacagtattaatatagagtacaaaaatagtagccttgtgtgtttgggttccccaagactactgccctcactaggagagctcacagcactcatcaaatagtcattacgatgaccatgatttattacataaaaaggatgcaaagcaaaatgagcaaagggaaaatgtgcatggtaaaaatccaaaagaaacatcctacttaatctgagattatggtgtcccgtaattccttagctacctgatcactatagccattctcactgagaacaagcaatttgttctttcttgagtttttaagactatatacgatatggacactgagatattggccatttcaacttagtagtttgtctggtataaggcttccartggggttatttcccacttcagcggtagcccaaactctctgtttttcaaaagctgtaacatacacgagtcacataccactagctacacataacaaggtttattgagaaaaacttacaagcagaatagcgagcagagcacattgcaatattgcagttatcaatgaaggaccttgagagtctctgccaagctaccaagtagggaagggagatattaaccgaggccattcagaaacatgtttgtcattctcattaactgatgactttttttttctagtaagagaatagtttttcttttatcctatataatttccccatagtttgagttccatttctgattatttcagtaatagcattgctggtggagctagatgtagctaggcaacattgtcagcataagaattatttatacatttacaaactatttctaagcagtccatcaccctaattttctttaagttaataatttcaagtgttttaaccttttatcttttccaggctcttagtcatcttggacttttactgaacctttaaaactttttgactttcttttcagttgaggagcctaaaactagtcactatgaatattttgatcaacattaattgtattgtattgtaaaaactatcaaaatatttataacttttgacttttataacacctatattgaaatttttctataaaaktgatttttagaatcatgttagtttgtactgtattacaaacttcgggtcctagatatttttgtttttcttgtatataggaatgagttccacatgttgtattgttgcagataagaatatcaataatattttattagtattttattgataatttgtctcgtatttgcattgataattaaaaattcagtgtaacataaatacctgtgagagtttttttccctaaggggagaggatatggattgggggttgtgttgacattttagaaaatggatggagttaaggaaagttccggaaaaagaaagtattggaaagaaaaaaaaaataaagagggcagtttgaaaaagaaggtattagaaagaaaaaaaaataaagagggcagtttgggcagttaacattcaatgacattttccattttgtctgatttaagaattatgaagtgtccatgattatatgcataataaatagtgcccttgtacatctatttgcttagtaagaaaaggatgcaatgctcagatcttcagagttaacaaatgcttttgcaagcaggaagagatacactctttataccacttcagtgatgttgaagactgtcatgtagagtgctgtcaatatgcttatataaaagctgctaaaatacatgctcataattagactattatacggtagtatttagacatggagtgattattagagagtcttaatctaaagcagacagtgaatgacacaaatttagtaagatttataaactatattttggttgtttttggcaattcaccaaataattgggagggtgaaaacaacttgctttattattattttctttgtggctataggctgccttctatagtcatcattgctgttctcctcctcctcctccttcaactcctcctcttccttctcctcattctcctctttctcttcctcctcctccttcaccatctaatcagtagggctttgaaagtatttccacatctctttgactggcacaagcttgaatacagcattgcttgcacaccttcctagtagtttttattcctgaccccctcagtggaagtatcatggttgttatgctgtggttccttatggwtgcaagagacaacagaagtggggaaagcctgaacgtgggaatatggttataaatgtacagtatattagcatttaaggcattgttctttgtattgccacatattttctcattgttataagaaaattgcctgtgtagaatcaagtgattaatgatgtcccctaataaccatttcagaatcttaaaaaacatttgctttctatttttagctatgtgataatattagtgttggggtggtggtttgtgaataactgtaacaaatagtgtccagatgagtgttagactttattttagaactaatcatcttaaattcaaacacctaatagaactaataaatcaggtttgagaatgagatgctatccttaatttaggataggaagccagctattctctttacttttaatatggcaatttgctttataatgccactacaaaagtctgtttgtcataaattctatgtttttttaaactgtcagcactatatatatatatatatatactttttttttcagagctgtcctctccaccccactccccttttttataacccaaactttgcagttcaaaattcattctaaactaacaaacgtaggataggtggcagtaggtacattgaaaaatttttcttctgtgagaccaaacttcaaattattttaaacactttgcaacaaaccttaggcaaattatgtcaactggggtaatagctgttcaaaacaaaatgcatcaaattctgttgcatttcataggactaggaaagctttgttaaatttttatatagtttgatcacttaaattatcatctaaactagaatgttgggacaacaagcagaaactgggattgtgcatgcaaactgtgacacctggttaccctagttctggaatccagaaagctgatcctttggcaactggtagagaataaataccccttatcttaaagaaaactaactcagagcttgggaaattgactttggtgaaagatggtgatcttttaatgtcaaagtgactgtggagatattttaattttcattctgaaataaaattgtggaaaaataattttggaataaatgtgactaaagggtaaatctccaaaccatcctatgttctactttggctgagtaaatttttcttgttctatggcttacaaccttgaataatgattatattggagtattttaaatgatttccttagtattatgtatccctttaaatcacaggacatatgttactatcttcaacktgttacctagcatcaatttcatattggaataaccataaactaatgagtaattatacttacttatttaatatccttatatattattaaaatgattcttcagttgcaaataaaatggtcttcacataatctaataccagatgttttataattctaaagctcagagaagaaacgatctagccctgctatttcagatctttcacagatccttaagtctcaagatgaatcagcatttttagagagttcaaatgaagtttcagttgctgaaaaccaatcctataaatctccatcagagacccatgataaatcacttacaayagtatcatccagcaaagaagttcaagattcactgtctgttggaacattggctcaaaaaaacgaaacagtgatatcaccattcattttacctcctgttcttacagaaagtaaaaaggtatgatatatatagaaacttgaaagctgtttatttcatattgctccttcaataaataaatgctaacccatttaaatgggttaaaaattcaatattttcttatttcaagagaattaaaagtttgccttttaacacaacccactttatatttagaatgctgaaagtaatatttgggaatctaagtaatattcttaacttataaaaattgtttaatattgattaaaaagttgtgggttacattttagttttaatggtaatataaaagatatgtcattctgagataagggaaattttcatagttttcagcttcatctacaaaaaaaatttttatacaataagatgattgtaaaagcaaactaattttgaaacaattttatataggtctctaaacaagacctagaaaatttttagaattgcttttgttaaaaagcatttaattaggaaattctcagggcaaaaatgctgggaaaaagggaaaagataaaagggctgtacatatttgacatgtatccacaatatatttttatcatacattttattaaagtattcctataataataattttgtaagccatttgagttcttctaragattaaaacagactaaaatataaatctaaacaagaatcttaataattattaacactatttgcttagaactatttgcgagggaaaaatcacaatattgcctgggcaccctccttgctattcagtgttcccaattgcctctcaggtccrttaattgttctgactttttaatttgatacattcaggaaataatgaaaaataaaatgtttctgcaatgacattgtagatgagagcraaaagctagctctttttctcaaagcaggtaattaaataccagtcttgatatatatatatatgtatataatttctaattacttattacaacttttgttattaaggctgatgtttcagaagaacaattacaaaagatgactgaagaacaaacttaccaagcagcagaaaaatctcaaggtaaaaagactctgttttggaagatgaaaatgtgattgaatgattatgtgtttccatgatataattataaataaatgaggggaaaacattattaaatatacaaacaacttgttagggagtcactggatagcatacaaatataacgacaattatataaaaattatctcggtgggccaggcgtggtggctcatgcctgtaatcccagcactttgggaggccgaggcgggtggatcacgaggtcaggagttcgagcccagcctaaccaacatgatgaaaccctgtctctattaaaaatacaaaaattagctgggtgtggtggtgcatgcttgtaatagctactcaggaggcggaggcaggagaatcgcttgaacccaggaggtggaggttgcagtgagccgagatcacgccactgcactccagcctgggcgacagagtgacacttcatctcaaaaaaaaaaaaaaaaaaaaaaaaagattggtgagttatcattatattacttagagagtctattttaactaagatctgtgtaaaggggaagcaatagctttatctcaagcaaataatagtatgtggcattatgaattcttaatatgacacccgaaattaatctgagcatagcaggaaaaaagatgatttctgtatatgtaatatttttgctaggttatttaggtgtttgatatacggttaaaagcaaagatatttttttcttcctttccaacatgtatcatgttagtattcaatcaatattttattgcattgacctaaacttaaattttttttttttttgagacagagtcttgctctgtcgcccakgctgkagtgcagtggcatgatctcggctcactgcaagctccgcctcccgggttcacgccattctcctgcctcagcctccygagtagctgggactacaggcgcatgccgccatgcccagctaattttttatatttttagtagagatggggtttcaccgtgttagacaggatggtctcgatctcctgaccttatgatccrcccgccttggcctcccaaagtgctgggattacaggcgtgagccacygygcccagccaaattttttaattattattatattttaagttctgggatacatgtgcagaacgtgcaggtttgttacataggtatacatgtgccatggtggtttgctgcacccatcaacccgtcatctacattaggtatttctcctaatgttatccctctcctaggcccccacccctgacaggcccctgtgtgtgatgttcccctccctgtgtccatgtgttctcattgttcagctcccacttatgattgagaacatgtggtgtttggttttctgttcttgtgttaagtttgtagagaatgatggtttctggcttcatccacgtccctgcaaaggaygtgaactcatcctttttatggctgcatagtattccacggtgtatatgtgccatattttctttatccagtctatcattgatgggcatttgggttggttccaagcctttgttattgtgaacagtgccacagtaaacatacatgtgcatgtgtctttatagtaaaatgatttagaatgctttgggtatataccgagtaatgggattgccgggtcaaatggtatttctagttctagatccttgaggaatcgccacactgtcttccacaatggttgaactagtttacactcccaccaacagtgtaaaagcattcctatttctccacatcctttccagcatctgccgcttcctgactttttaatgatcaccattctaataaatgtgagatgatatctcattgtggttttgatttgcatttctctaatgaccagtggtgatgagcttttttcatatgtttgttggccgcataaatgtcttcttttgaaaagtgtctgttcatatccttcgcccactttttgatggggttgtttgtttttttcttgtaaattcgtttaagtttcttgtaggttctggatatcaaccctttgtcagatggatagattgcaaaattgttctcccattctgtaggytgcttgttcactctgatgatagtttcttttgctgtgcagaaactctttagtttaattagatcttatttgtcaattttggcttttgttgccattgcttttggtgttttagtcataaagactttggccatgcctatgtcctgagtgatattgcctaggttttcttctagggattttatggttttaggtcctatgtttaagtctttaatccatctcgagttaatttttgtataaggtgtaaggaagggatccagtttcagttttctgcatatggctagccacttttcccaacaccatttattaaatagggaatcctttccctattgcttgtttttgtcaggtttgtcaaagttcagatggttgtagatgtgtagttttatttctgaggcctctgttctgttccattggtctatgtatctgttttggtaccagtaccaagctgttttggctactgtagccttgtagtatagtttgragtcaggtagtgtgatgcctccagctttgttgtttttgcttaggattggcattgacctaaacttttaagacaaaattaaatggctgtggtggaggatacaggagcaacactcttctattttgttttgaagtgggaatgcctctgtttgacctgtgatgatccattgtctgagctaaatattcattattatctaaagacgttttcttttatcccagcagtcaagttgaactgaattaatctagttaaaattttcaaaatatgaagtatacctaacataaaatatatcattttaaccatctttaagtatacaattcagtggcgttaattacattcacagtgttgtgcaaccatcactaacatctatttccacaacttttcatcactcccaaaggaaactcattaagcaataactctcattccccgcattttcctccatttkgggttgctgtaacagaataccacagactggctaatataaagaaaaatttattttttacagttctgaaggctggggagtccaaggtcaagggacctgcctctggctacagccttcttgctgcatcatcccatggcagaaggtggaagggtgagagagcatgagagagcaacagagagaggaagggggacaaactcgggagcctactttgtgataacttaccccctcctacaataatggcattaatctattcatgaggacaaagccctcattacctaattatgtcttaaagagcctaactctcaacattgttgcaccagggattaagtttctagtatatgaactttaggagrcacgtttaaatcaaagcacacactgatttgtattctgtgactgctgaatttatatgttaactctaatgtttttgtgtggaacctttgaaattatatgtatatatgaatcatctgtgaataaagatagttttacttcttcctttccaatttggatggcctttgtttctttttattttctaatttctctgactggatcttttagtacaatgttgaataacagtgatgaaagtggacatcctcattttttccttaagaggaaaattttcagtctttcacaattggatattgttatggtttgaatgtataccctaaaagttcatgtgctggaaacttggtccccattgtagcagtgttgacaggtgggacctttgggagttgattaggtcatggaggccttgccacatgaataaattaatccattcatagattaatgggttatcaagagaatgggtcttctttaaaagccagtttgtctgtctcttgtgagcttcttcgccatgtgatgcccagaacagcctcagcactctgcagagagagttcctaccagcaaggaggcactcctccgatgtggctcctcaactttgaaatccccagctttcagaactgtaagaaataaatttcttttctttacaaattaccaagtctcaggtattcagttatagcaatagaaaatggactaaggcaggtatattaggtgtgggtttttataaatgtactttatcatgttgtggaagttttcttctattcataattttgtgagagtgtttttcaaaccatgaaatggtaacagattttgtcacatgcatttttttgcatcaattgagatgagatgatcatgtggctttttccattgttckattaatgtggtgtattatactgagtgattttcctagtttgaaccacactttctttcctgggataaatcctacttggtcttggtgtatgattcttttaatatgccattagtccatttttctagtattttttgagaagttttgcatctgtatcataaggatactgctctgtatgtttttaaaaataatgtctttttctggttctggtatcatggtaatgttggtcttattttgtaagttttccctattcttttattttttagaagagtgtgaggagaattggtgttaaatctttaaatgttttatagaattcatcagtgaggccatctggtcctagacatttctttgttgaaagcgttatgattaccggttcaattttcttactagttataggtctgttcagattytcttttttaaatttttagtttataatttttttctgggtacctagttggtgtatatatttatggggaatatcagatattttgatactggcrtataatgtgtaataatcacagtagggtgaatggggtatccatcatctcaagcatctatcctttatgttacaaataatccaattatactttcttagttattttaaaatgtataattaaattattattgactatagtcaccctattgtgctatcaaatactagatcttattcattctttctgkttttgtgtactcatcctcgtttcccccactatgcttactagcctctggttaaccatccttctactctcaatgtccatccatgagttcaattgttttaatttttagctcccacaaataagtgaaaacatgcagtttgtctttctgtgcctggcttattkcacttaacataatgtcctccagttccatctatgttgttgcacataaacaggatctcattctttttatggctgaatagtcctccattgtgtatatgtaccaaattttctttattcattcatcygttgctggacacttaggctgcttccaaatcttggctatttcattattttgaatgttctaagacttgttttgtggcctaacaaatggtctatgcttgagaatactccgtgtgctgaggagaaaaatgtgtattctggtgccactgaaagaaatgttctgtaaatatctatttggtttatagtgtagattaagtacgagatttctttgttgattttctgtctggaggatctgtctaatgctgaaagtggggtgttgaagtctccaactgttactgtatttgggtctatgtctttctttagctttaataacatttgctttataaactgtggtgctccagttttgggtgcatatatatttacaattgttatattatcttgctaaatttacccctttatcattacataatgctcctctttgtctcttcttatagtttttatcttgaaatgtattgtgtctgatataagtgttgctactcctgctgatttttttggtttccatttgcatggaatatgctttttttcatccctatgctttcagtctatgcatatccttataggtgaagtgtgtttattatactcaaccaatcattggatattgattttttcaaatctattcagctactctgtatcttttgattggacagtttagtctatttacattcagtgttgttattgattctaaggacttattcttgccattttgttattgcttttccagttgttttgtggtcttctcttccttctttcttccctttttgtcttccttttagtgaaggtgattttctctggtggcawgtagtaattacttgctttttattttttgtgtgtccattgtatatatttttagatttgaggttaccatgaggcttgcaaatcatataacccattattttaaactgatgataacttaacactgattgcacaaataacaacaacaacaacmgcaaaaacaagcaaaaaggaaactagcaaaaactctacactttaacttcatccccctgctttttaactttttgatttttctctttatgtcttattgttaactatgtcttggaaagttgttgtagttctatttatttttaattggttcattatttagtctttctacttaagagtattttacacatcacaattatagtgttatactattctctgtttttctatctgctactacctgtgagttttataccttcaaatgatttcttattgttcatgaatgtccttttctttcagattgaagaactctctttagcatttcttataggacaggtctggtgttgataaaatccctcagcttttgtttgtctgggaaggtctttatttttcctttatgcttaaagcatattttgccagatataatattctagggtaaaagtctttttccttcagctctttaaatatgtcctactactctctccaggcctgtaagattttcactgaaaagtctgctgccagatgtattggagctccattgtatgttayttgtttttttccctcttgctgcttttaggattctttctttatccttgacctttgggagtttgattattaaatgccttgaggtagttttctttgggttaaatctgtttctataacattcttgttcttgaatattgatctctctgtctaggtttgggaagttctctgttactatctctttgaataaactttttacccctatctccctctttctacctcctctctgaggccagtaactcttaaatttgccattgtgatgccaataatgcttaaattttgcctttttggactttgcagctaataacacttaaattttccctaatttatagatcttgtrggcatgcttcattgttttttattcttttttctcctctgtgtattttcaaatagcccctcttgaaactctctaattttttcttctgcctgatcagttctgctattaaggactctgatgcattattcagcatgtttattgcatttttcaattctagaattagggaaaacttaattctagaattaggaaaaattaagtgttattagctgcaaaggccaaaaagggcaaatttaaggattattggcatcaaaatggcaaatttaagagtttttgttagtttcctttttgcttgtttttttgtttgtttgtttgtgcaatcagtgttatcatcagtttaaaataatgggttatatgatttgcaagcctcatggtaacctcaaatctaaaaatatattaatagatacacaaaaaataaaagtgagtaattactacattgccaccagagaatatcaccttcactaaaaggcagaggagtctcaccagcaycaccacaggcccatggggagtgctgccagggtgttacctgtgtttatttaaggaccaagggctcttcagttagcttttggtgaatgctgccaggcctgggattcacccttcagggcagcgggctcccatctgtcccagggtaggtccagaaatgccatctaagagcaaaggtctggaattggagacctcaagaaagcacttggtgctctttctcactgtgagcgacatggtacctaagctgttttttggttcttatgaaggtcctttttttgtgtagatagttgttaaatttggtgctcatgtggagaggactatttgtggaagcttctatttagccatcttgctccacttcctctatagttcagattttctattcatgatttagtcttggtaggttggtgtttctatgaatttattcatatcaccttggtaatccaatttttgttttacagttgtgcattgtattttcttataatcctttttagtttataaaattataatgtttctttttcatttctcattttagttgagtcttctctctcttttattcaatctagctaaatgtctcaattttgtcagccttttcaaagaaccaattcttgatttcatggattttacctattgtttttctgtttacttcatttatctctgatcttacctttattaatttttctgctagctttggatttaggttgtcctttttctagtttttttaaggcataaagttaggttgtttatttgagattttctttttaatgtgtgtctacagctctaaatttcatttttttgtacaactttcgctgcatcttataagttttaggtaaatttttatttttgttttcatttrtctcaagatatatattttttaattttactttaagttctagggtacatgtgcataacgtgccagtttgttacataygtatacatgtgccatattggtgtgctgcacccgttaactcgtcatttacattaggtatatctcctaatgctatccctccctgctccccacaccccccgacaagcccyagtgtgtgatgctccccaccctgtgtccatgtgttctcattgttcagttcccacctgtgagtgagaacacgtggtgtttggatttctgtccttgcaatagtttgctgaaaatgatggtttccagcttcatccatgtccctataaaggacatgaactcatccttttttatggctgcatagtattccgtggtgtatatgtgccacattttcttaatccagtctgtcattgatggacatttggttggttccaagtctttgctattgtgattagtgccacaataaacatayrtgtgcatgtgtctttatagcagcatgatttataatcctttggktatatacccagtaatgggatggstggatcaaatggtatttctagttctagatccttgaagaatcgccacactgtctttcacaatgcttgaactagtttacagtcccaccaacagtgtaaaagcattcctatttctccacatcctctccagcacctgttgtttcctgactttttaatgattgccattctaactggtgtgagatggtatctccttgtggttttgatttgcatttctctgatggccagtgatgatgagcattttttctgtgttttttggctacataaatatcttcttttgagaagtgtctgttcatatcctttgcycactttttgatgggtttgtttgattttttcctgtaaatttgtttaagttctttgtagattctggatattagccctttgtcagatgggtagattataaaaattttctcccattctgtaggttgcctgttcactctgatgatagtttcttttgctgtggagaagctctttagtttaattagatcccatttgtcaattttggcttttgttgccattgcttttggtgttttacacatgaagtccttgcccatgcctatttcctgaatggtattgcctaggttttcttcaagggtttttatggtttcaggtctaacatttaagtctttaatccatcttgaattgatttttgtataaggtgtaaggaagggatccagtttcagctttctacgtatggctagccagttttccgagcaccatttattaaatagggaatcctttccctattacttgttgttgtcaggtttgtcaaagatcagatggttttcaatgtgtgatattatttccragggctctattctgtccaactggtgtatctctctcttttggtacctgtaccatgctgttttggttactgtagccttgtagtatagtttgaagtcaggtagcatgatgcctccagctttgttcttttggcttaggattgtcttggcaatgcaggctcttttttggttccatatgaactttaaagtagttttttccaattctgtgaagaaagtcattggtagcttgaaggggatggcagtgaatctataaattacgttgggcagtatggccattttcacgatattgattcttcttatccatgagcatggaatgttcttccatttatttgtgtcctcttttatttcactgagcagtggtttgtagttmtctttgaagaggtccttcacaggccctgtaagttgtattcctaggtattttattctctttgaagcaattgtgaatgggagttcactcatgatttggctccctgtttgtctgttattggtgtataagaatgcttgtgatttttgcacattgattttgtatcctgagactttgctgaagttgctcatcagcttaaggagattttgggctgagacgatggggttttctaaatatacaatcatgtcatctgcaaacaggggcaatttgacttcctcttttcctaattgaataccctttatttctttctcttgcctgattgccctggccagaacttccaaaactaagttgaataggagtggtgagagaggacatccctgttttttgccagttttcaaagggaacacttccagtttttgcccattcagtatgatattggctgtgggtttgtcatagatagttcttattgtttcgagatatgtcccatcaatacctaatttattgagagtttttagcatgaagcrctgttgaattttgtcaaaggccttttctscatctgttgagataatcatgtggtttttgtcattggttctgtttatatgatggattacgtttattgatttgtgtatgttgaaccagccttgcatcccagggatgaagccaacttgatcgtggtggataagctttttgatgtgctgctgaattggtttgccagtattttattgagtatttttgcatcaacgttcatcagggatattggtctaaaattctctttttttgttgtatccctgctaggctttggtatcaggatgatgttggcctcataaaatgaattagggaggattccctctttttctattgattggaatagtttcagaaggaatggaaccagctcctctttgtacctctggcagaatttggctgtgaatctgtctggtcctggacttttttggttggtaaggtattaattattgcctcaatttcagagcctgttattggtctattcagggattcaacttcttcctggtttagtcttgggagggtatatgtgtcggggaatttatccatttcttctagattttctagtttatttgcgtagagatgtttgtagtattctctgatggtagtttgtatttctgtaggattggtggtgatatcccctttataattttttattgcgtctatttgattcttctctcttttctttttagtcttgcgagtggtctatcaattttgttgatcttttcaaaaaaccatctcctggattcattgattttttgaagagttttttgtctctatctccttcagttctgctctgatcttagttatttcttgccttctgcaagcttttgaatgtgtttgctcttgcttctctagttcttttaattgtgatgttagggtgtccattttagatctctgctgctttctcttgtcggcatttagtgctataaatttttctctacacactgctttgaatgtgtcccagagattctggtatgttgtgtctttgttctcattggttttaaagaacatctttatttctgccttcattttgttatgtacctagtagtcattcagaagcaggttgttcagtttccgtgtagttgagtggttttgagtgagttgcttaatcctgagttctattttggttgctctgtggtctgagagacaatttgttataatttctgttcttttacatttgctgaggagtgctttacttccaactatgtggtcaattttggaatacgtgtgatgtggtgctgagaagaatgtatattctgttgatttggggtggagagttctgtagatgtctattargtccacttgttgcagagctgagttcatttcctggatatccttgttaactttctgtctggtcgatctgtctaatgttgacagtggggtgttaaaatctcctattattattgcrtggtctctttttaggtctctcaggacttgctttatgaatctgggtgctcctgtattgggtgcatatatatttagaatagttagctcttcttgttgcattgatccctttaccattatgtaacggccttctttgtctctttttatctttgttggtttaaagtctgttttgtcagatactaggattgcaacccttacctttttttgttttccatttgcttggtagatcttcctccatcccttttttttgagcctatgtgtgtctctgcacatgagatggttctcctgaatacagcacactgagggtgttgactctatccaatttgcctgtttgtgtcttttaactggagcatttagcccatttacatttaaggttaatattgttatgtgtgaatttgatcctgtcattatgatgttagctggttattttgctcattagttgatgcagyttcttcctagcctyracgatctttrcaatttggcatgtttttgcagtggctggttgttcctttccatgtttagtgcttccttcaggagctcttgtaaggcaggcgttgtgataacaaaatctctccgcatttgtttgtctgtaaagtattttatttctccatcacttatgaagcttagtttggctggatatgaaattctgggttgaaaattcttttctttaagaatgttgaatattggcccccactctcttctggcttgtwgagtttctgccgagacatctgctgttagtctgatgggcttccctttgtgggtaacccgacctttctggctgcccttaacatttttttgtttttcatttcaacgttggtgaatttgacaattatgcrtcttggggttgctcttctcaaggartatctttgtggcgttctctgtatttcccgartttgaatgttggcctgcctcactaggttggggaagttctcctggatagtatcctgaagagtgttttccaacttggttccattctcccygttactttcaggtacaccaatcagacttagatttggcttttcacatagtcccatatttcttggaggctttgttcatttcttttgactctttttttctctaaacttcttgcttcatttcattcgtttgatcttcaatcactgataatgtttcttcaatttgatcaaatcggctactgaagtttgtgcatgtgtcatgcagttctcgtgccatggttttcagctccatcaagtcatttaaggacttctctacactgtttattctagttagccattcgtctactcttttttcaaggtttttagcttcttgcgatgggttcgaacatcctcctttagctcggagaagtatgttattactgatcatctgaagtcttgtctcgactcatcaaagtcattctccatccagctttgttcggttgctggtgaggagctctgtttctttggaggagaagaggtgtctgatttttagaatattcagcttttctgctctggtttctccccatctttgtgattttatctacgtttggtctttgatgatgctgacgcayagatggggtttggtgtgcatgtcctttctgtttgttagttttccttctaacagtcaggaccgtcagctgccggtctcttggrgtgtgctggcggtccacgccagaccctgtttgcctgggtatccagcggaggctgcagaacagcaaatgttgctgcgtaatccttcctctggaagcttcgtctcagaggggcacccggccttatgaggtgtcagtcgcccccctactgggaggtgcctcccaattaggctactcaggggtcagggacccacttgaggaggcagtctgtccgttctcagatctcaaactccatgctgggagaaccgctactctcttcaaagctgttggacagggamgtttaagtctgcagaagtttctgctgccttttgttcagctatgccctgccctgagaggtggagtctacagaggcaggcagacctccttgggctgcagtgggctccacccagttggagcttcctggcggctttgtttacctattcaagcctcagcaatggtggatgccccacccccagcctcactgtcgccttgcagtttgatctcagactgctgtgctagcaatgagtgaggctctatagatgtgggaccctccgagtcaggcacgggatataatctcctggtatgccatttgctaaggccattggaaaagtgcagtatcagggtgggagtgtcctgattttccaggtaccatctgtcatggcttccctttgctaggaaagggaattccctgatcccttgagcttccagggtgaggcgatgccctgccctgctccgtgggctgcacccacgtgtctgggaagccccagtgagatgaacccggtacctcagttggaaatgcagaaatcacctgtcttctgcatcattcacrctgggagctgcagactggagctgttcctattcagccatcttggtgccacccctgtctcaagatattttctaatttaccttatgatttattgtgggacccattggtagtttaagagcatgttgtttaaattcaacatatttgtgaatttaaattttccatctctaatttctagtttttaaraattatattagaaaagatacttcatattcattttaatttctttatatttattaagacttgttttgtgtcctaacatgtggtctttcctacagagtgttctatgtacactagaaaaaaattgtgtattttgctgatgttgggtggagggttctgcatatatgtgttaggtccagttgggctatcatgttgttcaagtcaaatatttactaactgctcttctctctgcctgttgtgtccattattaaaagaagagtatctatatctccaagtataatagatctgtccgtttctcccttcaattgtgtcagtgtttggttcagatattttgggactctgctgtttgttatatatatgtttttaattgttatatctgcttgattcgttgacccttttattagtgtgtactgctcgtctttgttgtaacatttcttggcttaaagtctgttttgtttgatattagtgtagccatgccagattttttttgttattttttgtataggatatctttatccatcccttcactttcaatatttttgtgtctttgcatctaaaatgagtctcttatacatagcatgtcattgggtcatgtatgtatgtatgtgtttaaaagcttttgtcagtttctgtctttagactggaggtttaatccacttatacttaatataattactgttaaggggaacttgcttttgtcattattatatttgttttcagtatgttttaagccatttcccctgcattttcctcctttagcatcttcattgtgtttcattgatttttttcatagtgtamcattttttattctcctctcattttcttttgtgtatgtttttagattttttgtggttaatatggggattatatttaacactttaaacttataacaacttgagttgatacttttaatttttatttcaataatattaggggtacagtgtgttttggttacatggatgaattatacaatggtgaagtgtgagattttagtgcacctgtcacctgagtagcatacattgtatccaatatgcaggttcttaaatacctcacccattcccacctttctttttgtatatggtaagagatagggatagagtttcattcttctacatgtggctattgaggtttcccagaaccatttattgaatagggtgtcctttaaccaatttatgtttttgtgtggtttgttgaagattagtttgttttagatatttagctttattactgagctctcttttctgttccattggtctatctacttttatgccagtaccatgctgttttggttattataactttgtatactcttttttggttccatattaattttaggatttttttctgattctgtgaaaaatgatgttggtattttgataggaattgcattgattctgtacaataggcagtatggtcatttttatgatattcttccaatccatgagcatgggatgtgttttcatttgtttgtgtcatatgtgatttcttttagcagtattttatagttctccatgtagagctcttttacctcatttgttgcgtatatttctagttttttttttttgcagctattgtaaaaaagattgagttcttgatttgagtctcagcttggtcattgttggtgtatagtagtgctactgatttgtgtacactgattttgtaacctgagactttactgaattcatttatcaaatataggagtctttttggaggagtctttaggcttttctaggtatatgatcatatcatcggcaaacaaaaatagtttgacttcctcttttccaattcagatgccttttatttctttcccttgcttgaatgctctggctaggacttccccaacttaattttaatagcctagagaacctctgctcgagactgctcaattccctgcaccctgtatctaatgacaaaattacatctttatatattgcrtacccaataatggtgcaaaattatttcttattaatttgtcttttaaataatgcaggaagtaaaaagtgatgttacaaataaatgatacaataatattggcttttgtatttgtctacatagttatctttaccaggaaactttatttcttcatatggctttgagttactacttggtgtgctttgatttcaacctgaaggatctcttttgtattaactgtctcatgatcatgaactccctatgtttttctgggaacatcttaattttctcttcctttttgaaggacagctttgccaggtatagaattcttatttgatttttttttcttttagtaccttaagtggatcatcccactgcctctggcctccatagtttctgatgagaaattggtagtttatcttattgaggctcgcttgtatgtgatgagtcaagactttctggaatgtagtagcatgatctcygctcactgcaacctctgcccctgaggttcaagtgattctcctgcctcagcctcctgagtagctgggactacaggcatgtgccaccacacttggctaattttgtattttcagtaagttgaggtttcaccatgttgaccaggctggtctcaaactcytgacctcaagtaaaccacctgcctcagcctcccaaagtgctgggattacaggcatgagctaccacacccggccctaagttatgtttttcttaattcagctttcttttggtttgctgtaaacttttgactgttctgcagacttctgacaaagttggttctgatagttttggcttgtgttttacgtttttgtggggagtttgggagtttggagctttctattccaccatttttctgacattgagaggtgaagccagctggacttcctgggtcgagtggggacttggagaacttttctgtctagctaaaggattgtaaatgcaccaatcagcactctgtaaaaatgtaccaatcagtgctctgtgtctagctaaaggattgtaaatgcaccaatcagcactctgtgtctagctaaaggattgtaaactcaccaatcagcactttgtaaaaacacaccaatcaacactctgtgtctagctaaaggattgtaaatgcaccaatcagcactctgtaaaaacacaccaatcagcgctctgtgtgtagctaaaggattgtaaatgcaccagtcagcactctgtaaaatggaccaatcagtgctctgtaaaatggaccaatcagcactctgtgaaatggatcaatcaacaggatgtgggcggggccaaataagggaataaaagctggccacccgagccagyrgcggcaacctgatcgggtccccttccacactgtggaagctttgtttttttgctcttcacaataaatcttgctgctgctcactctttgggtccgcactacctttrtaagctgtaacactcactgygagggtttgcggcttcattcctgaagtcagcgagaccacaaacccactggaaggaacaaacaactccagatgcgccacctttaagagctgttaacactcactgcgaaggtctgcggcttcactcctgaagttagcaagaccacgaacccaccagaaagaagaaactccggacacatctgaacatctgaaggaacaaattctggacacaccatctttaagagctgtaacactcactgcgagggtctgtcgcttcattcttgaagtcagcgagaccaaggatccactggaaggaataaattccggacacagacttctgacaaagttggttctcatagtttttgcttgtgttttatgtttttgtggggagtttgggagcttggagctttctattccaccatttttctgacatcactatgcctattaatatttaattggattctattttgatattaatttttccacctatgcttaattttatttatttatttattttgcctcatacactttttcttttcttagaattctgctctgmcactcactaatgatgtgaccttgggaaagtttcttaaactctctttacctcagattccttatctaaaatgaagatcaagtaagttaatataagttgagtaacttaatgtagttaaagtgttcagaacagagtctgccatatcatcatcattcctatttctttttttagcttgtaaatgtttttgatgcataatatttgtacatacttataggcacatgtgacatttggatatatgcatacaatgtgtaatgataaaatcggggtctttaggatattcatcacctcaaacatttatcatttctttgtgtgggaacattttaaatcttattttatgggctattttgaaatayaaaatattttgttaatatagtcatcctactgtgctatcacacactagagcttattccttttacctaattgtgtgttttaacgcattagctaaygtcgcttcattctcccaccccttcccaggctcttgtagctatcattgtactctatatccccatgaaattcactttttttttttttagctcatacataagaatgagaacatgcaatattcatctttctatgcctggcttatttcacttaacataatgacctccaatttcctccatgttacaaatcacaggattttattctttttatggctgaatagtattccattgtggatatgtaccatgttttctttatccattcatccattgatggacacttagcttgatttcatttcttagctattgtgaatagtgctgcagtacacaggatggtgtaggtattcctttgatatactgatttcatttcctttggataaacccagtagtgggattgctggatcatattgtagttatatttttagctttttgagaaacctctataatgttttttttaataatgattgtactaatttacattcccaccagccatgtgtgatagttcttttttttttttttacatctttgacagtgtttgttattttttgtctttttgataataagcattcgatctagaataaaatratatctcattctggtcttgatttagatttygttatgattaatgatgttgagcattttttaaatatttgctgcctgcttgtatgttgtctttaagaaatgtctatttagattttttgcccaacttttaatgggattatttgtttctttgctattgaattgtttgggtttcttgtatattttggatattagtttcttgttgaaggaatagtttgcaaatattttctctcattcaacaagctgcctttttattgattgtttcttctgctgggcagaagctttttcatttaatatagttccatttgtctatttttgttgttgttgcctgtgcttttgtgatcacggccataaaatttttggctagaccaatgtcctagagcatttctcctgcrttttcttctagtagttttatagtttcaggtcttacatttaagcctttaatgtattttgcattgatttttgagagattggggcctagtttcatttctttgcacatgaagatttagttttccaagcaccatttttagagtctctcytatccccagtgtatgttcatggcacctttgtaaaaagtgagttgactgtaagtgcatagctttacttctgggttctctattctgttccattggtctatgtgtctgtttttgttcaataatattatattttagttactatagccttgtagtatattttgaagtcaggtagtgtgatgccttcaatttggctctttttgcccagaatagcttgactatttgggttcttttgtggttctatagagattttaaaaatttcttttaattatgtttttggcattttgatagtgattgcattgaaactgtagtttgctttaggtagtatctttatttttacaatattaattcttccagtcagtgagcatgagatgttctttaagtttttgtattctcttcaatttattttatcagtgttttacagctttctttacagaggtctttcaccttcatcattacatttatttttaggtatattactttttcttatagctatttaaatgggattgctttcttgattttttttcagctagttctttaatgttgtwtagaaatgcaactgattttttttatgttgactttgtatgccataaatttattgaattcattgagcagttttacgagttttctggtggaatctttaggtatttctgtatataagatcatgtcatctgtaaaaagtgacaatttgtcatcttcctttcctgtttggatgccttttatttctttctcttgcctgatctgtttatgtgatatggtttagatatttgtcccacccaaatgtcatgttaaactgtaatccccagttttggagatggggtctggtaggatgtgttagagttgtgggggcagatccctcatggcttggtgctatcctcatggtagtgagttctcctgaggtttggttaaaagtatgtgacacctcccccactcattacttccactctctctatgtgaaaagctgtctccctctttgcttttcatcatgattgtaagcagcccaaggcttcaccagacaccaagcagatgcccagtgccatgcttcctggacacctgaagaaccacgagccaattaaacctcttttatttataaattacccagtctcagatatttctttataccaagacaggaatagcctaacacaggaaattggtactgaggaatggggcgttgctacaaagatacctcaaaatgtggatgcaactttggagctgcrtaacaggcagaggttggaaaaatttggagggctccgaagaagaacaagaggatgagggagtttggaacttcgtagagactggttaaatgattgtgacgaaaatkctgatggtgatatggacagtgaagtccaggctgaggaggtctcaagatgcaaatgaggaacttattggaaactagagcaaagatcacccttattatgccttagcaaagaatttggctgtattttgtcacaccctagggatttgtggaagtttagacttagggtatctggcagaagaaatttctaagcaggaaagcatttaagacatagcctggctgcttccagcaacctaagtcagatacaggagcaaagaaatgacttaaaattccaagttatatttaaaagggaagcagagaataaaaatttggaaaatttataacctggccatatagaaaagaaaagaaaagaaaagaaaagcctgttttcagaagaatccaggcagagtawccacttgctagagagatttgcatagcaaaaagggagccaggtgctcatagccaagacaatggggaaaaggcctcgaagtcatttcagagatattcatagcagcccatcccatcacatgcccagaagcttaagaggaaagaatgccaggctcacggccctgctgccctgtgcagcctttggacacttctctttgtatctgggctgcttcagctagagccttgggtgcaaagggccccagatacagctcaggccactgcttcagagggtacaagccataagctttggtggtttctacatggtgttaagcctgtagctgaaaaaagtacaagagtaaaggaggcttggcagcctctgcctaggtttcagggaatatatgagaaatcttgggtgccgaggcagaatgcaagggcagagccctcacagagaacctctactacagcagtgtcaaggggaaaagagggactggaggccccacacagagtccccaacagggtactgcctagtggagttatgggaaggggcactgtcctccagacccccaaaatggtagatccactggcagcttgcaccctgtgcctggaaaaactgtaggcactcaactccaacctgtaagagcagctttggggcttaccctgcacagccacaggggcagagctgcccagggttttgggagcccacctcttgtaccagtatgccctggatttgggacatggagtcaaaggagattattttggagctttaagatttaataactgccctgatgggtttcagatttgtatggggcctgtcatccttctctttaggccaacttctccctttaggaacagaagtctttacccaatgcctgtactgtatctagaaataaataaattggctttgattttacaggtttatagatagaaggaaattggcttgagtctcagatgagagtttggacttgggacttttgagttaatgctggaatgagttaagagtttgggggctattgagaagagatgattgtattctgaaatgtgagaaggatatgagattttgggagccagatgcagaatgatatggtttggatatctgttccacgcaaacatcatgttgaaacgtaaaccccaaagttggagatggggcctggtgggaggtgattggattatgggggcagatcccccgtggcttggtgccgttctcacaatagtgacttctcatgagatctggttgtttaaaagtatgtggcatctcccctgacccatcttgctcctgctttctccatgggagacactggctccccctttgccctctgccatgattgtaagcagcccaaggcctcatgagaagctgagcagatacctggtaccatgcttcctgtacagcctgcagaactgtgagccaattaaacttcttttccttataaattatccagtcttaggtatttctttatagcaatgcaggaatggcctaacacattatgacttctaatactgtgttaataagagttgtgaaagtgggcatcgttgtcctattttaaatcttagaggaaaaggtttcgacttttccccattcagtataatgttagctgtgggtttgtcatatgtrgcatttattgtgttaaggtatgtttcttctatacacaatgtrttgagagtttttatgatgaaacaatgttaaattttatcaagttttttcagtatctattgagataatcagtggtttctgtccttgattctgtttatgtgatgtatcatgtttattgatttgtggacattgaatcatctttatgtccctgaggtgtatcccacttgatcatggtgaattaactttttaaatgttttttgaatttggtttgctactattttgttgaggctttttgcatcaattttcatcaggggttttggcctatagttttcttttttgttgtatctttggatttgatatcaaggacttcataaagtgaattaggaagaattttctcttcaattttatggaatagtttgagaagaattggtgttagtttctctttatgagtttggtagaatacagcagtagagccatctggtcctgggcttttttgttgttgttgactttttattactgatttaattttattactcattattgatctgttaaggctttttaacagacactgttcaatttggtaggttgtatgtgtccaggcatttattcatctcttccacgttttccaatttgttagcatatagtttttcatagtcgtctctgatgatcttttgtatttctctggtaactattgtaatgtgtcttttttcatttctgatttcatttgggtcttctttctttttttgttgcttagtccagctaacagttcatcaattttgattagctttaaaaaatccaactctttttttgtcctttatactgtttttagtatctgtgttttagttctgctctgatctttatttttttcttctacaaatttttggtttggtttgttcctccttttctggttccttgaggtgtagtattttatttgagctgtttatttgagatctttttgcttttttgatgtaggcatttattgctataaactttcctcttagtactgcttttgttacattccatagttttaatgtgttgtgtttcaatttctattgttttatgattttttttgacttccatgtttttttatttttttatgtttttgagacagagtcttgctctgttgcccaggcggtgtgcagtggtgcgatctaggctcactgcaccctccgcctcccaggctgaagcaattctcttgcctcagccacctgartagccgggactacaggcytgcgccaccatgcccagctaatttttgtatttttaagagagacggggttttgccatgtttcccaggctggtctcgaactcctggcctcaagtgatcctcccgcctcaaccttccaaagtgctgggattactggcatgagccaccatgcctgtcatgccttgattcccatcttaatttcttcattgatccagtggttgttcaggagcatgttgtttaatttctatgtatttgtagtttccaaagatcctcttgctattagtttctagttttccattgtggttttagaagatacttgatatgatyttgtattttaaaaatttgatgaggctggttttgtagcctaagatatgatctatcctggaaaatgttccgtgtcctggtgagaagatgcatattctgtagctgttgggtaaaatggtctttagaggtctgttatgtccacttaagtctacattacaatttaagtctgatgtttctttgtttattttctgtctagatgacctgtccaatgctgctgtgttgatgtttcctgctattatggcattagagtcgatctttacctttagatctagtaatatttactataaatatctgggttctttgatgttgtttgcatatatatttagaaytgttatatcctctggctgagttgatcctgttattattatgtaatgatcttctttgtcactttttactgttttgacttagagtctwttttatctgatatagatatagctgttcttgcttgcttttggtttttgtttgcatggaatttttaaattctatccttttactttgaatttccataggctacatatacttgagtcattttttaaaaaatccattcagttggtctatagcttttaagtggggaactcatttatattcaaggttactrttgatacacaagggctaatatggtttggatctgtgtccccaccaaaatctcatgttgaattrtaatccccagtgttggaggtggggcatggtgggaggtgactgtataatgkggcaaatttcctataaatggtttagcaccatcctcttagtactgtccttgtgatagtgagttctcrcaagatctggttatttaaaagtgtgtggcacctcccatcccctatctctcactcctactctggcatgtgatgggcctgctccatcttcaacttctgccatgattgtaagttttctgaggcagttgacctggtaaatgaggtggctactaagtgagcaatggctgagtagtgtatatagtgcagatatgctgaacaaagagatgtttcatgtcctgggtgagatggagtgagatagcatgatttttttttgcgtatgtgtatgtatgagtgtrtgtgtgtgtgtgtgtgtgtgtgatttgtaaactttttaaatatatttagggggtacatatgcagatttcttgtttgtttgtttattttgagacggagtcttgctctgtcacccaggctggagtgcagtggcacgatctcggctcactgcaagctctgcctcccaggttcatgccattctcctgcctcagcctcccgagtagctggggctacaggcgcccrccaccacacccggctaattttttgtatttttagtagagacgggatttcaccatgttagccaggatggtctcaatctcctgacctcatgatctgcctgcctcggcctcccaaagtgctgggattacaggcgtgagccaacgcacccggccccagatttctttattattattattattttttattgtacttaaagttctgggatacatgtgcagaatgtgcaggtttgttacacaggtatacatgtgccatagtggcttgctgcacccatcaacgcgtcatctacattaggtatttctcctaatactgttcctccccttgccctctacccccacaacaggccctggtttgtgatgttcccctccgggagcccatatgttctcattgttcaactcccacttatgaatgagaacatgtggtgtttggttttctgttcctgtgttaggttgctgagaataatggtttccatcttcatccatgtaactgcaaaggacatgaactcatcmttttttatggctgcatagtattccatggtgtatatgtgccacattttctttatccagtctatcattgatgggcattttggttggttccaagtctttgctattgtgaatagtgccacaataaacatatgtgtgcatgcgtctttattgtaaaataacttacaatcctttgagtatatacccagtaatgggattgctgggtcaaatggtatttctagttctagatcattgaggaattgccacactgtcttccacaatggttgaactaattgacactcccaccaatggtgtaaaagccttcctgtttatctacatcctctccagcatttgttgtttcctgactttttaatgatcaccattctaactggtgtgagatggtatctcattgtggttttgatttgcatttctctaatgaccaatgatgatgagctttttttcacttttgttagccgcataaatatcttcttttgaaaaatgtctgttcatatcctttgcccactttttgatggggttgtttgtttttttcttgtaaatttgtttaagttccttgtagattctggrtattagtcctttgtcagatggataattgcaaaaatgttctcccattctgtagattgcctgttcactctgatgatagtttcttttgctatgcagaagctctttagtttaattagatcttatttgtcagttttggcttttgttgccattgcttttggtgttttagtcatgaagtctttgcccatgcctatgtcctgaatggtattgcctaggttttcttctagggtttttatggttttaggtcttacatttaagtctttaatccatcttgagttaatttttgtataaggtgtaaggaagggrtccagtttcagttttctgcctatggctagccacttttctcagcatcatttattaaatagggaatcctttccccattgcttgtttttgtcaggtttgtcaaagattggatggtttacatgtgtggcattatttctgaggcctgtgttctgyaccattgatctatacatctgttttggcaccagtaccatgctgttttggctactgyagccttgtagtataatttgaagtcaggtagcatgatgcctctagctctgatctttttgcttaggattgtcttggctatacaggctctttcttgtttcacatgaaatttgaagtagttttttctaattctctgaagaaagtcaatggtatcttgatgggaatagcattgaatctataaattacttgggacaatatggccattttcacaatattgattcttcctatccatgagcatggaatgtttttccatttgtttgtgtccactcttattttgttgagcagtggtttgcagttctccttgaagaggtccgtcacatcccttgtaagttgtattcctaggtattttattctctttgtagcaattgtgaatgggagttcactcatgatttggctctctgtttgtctattcttggtgtataggaaagcttgtgatttttgcacattgattttgtatcctgagactttgctgaagttgcttatcamcttaaggaatttttgggctgagacaatggggttttctaaatatacaatcatgtcatctgcaaacagagagaatttgacttcctctcatcctattcgaatacccttaatttttttctcttgcctaactgccctggccagaacttccaatattatgttgaataggagtggtgagagagggcatccttgtctcgtgctggttttcaaagggaatgctttcagtttttgcccattcagtatgatatgggctgtgggtttgtcgtaaatagctcttattattttaagatacattccatccatacctagtttattagtgtttttagcatgaagtggtgttgaattttattgaagaccttttctacatctattgagataatcgtggtttttgtcactggttctgtttatgtgatggattacatttattgatttgcgtatgttgaaccagccttgtgtcccggggtgaagccgacttgatcatggtggataagctttttaatgtgctgctggattcagtttgccagtattttattgagaattttygcatcgatgttcatcagggatattggcctgaaattttctttgtttttttttttgttgtgtctctgccaggttttggtaccaggatgatgctgacctcataaaatgagttaggtgggagttcctctttttctrttatttggaatagttgtagaagtaatggtactagctcctctttgtacctctggtagaattcgactgtgaaacatgtggtcctgaacgtttttggttggtaggctattaattactgcctcaatttcagaacttcttattggtctattcagggattctgttttttcctggtttagtcttgggtgggtgtatgtgtccaggaatttatccatttattctagattttctattttatttgcctagaggtgtttatagtattctctgagggtagtttatatttttgtgggattggtggtgatatcccctttatcgattttattgtgtctatttgattcttttctcttctttattagtctggctagcagtctattttgttattcttttcaaaaaactagctcctggattcattgatttttttgaaggattttttgtgtctctatctccttcagttttgctctgatgttagtaatttcttgtcttctgctagcttttgaatttgtttgctcttgcttctctagttcttttaattgtgatgttagggtgttgattttagatctttcctgctttctcatgtgggcatttagtgctataaattgccctctaaacactgctttagctgtgtcccagagattctggtatgctgtgcctttcttctcatttgtttccaagaacttatttatttctgccttaattttgttatttacacagtagtcatacaagagcaggttgttcagtttccatgtagttgttcagttttgagtgagtttcttaatcctgagttctaatttgattgcattgtggtgatttctgttcttttgcatttgctgaggagtgttttacttccaattatgtggttagttttagaataagtgcaatatggtgctgagaagaatgtatattctgttgattttgggtgaagagttctgtagatgtttattaggtctgcttctgtagatgtttattaggtccagagctgagttcaagtcctgaatatccttgttaattttctgtctcattgatctaatattgacagtagggtgttaacgtctcccactattattgtatgggagtctaagtctctttgtaggcctttaagaagtttctttatgaatctgggtgttcctgtattgggtgaatatatatttaggatagttagctcttcttgttgcattgatccctttaccattatgtaatgcccttctttgtttcttttgatctttgttgatttaaagactgttttatcagagactaggattgcaacccctggttttttttttcttttctttttttttttgctttgctttccatttgcttggtaaatcttcctccatccctttatttttagcctacgtgtgtctttgcatgtagacacacataggctaatacgtctcctgaatacagcacagcaatgggtattgactccttatctaacttgccagtctgtgtcttttcattggggcrtttagcctgttcacatttaaggttaatattgttatatgtgaatttgatcctgtcattatgaagccasctggttattttgcccattagttgattcagtttcttcatagtgtcaacatgtgcatatttcttatatgcatatatttcatagtggtgaaatatgggcatttagtgtacctctcacctaaatactgaacattgtaccaaataggtaatttttcaaccctcccacattttagtctccatcaaaacctgtggattgacttaccctgctttccacagctggtactcacacacaccactggggaaacagggtggaaccacccaccttctgccattagcacctgcacatgtcctttggggrccaaggagtttgatctatcccacccactgctgctttctatttttccactctgtgtgtccattgtacctatagtttagctccacttataagtgagaacatgcagtttttgatttccatttctgagttatttcacttagtataatggcctccagtatcatccatgttgctgcaaaaaacatgaattcattttttatggctaaatagtattccatagtgtgtgtgtatatgcatacctacacccacccaccactacctccacawacactacattctctttatccattcctctgttgatggacacaggttgttgtttccgtatctttgctattatgaataattctagggtaaacatacaagtgcagttatctttttgtataatgatttttccctttgggtatatatccaatagtgggatggctagatcaaatgttatttctatttttacttcactgagaaattgccatatgattttccataaaggttgtactaatttacattcccaccaacagtgtatagtgttcccttttctctgcatccttgccaacatctsttgtgttttgactttttaataacagccattctgactggtgtaaaatgatatctcattgtgttttttatttgcatttctctgatgatttctaagattggaccgtctttcatagtttgttggctgcttctgtgtcttcttttgaaaaatgtttgttcaacatttcccttgctcaccttttaaatgttttttttctttgttaagctgtttgagttctttgtgattctggatattggccctttgttggatgcataatttacaagtatttttttcttattctgtaggttgtctgtttactccattgattgtttcctttgctgtacagaagctttttggtttaattaagtcccatatgtctattttcatttttgttgcatttgctttgaggacttgttcataaattctctgcttaagtcartgtccagaagagwttttcctaggtttcttctaggatatttataatgtcaggtgttagtttaggtctttaatccatcttgagttaatttttgtatatggtgagaattatgggtccaatttatttcttttgtatataacaatccarttttcccaacactgtttattgaattaggatatcttttcctcagtgtaaatttttgttgaattggtcaaaaatcagttgattgcaggtatattgttctttattctcttccattgatctgtgtgtctatttttataccagcaccatgttgttttgcttactctagccttgtagtataatttgaagtcaggtaatgtgatgcctccagctttgttcttttttgcttaagattgctttggctatttggactccttttttgattccatatgaattttaggattattttatcgaattctatgaaaaatgatgataatttgatagaggttgtgttcaatctgctgattactttgggtagtatggtcatttcaataatattgtttccttcaatccatgagcatgggatgtttttctatttgtttgcatagtctgtgatttctttcattagtgtgttatagttctccttatagagatctttttactccttggtcaaatattccttgatattttatttcatttttatagccattgtgaatgggaatgccttcttgatttggtccttgactaagtcattatcagtgtgtaaaaatgcttctgatttctgtatattaattttgcatcctgaaacttttccgamttgatttatcaaatctaagaggttttttttttttggtgaagtctttagggttttctagaataagatattatcatcagtgaacagggataatttgacttcctcatttctaatttcggtggctttttgttttctcttgcatgattgctttggtgaggacttctagaattatgttaaataagagtggtaaaaatgggcattcttgtcttctgccagttcttagagggaatgctttcaacttttcctcattaagatgtttgctgtggatttgtcatatattacctgttatgttgaagtatgctttttttatgcctagtttgttgaggatttttatcatgaagggatgctgaattttatggaatgctttttctgtgcctgttgaaatgattatgtggtttttgtccttaatgtttatgtgatgtatttcatttattgatttgatacttattattggtctgtttgagagttttagttttttctggttcgatattgggtgtttgtatgtttccagaaatttatttatttcctctaggttttctagtttgtgagtgtagagttgttgataatagtcactgatgatatcttgtatttctgtggaatcaattgtaatatcttttttcatttctgattgcatttattgagatcttgtctcttcttttcttgattagtctacttagtttttgtcaattttctttaccctttcaaagaactaactttttgtttcattgattatttgtgttttattttgttttctatttcatttggttcttctttgatatttgatatttgtttttttctgttaactttgggtttggtttattctttttcctccagctttttgaagtgtgatgttaagttgttaatttgtggtctttctacttttttgttgtaggctttaatgctataaacccctcttagccccrcttttgctgtatctaacaggttttggtatgttgtgttttcattttcattcatttaataaaatttttaaatttatatcttattttttcattgacccagtgatcattcagaagcctactgtttaaatttccatgtatttttatcatttctgaagtttctcttggtattgatttctagttttattccactgtagtctgagaagacacttgatatgatttcgatttttgaaaatttgttaaaacttgttttatggctttgctttaacatggtctaccttggagaatattctatctgcttatcaaactaatgtatattctgtaattgcttggtagagtgttctgtaaatgtctattaagtccatttggtctaaaatccagtttaagttcagtgtttctttgttaaatgatctgtctagtgctatgactgtgatgttgacgtcctcctctattattgtattgctaggtgttttgatgttgggtgcccatgtatttaggattgttgtatcctttgctgaattgatctctttatcattatataatgtctttctttgtcttgtattactttttttgatctaaagtctgtgttatctgatttaaccatagctacttgtgttcccctttggtttcyatttgcatggaatatattttctacccctttacttttagtctatatgtgtctttataggtaaggtgagtttcttataggaagaatgtaatttgatcatattttttaatgcagtctgccaatctctatcttttaagtggagcatttaacctattaaaggttaatattgatatatgaggctttgttcttgtcatgtttttatttttaaattgttttaaatttttttattttcttctctttttgtctttgtggtttgatgaaattctattgtgattccatttgattcctttattttcctcctttttgtgattattttataaaaactaagttttatatttctgtatgttttcatartggtaattatcaacctttcattcccatgtctaagtactctcagcattttcggcaagaccagtccagtcaccaaaaattttctaagtatttgcttatctgagaaagactttattttttcttgatttatgaagcttcttctggcagcatataacattctggactgacagatttctttttttttctctcagcactttgaaaatgccatcttattctcttctggcccataagtcttctgttagtcagatgtggtttcctttgtaggtcaccagctgattttctctttctaactttaaaattctttctttcactgactgtagacattctgaatatataggctgtggtgacttctttttgcaatgtatttgccttgggataggaagttctcagcaattgtttccttaatttgttttctaaattttttgattgctcttccttcctcaggaataccaacaatgcataagttctatagctttatgtagtcccagacatctcaaagctttgttcattctgttctattctttkatctttatttttatctgactggattatttcaaaagacctttcttcaagttctgagatttttttcttctatttagtctataattgaagcttttgaatgtatttaatatttccttcaatgattttttttgttctagaatttctgcttggttttattttattttatttttcaaggccaaagccttttagtaaagacagtaatcttattttgataaaaagtatatttcaaaataaaaatgtaatgttaataaatcctaaagcatcaagtaacatgaaaaacatagtawaacttttgagcaatataagagaaaatgacttgtacatctrtaaaacgaaagagattccattataaagctacttgaattgataaaaacagaattcaacaaaatggtaggatgagataaatatacaaaaatcaatagctagcctgyataataacaataatgtattaaaattatgatgaaaaaggaaatagcattgaaaatataataatkgtagggagcacactgggatcaatatttgatcaaattaatataaaatttatttagaagaataaaacatatagaataacatacatatgcacacatacaggcatatatgttaaaggcaagaataatgaggagtaattagccctaccrgatcttagacaatcttatacttgaataattaaagcagtgtggtattgatgcaaaaatagacagataaatgaacaaaataaataaccttgaaattgatcctgagctcaagcaatcttcttcctgcttcagcctcctgagcagctaggactacaggctcgcaccaccatgccagtctatttttaaaaaaawttttttttgttgagacaaggtcttgctatgttgcccagcctggtctcaaactcttggtctcaagtgatcctcccacctcagtctccaaaagtgctgatattacaggcatgagccactgctcccagcycttcaatgtaccttttttttttttttttttttgagacagagtcttgccctgtcacccagactggaattcagtggcatgatcttggctcactgcaacctccgcttcctgggttcaagcaattttcctgcctcagcctcctgagtagctgggactacagacatgcaccaccacactcggctaatttttgtatttttagtagagatggagttttgccatgttgsccaggctggtctcgatctcctggcctcaaatgatccacccgtcttgacctcccaacrtgctgggattataggcatgagccactgtgcccagccccaatgtgtcttttaattctgttattgcattttaggttttcttgcattgttttattttggtgatctttatttacatttgtgatttcatctcaaattggtattctcatataatttcctgcacctgttttatagcgtgataatatcatcttctactctactgatgttgccagacagttttgaaaataattttttagagttctcatattacataattttagaggtataattgtcttcttcctttatcacattttttttttctgttttatagttaccctcacattggattttttttttgtgggtaattcctccgtaattmtggtacttgattgccatttataattttggtatttttgtgaatgttttaatcttcctacatattttagtgaaaagtatggagagacactgctagacactgttgattttgtatttatatttaagaacttttccactgtccagccatggctgactgagccaatccatcctgtgtttagcagtgtctgattaaggtttagatactgttaagtggttgtctcagatgttactgactaaagggagaattttatcaccatatgatatagctggagaggtctacagtcattgttactactttcagcagtgcaacttaaggaggatactgtrttccttcacgattgtaaatatggtatgcagagttttagtgtcttcatagccaaaataataccattaagtacagaaacatttgagctgaatttaatcttgacattggaakttttgataaattactgaatataatcccatctccaacctactctgcactattcttattattaagaaataatgtgttttagttttccgggacaaagctggtttagtctgattgtttcagtgtaattactaatagcaaccctgttgttttcaagattgtcaagatttaggtgataaattatatggtcactttactttgaaggattttatttctgatcttcttataatcatattacccatgtgatatagatgctttcatgaatgaaatacttccttaccttatgcttccattaccatctcttgaagataccgctgtctcttctttataccacaaagaaaacttctgttttcaaagacttttttgttaggattcccaattcatgtcccagatattgaggacaatttccaaagccttacatgttttcattatctgtctgctgccaccactgtattagtcaggctttcccccagaaacggaaccaataggatctgtctgtctgtctgtctatatctctatcaatatatagatacacatgaggatatttattatgagaattggctcacatgataatggatgctgagaagtcccatgatatgccatctgggaaasgcmatagtgtaattcagtctgaatctgaaggcctgagaaccagaggtgctgatggtgtaacctccactccaaggtcaaaagcttaagatctgggaggccattggtttaagtcctggaatctgaaggcccaacaaccaggagctccaattccaagggcaggagaagatggatatcccagccaagaagaaagggagaacttattgttgctctgygtttttgttctatttaggccctaagtgatttggatgacacctgtccacattggtaagggtggatcttctttagcccatctactgattcakatgcttatattttctagaaacacccttacagacacactgagaaataatgttttactagctatctgggcatcttttagccccatcaacttgacacataaaattaaccatcacaagcaccattgtacttacagagcttatcaatctcagatctcacaaattcaagtgttcactcaatttatctgtgttttatctctcacctttctctayggaattcagtttgcaaatgtactgtcttctgtgtgtacttcattctgtattctgagattctttttgactcttggctaactctcactctcatgatctcagtttcacttacagctttagataaaaggcagtgtcctttttctaacattggacccrtagagtcctatctacttgctctggctagttttagctaccctgtctggatttttttttctcaaataggtaaattcaaacaaaggaaatatgagatttaatgaagaattattgtataaatagatttgtgttttaatgaaactaaccccatcccacctaactccattcgagccttctcctgcttgggcagcaatttagataatagactgaaggggcaaatttgtagttaagaataactgcagtgatagtaaagatgtactatgggggtgggagtggttcagaattgaaattttttttaggatatagaattgacaagtcttggttaaactgatctgtttaatcagtgtttctcaacctctgcactgttgacattttggcccagattattcctgttgtgagaggcttacttatgtattgcaggatgtttaacagcatgcctgttctccatccactagatgctagtagcgaccctcagttgtaagaaagaaaaatgtaattgagcaccgctaaatgtcccctgggggaaaaacacctccagttgagaactactgtgttaaataaatggcatatgctttgtattgcaaactgttacagggttagcaataattatttctatgataataagtttaaaaaatagatattattaataataataaaatgtttttatgcctgagcattgcaaggttggcttaacacttgaaaattaattagtgtaattcactacattaacagaaattggcatattttcaaatggttgatgacaattcgcaaactctcttctgaatgtgtcatacaacatgttgttcttctgttttattttctcatcaagttttcagcgtcccctacatatcaggaatgttgattttgttaactttttcctgccatatagattgcaagtgtctttcctagactcttactacattttgtttgttacacaaaatattgtgttattaaatgtacctatatttcttttgtgaattcaggaattccttttttatttaaaagggscttgtccttccaaatgttttataaaaattatcctatatgttctgaaattttattttgtttcacagttggatctttattgcagttggattttatttttgtatttgatatatgatagggtatataacctgattatgtgagcttcatttattaaaacatattttctataatgaatataaatgccattttttaatatattttcatttttatgtatttctattttggatttctattctgttttattgatacaattatctatcattgcacaaatactttgtttttaacactttagtaagttttaatgtcttaattttccctcttctacaacctgcttctcccttagttgccttacctcaataaatactattaagaactctgtcagrtactgctttagtccatctgtgttgacataaggaaatacttgaggctgggttatttataaggaaaagaggtcttattttgtctcatggttctgtaggcagtacaagaaacatggtgccggcatctgcttctggcgagggcctcagggagcttctactcgtgcaggaaggtgaagtgggagcagatatgtcacacggtgagtgtgggaatgagagagtaatgggagaggtgctacacacgtgaacaaccagatttcgcctgaactgagtgagaactcacttcttcccaaggggatggtgctaaactgttcatgagggatcctcccgtataatccaaacacctcccaccgggccccactttcaacactgaggattgcatttcaacatgagatgtggcggggaccagtatccaaaccatatcagttattcagtctgaaaaccttgagagtttttcttgactgcttactttctctcacaatccttattcaatgcactagaacattcttttcttccttttatcaaaatatataaaaaattcmaccacttttcaccacctccaccactttcacatttaccatgttagtttattccattatcttttttgttgccctggactattacaatagttgcttgattcccccatttctaatcttgatcacatagcagccagagtgatcttcttaaaatataaatcacattctcattctctccaaccactttccaaagagctgcaggcttagcatacacattgtctgccttccaagttgtagcagtcaacagttctaccaaatggcatgctgtttctgtctgttcctttgcattttaacaatcagatgctaaaccaatgccactaattttaaatttattgatttaggtaagggtattctcagtgcttcaaaagcaatgtcaaaatctcaatgccttaatataactgttgtttatgtctctctcatctaatagtttaatgagagtcagtggacaagtttcttatccatagagtcatctggttacctagactccttctatctagtggctacattccataaggctttggagtcctccattgcatcttcccaactacgtggaatgaaaatttgtacagcaggttttagaggacagcactgggtgtgtgtgtgtgttgatgactttttcatatacttactggccatttgtatgtctacttttatgaaaaagtytattttggtcatttgcccatttttaattggattatttgggttttagtgttgaattgcttgagttcattatattttgtttttatattaattgcttatcaaatttatggtttctcccagtccataggttgccttttcatttcgttgacttttttctttgctttgcacaagytttttttttttttttttttttttttagttcttcactaatctgcagaggttctacttgtttatttttgcttttgttgccagtgattttggtgtcctacccagaaaatcaagaattatggcaaggagcttttcccctatgtttccttctggacgttttatggtattatgcttaaaattttaattcattgagttgatttttgtgtatgtgtcaaataagtgtccaattttattttttgcatgtggatatccaattttctcaacctmatttaaggaattatgttttcttcattgtgtattggtggcacccctgtcaaagattaattgaccatatatgcctcggtttattactgggctctctaacctatttgtttgacctatgkgtctgktttattattattatttttattttatgkgtctgkttatataccattacaatactgkttaaatttttaaattttatttattatttattttattatacattgaaatttatagctgtatttattatggggtataaagcaatgttatgatttacgaatataatgtggagtacttaaagctaattaacacatccatcagctcaaatatcactttttatagtgagaacatttgaaatttactctcatagcaattttgaaatgtacaatatgctattatattcaccatgctgtacagtagatatcaaaaaacctttattcctcgtgaataactgagattttatactttttgacatcatctcyttattacccccacctgcagcctgtgcagcccccattctgctmtctgcttctatgagttcagttgttttatcttccacatgtaagtgaaaacatgtggtatttgtctttctgtgcttggcttatttcacttagcatagtgttctacagttctatccatgtcattgcaagtgacagaattccatttttaaaggctacatagtattctactctctctatgtactacattttctttatccattcatccattgataaacaggttgattccattacttggctatcatgaatactgctgcctgcagtgaacaagggagtgcagacatttctttgacaaacgggttttaaacttttggtaaatactcagaaatgcaattgccagatcatatggtgattctatttttagtgttttgaggaacctccatactgtttttaatagttgatgtactagtttacattcctgctaacagtgtacaagagttatcttttcttcatatcctgaccaacayttatctttggtatttttgataatagacattctgaccgatgtgaggtgacatatcattgtggttttaattttcatttccttaataattaatgatgttgagctttaaaaatatatatgttttccatttttgtgtcttcttttgaaaaatgtacattcagtcccattacttgttttttaaattgggttttctattttcttgctgttgaatttagttccttatatattttatgtattaaatccttgatgaatgtatggcttgtacatgttttctcctaattcataggttgtctcttcaaattattaatartttcctttgctgtgcagaaactyttcaattttatgtaatcacacttgtctatttttgcttttgttgcctgtgcttttggggtcaaataaaaaaaattgcctacaccaatgctgtgcagcttttacttttgttttcttctaatagctttatagtttctggtattacctttagattttaatgtgagtttaatttttgtaaatggtgtgagataagagcccaatttaattctttgcatgtgagtatccaattttcctaacactattcattgaagactatcctttccccattgtgtattcttagcacctttgttgaaaatcaattggctatataggctgggttcatatctgcattttctggcgtgttccattggttggtgtgtctactttttttggcagtaccatgctgttttaattactatagttttgtagtatagtttgaaatcaggtaacgagatgcctacagcattgttctttttgttcatgattgccttggctattcaggttttttttttttgtggttccatatgaatgtaaaatttttctatgtctgtgaaaagtgacattggaattttaataggattgcgttgacactatagattgctttgggtagtgtggacatttttaaaaatcatgggatatctttccatttatttgtgtcttcaatttctttcatcaattgttttatcatttttagtgtacaggtcttttayctctttggtcaaactttattcctaatttattttttaaatagctgttgtaaatcagattgttctcttcatttctgttttggatagttcattgttaatgtatagaaacactactgatttatgtgtgttaatttgtattgcrcaactttatagaattcaacattttttgatggagtcataagggtttttatgtataatattatattgttagcaaacaatgataattttatttctttctggtctatttgtatgccttttatttctttctctagcctaatttatttggttgggacttccagtactaatactgaatagaagtggtgagagtgggcattcttgtcttgtccagatcttagaggaaaggctttcaatttttaactattgattataatgttacctgaaggcttgtcatatrtggcctttattgtttacatacattccttctatatgtaatttggtgagagtttttttttaatcatgaaagtatgttgaattttgtcaaatgcctcttctgcatctattgagatgatcatgtgctttttgtcctttagtctgttaatatgatatatcacatttattgatttgtatgtattgaaccttttatgcatccctaggataaatctcacttgaccttgataggtgataccgttaatgtgttgttgaatttggtttgatagtattttgttgagtatctttgcatctatgttcatcaaggatattggtcagtaatttttttttcttrtaatgyccttatctggttttggtattagggtagtagtggtctagtaaaccaaaattggaagtattccctcattttcaattttttagaacagtttaagaaagattggtattaattcttttttaaattcttggtagaattgagcacagaaactccaagatccaggacttttctttcatggtagagtttttcttactgacttaatctcgttactaattattggtctgttcagattttctactgttcagattttttactgatttaatcttgcttggttgtatgtttctaggagtttattcatttttctaggttatccagttattggcatgtaattgtttatagtagtctattttgatttttttttggtctttatgttacatcagttgtaatacctccttttctgattttatttgagtctttttgaaatttagtctacctaaaggtttttaaaactttaccatttcaaagaatcaagtcttagtttcattgttcttttgtattgatttttagtctctatttcatttatttctgctctaatctttattatttcctttttctgctaactttggcttagtttgttcttctttttctagttccctgacgaataatgttaaatttttgagatctttcatcttttttgatatagacatttattgatataaacttttctcttagaactgcttttgccatattccatatcccctaagttgtggtatgttgtattttcagtttcatttgtctcattgtatgttttaattttccttttaatttctttattaacacattggtttccaggaccatgtttcatttccatgtatttgtgaattttctaaaatttattctgctattgattgctagtttcatatcattgtggtgagtaaagatatttgatatgatttcaatcttcttaaatttgcaaaggcttttttgtgccttatgtgtgatyttttccagagaatggctgcatgtgcttgagaagaatgtgcattctagtgctgttggatggaatattctgtatatatctattaggttcgcttgatctaaagtatagttcaagtccagtgtttcgttattaatgttccatctgtatgatctgtccattgttgaaagtggagtattaaagttctccrctattattgtattacagttgtttttcccttcagacatttaatatttgctttatgtttttaggttctccggtatttacagcatatatatttacaagtgttacattcttttgatgaattgacccctttatcattacatagtatgcttctttgtccctttttacagtttttgactggaagtttatttttttgatataagtatagtgacctctgctctcttttggtttcctggggagataactactgaatattggcaagtttaaaagtcacctttttgttcttgtggtctaggagactcaggagttcagagctgtgtcagctcccacagataggtgatttgagagtcagtttattgggtgaaggctacaaaagtcggtctccttgatgtgcatataaactacaagagagagagtcctcagctttggatttattgctagaggaacccagggaagaatgtgcgagggtgctcactattttgttcaagcaagcagaagtctcacaccctcctagcagtgggggagactttgggtctggagttgcctttgaagcaagccagagaagaaggtgcagggagtaggcactttttcctttttggcttggagaggtcccctagcctctctccagtgagagatttcaggaatttatctgagtagaaatccagagaaggcacagagggtgccatcccttccattctcactggcaggggactccaacctcttttcacagtgatattgtaaggctggaattattgcaggagcatcctcaggaagaaagcgctagagtgcctaatctcctgttcaaagaaacagaagtttcaaacccaccttgtagagagggagtcttctagtttggagttattgctgaagcaagccaggaagaaaggcacagggattgctgtgcttcctgtttttctactatgtagactcccagatattggcttgttagaagccagaactgcagggagctgctggaaaagtatgtggccaagccctttctaggagaaatctgagctgttctcaggggtattagtgctgggaatgttcacatggttcaaactgcccctttgttttttttgtccttgagggaaatcctctgatccccctgtccctgctgttcctcaagcatgatttaagtgccaagccctatggcatagagtgtaaaagttgggtaccatatatacatatggaaatatatatatgggtaccatatatatgtgtgtgtgtatatatgtatatatatgcatatatatgtatgtgtatatatatatgaaacaagccccttacttcttgggaagaagcttgtaatargggcttccttccttaatataaggtgctgttctcaatgtgaggttagtgcagggagtggggttagtrcagggagtccttttcccattgcttatttttgttagatagataaagcaaatattagagctaaagagacagacagaccccgatacaataatagctagatttcagcactccacttatagcattgaacagatctcccagacaaaaaatcaacaaaggaacttcgaacttaatctgcactataaattggcctagtagatatttaaagaatattttatttattggttgcagaataaacatatttctcagcacatggatcattctgatctgtataatattcattactgggttgatccaaaataattgtaaattaagatcaatttttataatttatatgctgtgtcagtkagaaaatatagccccaaattctttgagtcttcttccagtcaggaaatggggtctacccaacctcttgtgagtttagctggcttatattcattttcattaatagaatgggtagaagtgatgccatgcagtgtctgcctggctcttggcacacaatctctggaagatttatgttaagatattttctttcagaatccagctgccattctgtgagaagctcaaggcaaaggaaggccatatgtaggttctctggttaacagctttagctgaggcagacatgtgagtgaatgatgaaacctctagatgatggtgtcatttgaagcaaaaaaaattttaattgtgaagttcaatttatctatattttcttttgttaacttgtgcttttggtgtcatatccaagaaaccattgcctaaagcaaaatcacaaaaatttacttctctatttttttataaagggttttatagttttaactcttaatatttaggtctgcagtccactttgagttgcctgtagtgtgagatgagagttcatgtttattcttttacatctgtatattcagttcccagcactagtttttgaaaatactattttctccccactgaattttcttagtgctcttgtagaaaamattgcttggccataaatgtaagggtttgtttctgaactytcaattctattgcatttatgtatatgcctttgcttatgccagtgccacactcttgattactgaaattttgtaccaagtttttaaattgggagtgacaggcctccaaatagttttttctcatgttttggtggttctggatgccttaaatttacatataagttttagtgttgccttctcaatttctacaaaaaaaaaaaacactaattggtatttcgatagggattaagtcaaatctgtaaatcagttggaatgtattgtccttttaacaatattgtctaacaatacataaccacaggttgtcttctcatttatcatatattcttcaattactttcaatgattctttgtatttttagtatacaggactttatacttatttttttaaaagtcattctttaactgtttcattttgatactattattaattttcaaactgctaattgctagtatatagaaatacaattgagtttagtatattgatcttataatttgaaatctttgctaaattgatttcttctaataggtttattattccctctttgggatgtatttgtgtgtgtataggtgtttcttaaatttctttataaaacatttgtaagttgagagttttacttcttccttttcaatccagatacattttatttcttttttttkgggggggggtctaatttctctggctagaaactccattgtagtgttaaacagaagtgataagacatccttatcttgtttttactttagtgggaaagcattaaccattaagtataatgctagctatgaaattccctttcattttcagtttgttgagtgtttttctaaaaaaggatttggagtttgctttttttcgaactattgagatgattataaagggaatcatttattaatatcgtttagtatatcgattttcagttattaaaccaagccagcatgggattgttgatttttgctcttttcttattctttcttttatttatataaataaatatatatattctttctgcttactttaatgtcctcttctttttctagcttataagrtagaagttttgttgactgaggtctcttttctttttcagtgtaagtttgcagctgtaaaattcctctaagcatcactttagctgcatcccatagttttcatgtgatgtgtttttgtttttcttcacctcaacctattttctagtctcccttatgattttttccttgacccattggtcatttaggagtgtgttgtttaaattccacttatttgtgaattcctcaaatctcctcctgttattgatttctaatgtcagttcatatagattgaagaacaactttggcatgagtttaatactattaaatttctcaaggcttgatttatggcctaacatattgcatatcttagagatttccaagtatrttttagagcaacacgtatttgtctgttgggtggagccttctatgggtatctgtagacttccagtgagctctacttaatttattgtattcttcaattctattttcttcttgatctaatgcttagttgttcagtctattatttaaagtgggatgttaaagtctccacctatgattgttgtagtayctatctgtaattgctaatgattgggcatgaaagttcacacataggattttaacctggagctggtctcctcartttgcacgtacacacagggctcctcagtttgcacrtacacacagggctcctcagtttgcgcgcgtgcacgcacacacacacacacacacacattcatacacacatgttcttatgtacacaaacatgcatatacatgcaaataaacatatttagaaatgaggaattctcatggacatcttcaattccagtttatcctctcaggtcttattcttgccttccttcattttgtatgtatttgttttcttttccacagtgtaaacctgactgaacattaacaacacatgtactcatttgctttatcccctaatgctcctcaatttgttttagaattgcttagctcatagcactagaaaaacaaatttactaaaatattttgtgactttatttgcaccccactctcttgaccaagactgagaatatttgtcaaatttttattcacaagttacttgaattaatgctttgtttctttcctcagtaggttcacttatttctttgagttatagtttccctttctaattctattgatttagctttgtgtatatatatatatatrtrtatawrtgtgtgtgtgtgtgtgtgtgtgtgtgtgtrtatatrtgtgtgtgtgtgtgtgtatatatatatgttttggaattgtgcattaacttacttcccaaagtgaaaaatatgcagaaggtatacttagagcagtttcattcctcctgtatctcttccctttgtatttctccagtaaaggtaaccatgtatattgttttccggtttgtttttcttgtattacatttcatgaaattaattttctgtctatttcaatatttttcttcatctctccttcattcttatctaaaaggtagcattctagatatgcattttttctatttttgtttatttgctttctgcctacttaacattatgcctggaaataatgaaacagcaacatacacctattaaaacttctcacaattttcatgtgagatctatctcaatggtaatttactcatgactttatgagaatgagagaaaatgctgctgtgtacatgtttaaaatgtgaaatttggagatttcacaatagagctctttctctatttggtagactaaatgaatctttttatgtagctgacagtgaagttccagatgaaaatcttatggttgaaaataaagattcagtaacaaaagtccaaatagaacaaatgaaacaaagaacttctagtatggaaagacatgagggtaagtataataattatacatatctttacactattttatttttattttttgagatggagtctcgccctgtcacccaggctggagtgcagtggcatgatcttggctcactgcaacctccatcttccgggttgaagcgattctcctgccccagactcccgagtagctgggattacaggtgcacgtcaccatgcctggctaatttttgtatccttagtagagacggggtttcaccatgttgatcaggctggtctcgaactcctgacctcgtgatccacccaccttggcctcccaaagtgctgggattacaggtgtgagccactgcacttggcccttcacactattttaagttaactcatcagaggtcttttttctttgcatcatgaatatttgaacatataatttgtagaaattttatactttgacctaaatgtgaatactgcaaaataactagagaactaaagtgaaagctttaataccttttgattggtatttgcatagtcagtgactaccatgtaacaagattgcctccacacatgagaattttctgcttcgcatccacggtctattttaacgaatacctcactgctgtaacttcctagtcctattccattaattttacacaaatgagaggaagtattgctgattacttgacatatacagaagttttatcatagatctgtttttctgttcagagactcttacaaccccacaattgcctgaggacatggttttagtttcaagaatccaatctgaaactaaaaatcttaaagctaccagaaatgagagttttcattgtaagtagtaagtttaaaatgttataaaattattttcaattatattaaacagctttttttatggttcatgaatatatctacaactttttttgtaattattttgtgtatacttctagatctatactggtgtctctataattactgaattagatgtgttaatttttccactatgattgtgaatttccttgttcctttttataataatgtcaggttttactttatatcttatgacattttattattaatgtacatataaatttaaaattaacaatcttactggaagaaataaactttttcctaatgaagggacctgctttatcatttttatagcttttgtttgtttgccttaaaaactatcatgtctccccataatcccagcactttgggaggtaaaggtgagtggatctcttgaagccaggaattcaagaccagcctgggcaatgaagtgagaccctyattgccacaaaaacaaaacaaaacaaaacccaaaacaaacaaacaaacaaaactatcacatctgctattaatgtaaatctaccaactttcttctgattggtatttgcatgatacattttatatttcatcctggtaacttaacattcctctttgtgttttttttttctgtatctcttgcatgaagctcatagttgtatatttttcaaattcagtctaatatttttgtcttttaattagctctcctaaacacatttagtcttattattgataatttctatgtttaagtataccatttctttgtccttcctattttatctgcctggtaagtttcttttactcttctttatgccctattacttaatatcattacatattttttccttggacaaatgataccaaatattttaaactttattctaaagacacctctgtgtatctaaaaagtagcataaagcttatacttcaactagttggtctctactaatagtttattaccacaaagtgtgatttgcttatatcatgtgaagtgagacagtattattgagtcattagcatatattgcaagtatagtacttaacaccacagatctggttttcatttagttcttttttttattttttattttttattatactttaagatttagggtacctgtgcacaacgtgcaggtttgttacatatgtatacatgtgccatgtttgtgtgctgcacccattaactcctcatttaacattaggtatatttgctaatgctatccctccccctacccccacmccacaacagtctccattgtgtgatgttccccttcctgtgtccatgtgttctcactgttcaattcccacctatgagtgagaacatgcggtgtttggttttttgtccttgcgatagtttgctgagaatgatggtttccagcttcatccatgtccctataaaggacatgaactcatccttttttatggctgcatagtattccatgatgtatatgtgccacattttcttaacccagtctatcattgttggacatttgggttggttccaagtctttgctattgtgaatagtgccgcaataaacatatgtgtgcatgtgtctttataggagcatgttttataatcctttgggtatatacccagtaatgggatggctgggtcaaatggtatttctagttccagatccctgaagaatcgccacacagacttccacaatggtttaactagtttacagtcccaccaacagtgtaaaagtgttgctatttctccacatcctctccagcacctgttgtttcctgactttttaatgatcgccattctaacyggtgtgagatggtatctcactgtggttttgatttgcatttctctgatggccagtgatgatgagcattttttcatgtgtctgttggctgcataaatgtcttcttttgagaagtgtttgttcatatctttcgcccactttttgatggggttgtttgtttttttcttgtgaatttgtttgagttcattgtagattctggatattagccctttgtcagatgagtagattgcaaaagttttctcccattctgtaggctgcctgttcactctgatggtagtttcttttgctgtgcagaagctctttagtttaattagatcctatttgtcaattttggcttttgttgccattgcttttggtgttttagacatgaagtccttgcccatgcctatgtcctgaatggtattgcctaggttttcttctagggtttttatggttttaggtctaatgtttaagtatttaatccatcttgaattaatttttgtataaggtgtaaagaagggatccagtttcagctttctccatatggctagccagttttcccagcaccatttattaactagggaatcctttccccatttcttgtttttgtcaggtttgtcaaagatcasatagttgtagatatgcrgcattatttctgaggactctattctgttccattggtctatakctctgttttggtaccggtaccatgctcttttggttactgtagccttgtagtatagtttgaagtcaggtagygtggtacctccagctttgttcttttggcttagaattgacttggtgatgtgggctcttttttggttccatatgaactttaaagtagttttttccaattctgtgaagaaagtcattggtagcttgatggggatggccttgaatctataaattaccttgggcagtatggtcattttcacgatattgattcttccttcccatgagcatggaatgttcttccatttatttgtatcctcttttatttcatcgagcagtggtttgtagttctccttgaagaggtccttcacatcccttgtaagttgtattcctaggtattttattctctttgaagcaattgtgaatgggaattcactcatgatttggctctctgtttgtctgttattggtgtatragaatgcttgtgatttttgcacattgattttgtatcctgagactttgctgaagttgcctaacagcttaaagagattttgggctgagacgatggggttttctagatatacaatcatgtcatctgcaaacagggacaatttgacttcctctttttctaattcaataccctttatatccttctcctgcctgattgccctggccagaacttccaaaactaagttgaataggagtcgtgagagaggacatccctgtcttgtgccagttttcaaagggaatgcttccagtttttgcccattcagtatgatattggctgtgggtttgtcataaatagctcttattattttgagatacgtcccatcaatacctaatgtattgagagtttttagcatgaaggttgttgaattttgtcaaaggcctcttctgcatctattgagataatcatgtggtttttgtctttggttctgtttatatgctggattacatttattgatttgtgtatgttgaaccagccttgcatcccagggatgaagtccacttgatcatggtggataagctttctgatgtgcttctggattcagtttgccagtattttattgaggatttttgcattgatgttcatcaaggatattggtctaaaattctcttttcttgttgtgtctctgtcaggctttggtatcaggatgatgctggcctcataaaatgagttagggtggattccctctttttctattgattggaatagtttcagaaggaatggtaccagcttctccttgtacctctggtagaattcggctgtgaatccatctggtcctggactttttttggttggtaagctattaattattgcctctatttcagagcctgttattggtctattcagagattcaacttcttcctggtttagttttgggaggatgtttgttttgaagaatttatccatttcttctagattttctagtttatttgcatagagatgtgtatagtattctctgatggtagtttgtatttctgtgggatcgctggtgatgtcctctttattattctttattgcttctatttcattcttctctcttttcttctttattagtcttgctctagcggtctatcaattttgttgatcttttcaaaaaaccacctcttggattcrttgatttttttgaagggttttttgggtctctatttccttcagttctgctctgatcttagttatttcttgccttctgctagcttttgaatgtgtttgctgttgcttctctagttcttttaattgttatgttagggtgtccattttagatctttcctgctttctcttgtgggcatttagtgctataaatttccctctacacactgctttgaatgtgtcccagagattctggtatgttgtgtctttgttctcgttggtttcaaagaacatctttaattttggcttttgccttcatttcgttatgtacccagtagtcattcaggagcaggttgttcagtttccatgtagttgagcggttttgagtgagattcttaatcctgagttctagtttgattgcactgtggtctgagagacagtttgttataatttctgttctgttttttttttttttttgagatggagtctagctttgtcgtccaggctggagtgcagtggcacgatctcggctcacttcaagttctgcctcctggcttcacgccattctcctgcctcagcctctccgagtagctgggactacaggtgcccgccagcactgccrgctaattttttgttatttttagtagagatggggtttcaccatggtctcgatctcctgacctcgtgatccgcctgcctcggcctcccaaattgctgggattacaagcgtgagccactgcacccgaccaatttctgttgttttacatttgctaaggagtgctttacttgcaactgtgtggtcarttttggaataagtgtggtgtggtgctgagaagaatgtatattctgttgatttgrggtggagagttctgtagatgtctrttaggtcttcttggtgcagagctgagttcagttcctggatatccttgttaactttctgtctcgtcgatctgtctaatgttgacagtggggtgttaaagtctcccattattattttgtgggagtctaagtctctttctaggtctctaaggacttgctttatgaatctgggtgctcctgtattgggtgcatacatatttaggatagtcagctcttcttgttaaattgatccctttaccattatgtaatggctttctttgtctcttttgatctttgttggtttaaagtactttttttgttttgcatttgcttggtagatcttcctccatccctttattttgagcctatgtgtgtctctgcacgtgagatgggtgtcctgaatacagcacactgatgggtcttgactctttatccaatttgccagtctgtgtcttttaattggagcttttagcctatttacatttaaggttagtattgttatgtgtgaatytkatcctgtcattatgatgttagctggttattttgctcgttagttgatgcagtttcttcctagcctctatggtctttacaatttggcctgtttttgcagtggctggtactggttgttcctttccatgtttagtgcttccttcaggagctcttttagggcaggcctggtggtgacaaaatctgtcagcatttgcttgtccgtaaaggattttatttctccttcacttatgaagcttagtttggctggatatgaaattctgggttgaaaattcttttctttaagaatgttgaatattggcccccagtctcttctggcttgtagattwtyttttytttttttttttttttttattatactctaagttttagggtacatgtgcacattgkgcakgttagttacatatgtatacatgtgccatgctggtgcgctgcacccactaatgtgtcatctagcattaggtatggattttctgccgaragatccgctgttactctgatggtcttccctttgtgggtaacctgagctttctgtctggctgcccttaacatttttccttcatttcaactttggtgaatctgacaattatgtgtcttggagttgctgttctcaaagcacatctttgtggcgttctctgtatttcctgaatttgaatgttggcctgccttgctagattggggaagttctcctggataatatcctgaagagtgttttccagcttggttctattctccctgtcactttcagatacaccaatcagatgtagatttggtcttttcacatagtcccatatttctccgaggctttgttcgtttctttttattgttttttctctaaacttctcttctcacttcatttcattcatttgatattccatcactgataccctttcttctagttgatcgaatcggctactgaggcttgtgcatttgtcacgtagttctcatgccttggttttcagctccatcaggtcctttaaggacttctctgcattggttattctagttagccattcatctaattgtttttcaaagtttttaactcctttgcaatgggttmgaacttcctcctttagcttggagtagtttgatcgtctgaagccttcttctctcaactcgtcaaagtcattctccatccagctttgttccgttgctggtgaggagctgcgttcctttggaggaggagtggtgctctgatttttagagtttccagtttttctgttctgttttttccccatcttcgtggttttatctacctttggtctttgatgatggtgacgaacagatggggttttggtgtggatgtcctttccgtttgttagttttccttctaacagtcaggaccctcagctgcaggtctgttggagtttgctggaggtccactccagaccctgtttgcctgggtatcagcagcagaggctgcagaacagctggtattggtgaacagcaaatgttgcttcctgatcgtttctctggaagttttgtctcagaggagtactaggtcatgtgaggtgtcagtctgcccctactggggggtgcctcccagttaggctactcgggtcagggacccacttgaggaggcagtctgtccgttctcagatctcaaactccatgctgggagaaccactactctcttcaaagctgtcasacagggacatttaagtctgcagaggtttctgctgccttttgtttggcaatgccctgcccccagaggtggagtctacagaggcagtgagacctccttgagctgtggtgggctccacccagtttgagtttcccagccgctttgtttacctactcaagccttggcaatggcgggcgcccytcccccagcctggctgccgccttgcagtttgatctcagactgctgtgctagcaatgagcgaggctccgtgggcgtaggaccctccgagccakgtgcgggatataatctcctggtgtgctgtttgctgaccgttggaagagcgcagtattagtttgggaatgacccaattttccaggtgccacctggaaaagggtgccaccctttctttgactaggaaaaggaattccctgaccctttgcacttyccagrtgaggtgatgcctcaccctgcttcagcttaggctcggtgccccrcacccactgtcctgcaaccactgtctgacactccgcagtgtgatgaacccagtacctcggttggaaatgcagaaatcatccgtcttctgcgtcaytcacactgggatctgtagactggagctgttcctgttcagccatcttggctccagcacctcatttagtycttaaaaagattttcttattgtatcctagagtatggwtgatgaattagatraaaatattttgcctgacacttagaactgttagaagaaaaagactcagcagtaaatgtaatgatgaatattattaaattattttaaattaaagttaactttgaataaattaagcagratttggtttatggatgtgtatcacgttaggactgtagaaacatkcattaaattgtgctatttaaagtagtatttattttttgatttcctttaattttttgttagttctgacatttactaagagaggcatgttgaattctcctcctattattttggatttatctatttcttcttgtagttttgtcttctttttaaatgctgcttatgttattggtgcatatgtataaaaattccatatttctggcaaactcaactttttcatttcatgaaaggaaccttctgaatctctggtaaggtyatttgccttaaatcctattgtgtcttacattgacatactatggtgatttttgttagtgtatgtgtggtgtatctcttttcatctacttgttttctgtctttctggatttttataatttactgacatagcttgtaaatcacctatagttagatttttttttgtttacaaatccagtgtgactgtctttttttattcatagaacgtttcaatgttttaatttaaaattattgtaattattgacacatttggatttaaatattttgagctgctttttgtttcttctacccaatccatgtttacttctctttaatttatttctttatgttggaatctttttttattcattctgatttttaaatcaattatttctgttttaaaatgtttaaactttttaaaaaagattaatactcttggaaaaataaaattgactttcaactttttaagtgcatatagtatatgaagtaatagagtgtttccatatccttgcagtakaaacactttcatgatttttacatgtaacttcatagtttattttgaaaattaatttggtctttttttgaaaattaattttcaaaatwattttgaaaattaattttcaaaattattttgaaaattaattggtcttttcaattcatttaattgaattgtggtcttttacttaaatttttataaaaatgaatggaaactttgatttctggcatatttttaacaattcagaggcttcacaattaaatggtgtcactctttattgtagtctaagcctctyttcctttttatttaagattttaatttataattgacataatggtacacattcatggggtacaatatggtgttttagtccatgtatacatagtataatgattgaatcagggaaattaccatatatatcgctagaagaactggtcatttttatggtaataacattcaaaatcttcttgtctagctatcttgaattatacactacaatgttatttgctgtagtaccctactgtggaacagaacactaaaacttcttcttcatgtctaactgtatctgtgtacgcattaataagccacttgctgttcctcctcccccaacccctccacagcctctgataagcactattctactatttccataaaatcaacttttttagattccacatatgagtgagatcatatggagtttgtctttcttgcctggcttgttttacttgacataatattcctctaggttcatccatgttgttgcaaatgacagggcaccatttctgttttatggctggtgatatggtttgsctatgttcccacccaaatctcttcttgaattgtactcctataatttccrcatgttgtgggagggacccagtgggagataatgaatcacgagggcgatttcccccatactgctgctagtgaataagtctcatgagctctgatggttttataaggggtttttgctttcacttcttcctcattctcttctcttggctgccaccatgtgagacgtgcctttcaccttctgacatgattgtaaggcctccccagtcacctggaactgtaagtccattaaacctctttcttttgtaaattgcccagttacagatctgtctttatcagcaacrtgaaagtktacgaatacaactggatagtattcattgcasaaccatgagccaattaaacctcttttctttgcaaattacccagtctcaggtatttctttattagcaatgtggaaccagactaatacaaatcttattttaaaaatgggctaaagatgtgaatagatatttctcaaaagaagacatacaaatggccaacaaatatatgaaaaaatgttcaacatcactaatcatcagagaaattcaaatgaaaaccatagtgagatatcactttatccatgtcagaatggctattataaaaatgacaaaaataacaaaatctttcaaggatatggagaaaagggaactcatacactgtttgtgggtatataaattagtgtaaacactatggaaatcagtatgttttttgtcctttattctgktaatgtgatgtgtcacatttatttgtttgkggatattgaaccatctgtacttccctgatatgaatcccactcgatcatggtaaatgatctttttaatgtgttgttaaatttggtttgttagtcttttgttgaaaaattctgcataaattttcatcagtgatactgacctgtagttttattttctgttgagtccatgtctttttttttttttttttttttttaatcaragtaatgctggccttgtaraatgtgctggaagtattccttcctcttcaagtttttgggatagtttgaataraactggcattagttcttctttaaattttggtagcagtcagcagtgaacccatcaaggttcctgggcttttctttgatggaaagcttctaattattgcttttgattttgtttctcattattggtgtgttgagattttctatttcttcatgatgcaatcttggtaacttgcgtgtgtccaagaatttatccatttcctctaggttttccaatttgttggcatatagttgtttgtagtagcctcttatgatcctttgtatttctgtggcatcagctgcaatgttacccttttcttctcttgttttagttatttgaatttcctcacttttatttttagtctrtctaaaggtttgtcaagtttgtttatcttttcaaaatacagctttttgttttgttcatcttttayattttttaatctcttttttgtttrtttctgctctgattttattagtttgttccttctacttattttcggattgttcttttttttttagttctttgaggagtaatgttaggttgtttatttgagttctttctagttttttttcatgtaggtgtttattgctataaactttattttagggccatttttcctatattatataggcttttgtatgttgtattttcatttttcatttgtctcaaggaatttttaaattaaaaaactttcttttctttgatgcattgtttttttcatgaacatgttgtttaattttcatgtatttgaacagtttccaaagttccttctgttattgattcatagttttattccattgtaatcataaaatatacttcatatgatttcaattaaaaaaattgttaaaacttgttttgtcgcctaatatatggtctggagaatcttccatgtgctatggtgaagaatgtatattctctagctgttgggtgacacgtattataaatgtctgttaggttcattttgtctagaatgcagtttaaattaagtgtatattttcatttttttatttcaacttttctttcagataaaggtgtggggggttacatgtgcagaattgttacatgggaatgttacacagtactcaggtttggagtatggatcccatcactttggtagtaagcatagtactacataggtagtttttaaacccacyaccaccttccacctctagtaggccacagtgcctattgttgtcatatttatatccacatgtgstcaatacttagctcccacttataaatgagaacatgcagtattcagttttctgttcctgtattaatttgtttaggattatgccctccagctccatccatgttgctgcaaaggacaygatctcattctttctaatgggtacatagtattgcatggtatatatgtcccatatttcctttctccaatctgccatagttgggcaacgagattgattccatgtcttgctattgtgaatagtacagtaatgaatatttgagtgcatgtgtttttttggtagaatgacttatattcttttcagtatatacccagtaatgggactgctgggctgaatggtagttctgttttaatttctttgagacatctccaaactgctttccatagtggctgagctaatttacattcctaccaacagtgtttaaatgttcccttttataggctgggaacagtggctcacgccactaatcccaacactttgggaggctgaggtgggtggatcatttgaggtcaggagtttgagaccagcctggccaacatggtgaagccctatctctactgaaaatagaaaaaaaacagccaggtgtagaagcacgtacctgtaatcccagctacctgggaggctcaggcaggaaaataggttgagccctggggggtagaggttgcagtgagctgagatcgtgccactgcactccagcttgggtgacagagtgagaccctgtctcaaaaacaaaaagttctcttttctccacagccttaccagcatctgtagttttttgactttttaataatagccattctgactggtgtgagatggtatctcattgtgcttttgacttgcattactctaataattagtgatgctgatcattttttcatatgcttgttggcagcatatgtctttttttgataagtgtctgttcatgtctgttgcccattttcaatggagattttttcttgttgatttgtttaatttccctataggttctggatattaggcctttgttggagacatagttcatgaatactttctctgattctatagattgtctgkttgctctgttgacagtttcttttactgtgcagaagttctttagtttaattaaatcctacttgtctatttttgtttttgttgcatttgcttttggggacttagccaaaaattatttgccaaggcctatgccaagaaaaatatttcctaggttgtcttctaggatttttatagtttgaggtcttacatttaaatctttaatccattttgagttgatactcatataaggtgatagatatgggttcaacttcaatattctgcataaggttaggcagttattctagcatcatttattgaattgggagccctttcctcattgcttgtttttgttggtcttgtcaaatatcagatggctgtaggtgtggggctttatttatgagttttctattctattttattggattgtgtgtctgtttttgtaccagtaccaaactgttttggttattgtggctttatagtatagtttgaagttggctactgtgatgcttctggcttttttctttttgcttagtattgctttggttatttgggctcttttttgcttccatataagttttagaatagtttttcctaattctaggaagaatggtggtgttagtttgataggtatagcattgaatctgtaaattactttgggcagtatggccttttttactatattgatagtaaatagtgctgcaacaaacatatgcatgcatgtatctttataatagaatgatttatattcctttggcatatacccagtaatatatttgggattgctgggtcaaatgatatttctgcctctaggtctttgaagaatcaccacactgtcttccacagtggctgaactaatttacactcccaccaacagtggaaaagtgttccttttcctccacaacctcgccagcatctgttattctttgacattttaataatagccattctgacaaacttgagatggtatctcattttggttttgatttgtatttctctaacgatcagagatactgaattttttttcatgtttgttggccacatgtatatattcctttgagaagtgtctgttaatgtcctttgtcmacttttttatggtgttttatgtcgttacagcactatttacaataggaaagtcatggaattaacctaaatacctatcaatgacaaattggataaagaaaatgtggtacatatattccatggaatactatgcagtcataaaaaggaaccagatcatgtccttttgtaggaatatggttggagttggaaactattatcctcagaaaactaatgcargaacagaaaactaaataccacatattcttacttctaagtgagagctgatggatgagaatacatggatacatggggggatcaacacacactgggcacctgtgggagttgtggtgggagggagagtgtcaggaagaatagccactggattctgggcttaatacctgggtgatgggatgatctgtgcagtaaaccaccatggcacacatttagctatgtaacaaacctgcacatcctgcacatgtatccctgaacttaaaataaaagatgaagaaaaataaagaaaattggcccccaatcttttctgtcttgtaatgtttctgctgagaggtctgctgctaggctgatggaattccttctctaggtgactggcaccttctctctagctgcctctaaggattyttcttttgcaatccctttgatgaatctgatgattaattgccataggaatgattatcttatatygtatctggctgaagttctctgtatttcttggatttgcatgttgacctctctagcaagagtaggaaaatatttgtggactatatcctcaaatatattttacaagttgcttattctcctctctcaggaatgccaatgaattgttaattttgccttcttacataatcccatatttctgggatgttttgttcatttttcttaattgttttctttatttttgtctgactgagttgattcatagamccagtcttcaaactctgagattctttcctcaacttggtctattctgctgttaatacttctgattgtattatgaaattcttgtagtgagcttttcagctcaggaagttcagtttgkttcttcttaaaaagggaattttgttgttcagctctttgttttagtggattgcttggctttcttggattgattttcaactttctctgtgatctcaatgagcttctttgccgtcaagattctgaattccatgtctgtcatttcagacaatccagactggttatgaaccattactagggaagtagtgggctcatttggaggcaaggcgacattctggctttttgaattaccagggtccttgtcctgatttgttctcatctgggaggactagtattcttttcattgtgttataaattgagcatagtccattggctttgcttctggaagtttcagaggactaaggctctgtatagggtctttgttgtaaaattcttgttcttggtttcacagtggggataattattaaagtgatttttggtgttgtagtttgggttgccatacggtagatggtgcttgagagcaatgagcagtagataggctcttaaccacacatttcctttgtgcatcttcacatttgcaactgtgttctgccatgtgaggagaagagatgtaactctctcaccaggcttgcccatgagccttgggagaaccactgccaaccactggcactgtgcctgcaattttgttgtggtgatggtggttagatcttttgggccacagggctcccttagggagaggtctgatggggaaacaggcaacaccctttatgaatcaaccttgtgcagggaggcatggctaggtctcacaccagcttgtgagcctgtaccactcaggactctcagttttctgagagtgtgggctcctgtcctgttcaagtaccaagcacaaatctcagctcaaccctcctgagccacaggctacagcctgagggctctagggtctgcttgcaactccctcctccaggcactcagggatgggttctgsgtgcagtgtgggatctgaagggctcccaggatgccagaatgcactcaggtggagcaaaacacccagtctgggcagtggaggctgcattatgtacattctcttacgggacagttagggaaggttcctgggaggggctggcaggcaggtgggtctgcgggtcagatgtgccccagtcccacagagaagcacaacctgttttctccttggtgggttcagagcctctcagagggagacaggtagccctgggagtggatgcttatggctgagctttgctgggactgacctgcactcaagggtcctcagctttgcacctgctgcagctctgtctccatctaatcttcagggagatctcccctgccagctcacacatccatgtgggagtgagttcccctgcaactaggatctcagaggtttgcagtaagattgagcagtctcccagtctcttaactcaccccttcctcaggcaccatttggtgctgggaaacagctggggtgctcaggtgctccaacttgggttcccagcttcctccctattcagcctcagcatgtgagtcttttttccatccacatttggtgttttctgtccagagattggttcaaattatgttggtatagtcgaaactgtgagctstrtctatgagagcagcagttcctggttgcgtctagtcagttgtcttggaaaatgtaagagttaaagaaaaaggaaagaaacatgaaaaatggctcagcagtcaaagacaggtttattttggagaataaactggagagcggtttctggaggatttcgggcaggagcactctgtcttacagactaagagtatttaagggttcagggtgagagagcttatcacagggtaggaagtttctgtgtggaggaaaagtttattgcagggttggaatgtccctggtcggaggggaggtcatcttggggctgacacctctctggcgggaagggaggttttcttggggctggcatgtttctggttggggagaattttatcttagggttagaatgtttctggtcagagatgttatctgtggtttatggtcatgctgacattagccattaggctgatgccctttgggaagatttaggcggttttttattaaggtgaactttaaagtggcagtgcttgtccaagatggcaatgcttctgctctgtcagaaaaatttccagtttctttgttgattttttgtctggatgatctgaaagtgtagtgttgaattcccctcctattattgtatcacgttcaatcgcttttagtctgttaatrtttgctttatatgtttaggtgctcctgtgttgtgtgtacatatatttataattgttacatccttctgttgtattgagccctttatcataatataatggcttgatttatatttttaaaataatttttaacttaaagtgtattttatctcatataaatgtagctactcctgctcttttttggtttccctttggttggaagatctttttccaaccctttttttcagcttatgcatgtctttataggtgaagtaggttttctatagggcacrtatacttggatcttatttttttcattcagccactctatgtctttaatttggagaattctgtcctttaacattcatggttattatgcataattaaggtcttactattgatattttgttgctaattttactgttgttttgtaaatcttctctttcttactttctgtcttcttttgtggttgtttttctctgatggtatgttttaattcattgctttttgtttttagtatatctattataggttttcactttgtggttaccgtgaggcttacagaaaacatcttatgtaactaattattttaacctgatgacaagttaacattggtcacaaagaaaagagaaacaaaactaaaaaaaactttatactttactcctcacattttgacttttagatatctcaatttctatatttttgtactgcctaatgcataataaatttttctagttrttattttttaatagttttgtctgtcttcaaactaaatatatgagtcctttatataccacagttacagtattagagtattctgaatttgtatkgtttctattagcagagatttttataaaaaatttctgatgtttcgttgttaaacattagaatcctttgccatcagattgagtaacttcctttagtatttcttataaaacaggtttggatgtggtaagttttmtcaccttttgtttgtctaggaaagtcgttatcttcccttcatgttagaaggatagctttgttgaatacactattttaggttgtcaattcttttccttcagcactttgaatatgtcatcttacttccccctaacctgtaaaattattattattttttatatttgggacctgaagtcactttaggcagctggtgttkaaggggtataggactcaggttcctcttgctggggcagctgattcccttggggctggggtgagtctcaatgctccctatgtgagcactggcctagaatcaaggaccacagagttctaacctggtgctgtgttttactgtagcaaagctggtactaagttccaatacagcccccaccccctgatactttcctctccttcaagaagaaagatttttctacacactgtgccacttsggtttgggggaggggtgtgagactgtactttctgctctcttcaatgaatattttctagttattatgctaaaaccaggtaccatgacctctcacctgattcctttagttcttgtgaaggtgtattcttgcatggatagtcattcaatttgatgttcctgtggatggatagggttcttcctccatcttgctctrgtgattctatctcaaagcctttcttcttatagmtgagaaaatgggtgaggttttttcagccaaaggaaaaatcttacacctgartataaattttaaactcaaaagcccatctcaaattacaaatgttgcaatttctagaaaamaatttcatatsacaatttgactatgatacatgtatgtgtggatttctatgagtttatttttgaatttatggaacttcttgatgtgaagattaatgctttaacaaaattttggaacttttcattcactatttattaaaaaagttttttcttctcttcctcttttcttcttctggaatgcccattatgtrtatgttggtacacttggatggtgttgtaccaatttctgaggctctgttaatttgcttcattcctttttstttatgtttctctgactaggtaatttcaacttatttgtctttaatgtcactaatttttttgtcttttaaaatagtcctttgattccatctttccatttcagttattgtggttttcaactccagaatttctatttggttacttcgggaaatttatatcatgctattgattttctttcacagtgagatattattacactttaattctttagatatgattccctttagttatttgaatagttttataatagctgatttagaatctttgtctagtaagtccaacatcttggcatcttcagggagagtttttattaactgatctatttttgttttgtgtattggctattttcttgtttctgtgcrtgtctgataattttttgtttaaattctaaataatatgatgtgaaattctgaaaattagattactcttctttcccagggtttgttattttgctgtttttgttatttgtttgattagtgcatttcttggactagttttgtaaagtttatatattttgttgtttgtaactactgaagtctgcttagttagcttagtgatcwgctaatgactagacagagatttccttaaatgtattgaattgatgtctcccacccttgtagaggggctccctgtgtgtctctgtgtgtcttgaggcatgctttcaatgctgaggtaagaagtttgtaactctgccttagccttcatttcctgtttgctcagaacctcaaggtcagttagaggtgagagatctgggaatattcatgtctttcctaaacctgtgcacagccctacatatgtgttttgtctattagattccctgatacatgttagagctttatagagccactccttatggacatctaatttcccartttttctttttgagattttgatggtcagccccaacctggtagtgctcatcacatgtctactatgttaagcagttaccactgatcattttttgacaaatgccctagggtgagggatattctggacaaggaaagctctaagtcaggtcaaatagatatataccttgacagtgcatcttttcaggaagctggcagatacatcatcaaatagtggttattctctaggaatggtgcttttggggatcctcaaacttattttgccctctctaggggttgttaggcagctggatttcacagctattatagttgtgaggctgttggttgactgggttaccaaggacctagagtgaggggaatggaattagggcatattaacatgctaactgttaccaaggtcagccattagaaaatgtatttgttctataatgactgtacacatattttcaattgcaccaacaattatacaagggttttctttctccagtttctcaccatttgttatcttttgcgtttttcattatagttgttctaataggtgtgaggtgatatctcattgtggctttaatttkcatttccctgatgattaaaaatgttgagcattttttcatatacttgttgactatttatgtgtcttttttgtttgtttgtttttgagagacagagtcttgctctgttgcctgggctggagtgcagtggtgtgatcttggctcactgcaacctccacattctgggttcaagtgattctcctacctcaacttcccaagtagctggaactacttgggatgccacccaagtagtgcgtgccaccatgtccagctaatttttgtattttttagtagagatggggtttcactrtatgttggccaggctggtctcaaactcctgatctcaagtgagccacctaccttggcctcccaaagtgctgggattacaggcattagccacgatgtctggcctatatgtcttcttttgagaaatatgtattaggctttttgtacatctttaaattgggttgcttcttaatattgaattgattgcattccttacgtattttgactattaactccttatcagatctatagtttgcaaacatcttctcccattctgtaggttgtctcttcatactgttgatagttttgttttctgtgcaggaactgtttagtttgatacaatcttattctatttttgcttttggggttgtattaaaaaaatcattgctaagaccaatgtcagggagatttttccctacgttttcttctagtagttttattgttttatatttattatggcagttcctcaaaaaattaaaaayagaattaccatcagatccagcagttccatttctgggcatacagtcaaaagaaattaaattagtatgtcaaagagatatcagcaatcctatgtttattgcagcattattcacagtagacaagatgtggaatcaacttaagtgtctgtgttagtccattcttatgttgctatgaagaaatacctgagactgggtaatttataaagaaaagagatttacttgactcacagttctgcatggctgggtggcctcaggaaacttacaatcatggcagaaggggaagcaaacacatccttcttcacaaggcagcaggagagagaagtgccaatcaaagggggaaagcmcctcagaaaaccatcagatcttgtgataactcacaatcatgagaatagcatgggggtaactgcccccgtgattcagtcacctcccactgggtccctcccatgtcatgtggggattatgggagctrcaattcaagatgagatttgggtgcggcgagccaaaccatatcattccacccrgcccctcccaaatctcatgtcctcacatttcaaaacacaatcatgcccttccaacagtcccccaaagtcttaacttattccagcattaactcaaaagtctaagtacttgtgagacaaggcaagtcccttctgcctatcaccctgtgaaatcaaaggcttactttccagatacaatgggggaacatgcactgggtaaatacacccattccaaataggagaaattggccacaacaaagaggctacatgccccaatcaagttcaaaatccaatagggcagtcattaaattttaaagttccaaaatgatcttctttgasttcatgtctcacatccagggmacactggtgcaagaggtggrcttccgtggccttaggcagctccacccttgtggctttgtggggtacagccccattcccaggtgccttcacagctggccttgagtgtctccagcttttccaggcacatgatgcaagctgtcagtggatcttccattctggggtctggaggacagtggccctcttctcacagctctactaggcagtgccccagtggggactctgtgtgggggctccaactccacatttcccttctacactgccctagcagaggttctccrtgaatgctccccacctgcagcaaacttctgcctggacatccagacatttccgtacatcctctgaaatctaggcagaagttcccaaatctcaattcttgacttctttatacctgcaggctcaaaaccatgtggaagctgccaaggcttggggcttgcaccctctgaagcaatggtctgagctgtacattggtctatttcaggaatggctggaggtgaagcagctgggatgtagggcaccrtgtcctgaggctgcacagagcaggggaacctgggcctgatccaggaaaccattttttcctcctaggcctctgggcctgtgatgggaggggctgctgtgaaggtctctgacatgacttggagacattttccccattgtcttggtgattaacattagctcctcrttacttatggaaatttctgcagcaggcttgaatttctccccagaaaatgggtttttcttttgtattgcatcatcaggctgcaaatttttcaaacttttatgttctgcttcctcttgaacactttgctgcttagaaatttcttctgccagataccataaatcatctctctcaagttcaaaattccacagatctgtagggcaggggcaaaatgctaccagtctctttgctaaagtattgcaagagtcacctttattccagttccgaacaacttcttcatctccatctgagaccacctcaggctggacttcattgtccatatcactatcagcattttggccaaagccatttaacaagtctccaggaagttccaaactttcccacatcttcctgccttctaagtcctccaaactgctccaacctctgcctgttacctagttccaaagttgcttctacatttttggttatctttatggcagtgcctcactactgtggtaccaatttactatattagttcattctcaaactgctatgaagaaatacctgagactaggtaatttatagaaaagaagttaatttactcacagttccacatggctgggatggcctcagaaaacttacaattatggtggaaggagaagcaaagacatcctccttcacaaggtggcaggagagagaagtgctgtgcaaagggggaaaaacctcttataaaaccattcatatctcgtaagaactcatttactatcatgagaatagcatggaggttggcgccctcatcattcaattacctcctgctgggtccctcccatgacacatggggattatggaaactacaattcaatatgagrtttgggtggggacacacacaaaccatatcagtgtcctttgacaaatgaatagataaaaatgtgctgtatatatacacaacgaaatattatgtggccttaaataaagaagttctgtcagttgcaacggcatygatgaacctggaggatattatgctaagtgaaataatccaggcccataaagacatatattgcagtcttggtaagttacatatttctatgaatttatacatttgttctagattattcaatttttggtgtataattgttcataatagtcataattttttgtatttctgtggtcagttgtaatgtctcatctctcatttataattgtatttatttgaattttcttttttgtatagctaaaattttgccaattttgtttatcctttcaaagaataagctcttagttttgttgaccatttctagagtttttctagtctctattgcatttagttctgctctgatcttcattatttccttcctcctattaactgtggacttagtttgctctttgtttttagtgttccatgacatgtactagatttttggatttgaggtctttctttttttcttaatgtagacattcattgctataaacctcctgttaggactgcttttgcatcatttcatgttttgttatgttgtgtttccattttagtttatcttgagatatttttgattttcctttttattttctcattgactcattggttatccaggagtgtgccactaaattttcccacattttgaattttctgaaaaatttcctgtgattgatttctagttttataccattgtggtaagaaaagataattgatatgatttcagccttctaaaatttgttaagacttattttatggcctaaaatatgaccaaagtcataccttggagatactgcaggttcagttctagaacaccacaataaagcaaatatcacaataaagcaagttacacattttttgtttcatggtccatatgaaagttatgtttaaggtctaatatccagcatctatacgaaactaaaacacatttacaaaaaaataaacagcaacaacaacaaacaaccccattaaaaagtgggcaaaagacatgaatggacacttccaaagaagacatacatgtggccgacaatcatataaaaaaagcttaacatcactgatcattagagaaatgcaaatgaaaaccatgagatgccgtctcacaccaatcagaatggctattactaaaaagcccaaaaagaactgatgctggcaaagttgcaaaggaaaaggaacacttatacacagttggtgggagtgtaaattagttcaaccattgtggaagacagtatggtgattcatcaaagacctaaaaacagaaatagcatttagcccagcaatcccgttactgggtatatacccaaaggaatagatatcattctcctatraagacgtgtgcacatgtacgtgcctgtttggtgctcactgctttttgcctgagtgggtasctaaggtacaagacaaagtcctctttactttttcctctgtttttcttttttttttctttttttttaatattatactttaagttttagggtacatgtgcacattgtgcaggttagttacatatgtatacatgtgccatgctggtgcgctgcacccactaactcgtcatctagcattaggtatatctcccaatgctatccctcccgcctccccccaccccacaacagtccccagagtgtgatgttccccttcctgtgtccatgtgttctcattgttcaattcccacctatgagtgagaatatgtggtgtttggttttttgttcttgcgatagtttactgagaatgatgatttccaatttcatccatgtccctacaaaggacatgaactcatcattttttatgactgcatagtattccatggtgtatatgtgccacattttcttaatccagtctatcattgttggacatttgggttggttccaagtctttgctattgtgaataatgccgcaataaacatacgtgtgcatgtgtctttatagcagcatgatttatagtcctttgggtatatacccagtaatgggatggctgggtcaaatggtatttccagttctagatccctgatctttgacaaacctgagaaaaacaagcaatggggaaaggattccctatttaataaatggtgctgggaaaactggctagccatatatagaaagctgaaactggatcccttccttacaccttatacaaaaatcaattcaagatggattaaagacttaaacgttagacctaaaaccataaaaaccctagaagaaaacctaggcattaccattcaggacataggcatgggcaaggacttcatgtctaaaacaccaaaagcaatggcaacaaaagccaaaattgacaaatgggatctaattaaactaaagagcttctgcacagcaaaagaaactaccatcagagtgaacaggcaacctacaaaatgggagaaaattttcacaacctactcatctgacaaagggctaatatccagaatctacaatgaactccaacaaatttacaagaaaaaaacaaccccatcaaaaagtgggcgaaggacatgaacagacacttctcaaaagaagacatttatgcagccaaaaaacacatgaaaaaatgctcatcatcactggccatcagagaaatgcaaatcaaaaccacaatgagataccatctcacaccagttagaatggcaatcattaaaaagtcaggaaacaacaggtgctggagaggatgtggagaaataggaacacttttacactgttggtgggactgtaaactagttcaaccattgtggaagtcagtgtggcaatttttcctctgtttttcttaagcagagggagtttcttaccatagccaccacagttggaaatgtgctgggtctcacctgaagccagcatatctcagagtctcacctgatgcccatagcatactaccgagatcttgctgctgattattcagggcccaagggctctttagtcagcaggtgatagawcttgccaggactgaattcttctcttgaaggtggcaagttcccttttggcccaggatgtgtctagaagtgtcatccaggaactraggcctggaacggaggcctcaaaattytgcccagtgccctatcctactgtggctgagctggtatccaagatacaagatgaaatcttttttattcatccctctcttctcctcaagaagaaggtcttttttggagctgtgagttgcactgcctgggtttggagtaggggtggcacagcactcctttagctgtcctggctggtgtctcagtagatgccccctaagtccactggctctgaatcyggctcagcactaggacttgcctaggagttgcagtccttgtggcctatattgcctttgaagttaagttccagggaacttttagcccatggtggtaaggcttgccagawctcaagttccaacagcagggatatgcaattcccttttggcctctctccataggtgggcatcagctgagtttagcttgatttttctttctgccatgacagggtagcactgagttcaatgcaaagtctcacaatcactgcactgtttctctcaaagagcacaaataatttctctctgcaccaggcggacactgctgagcaatgggggagggatggcattagcaattcaagactgtcctttctaccctcttcagtgcctctttcaacaatatgaagttaaaaccagatactgtgagtgttcagcagatttttggttcctactaaggtgctttttcctgtatagatagttttaaatttgttgttcctgcaagagggataattggtgtaaccttctatttgaccatcttgctccaccactttgggtatccaggatagcgcttttattagctacaggagwcctcactatttggactgtagtggggctctgtgttgtgcccccatgactatkaaatgatgataagcatctaatggagagcccctcaatctcttccttgagaccttattgttgagcaactagagccatagatgtctttgagaagggacttaaacaaatggtccaggagtgagtgcccagttacatttttacatcactctgactgctaatgaaatactggtgtcttggcagtaggttcttttgtctggcatggaaatttttcagttaagatctggattgtgctgctaactatttcacatcatcaagttcaattgagctagataaccaaygagagtagcacaaatgaacctaggtctgagtttggtaaatgatcttatttgtcttctgttgttcttactccttattgctgaagtaagagactatcaggtagctttcagggcactttggaggtgactggaagagtgatcagaaaaggtttttcagtggcagggaactcaccacagttggaccaaattagtcagaggccgaatagcagccagctaagaaaagagaggttctcatatgtatgtaacactttccccctacccacttcttcatccttcttgggcaaagtggccatgraaggacattctgaataaggaggtctgcagtgacacacctcataagtgccactgtccctaattaaatctaacgagagtaactcatttaaggtaaaggtgaactattcacatctcttctatggtctcttttgattggtgtgcaatatgatcatgaggactctacatactttttcatcacacatggaaaaatgaataaaacatgaaaacatgcattgtagacactcagtgctaggaacatgcttagatttaacaatggtcattggatgcaattttgcatgtagggtctatgcaaattttggtcaccarctactttgttttctggtttatctttcctgtgtttcaatttctaaaagtaagtatctctttacatttatttcctaatggatagcatacttgatatctttcttctatttcaattttttctcacttaacattaccttctataaatccctctaaatcaggttgtaacaatctttttattacttttagagcttcctgtacaactctttgtatcatattaaatattgtagttgataataccacaaattataatatatacctttttattaaccaatttcatatgcttgtacatttaagtgattttgagtattttgtaattaaaagtatgctgtaatgaataaacttgcacatatgaattttcattgctttgcctatgaatatatattaatctaaattataaataatyaagaacaagtagaggctaatataaatatttgatrccaagaaatatcaaaataatgagactacttcacctcagatcctttaaagttcttgtcactattttcatgtcagatctagaattatagtaatttacttatattttacatgtataaaaatgagacagaatatggctgtatacttgttataaatctgaaatctagaaatttcactatagtttatgtttagtgcactaaatttattaatttgtgtagctcataatgatgtaccagaagaaaatcttatgcttgaacaagacacaaagtcaaaaacggaagtagaagtaaagaaacaaaaatctttccaagataatcaactcagtagtaagtgtaataattgtagataaccttaaaataatttaagatttatttttaattggcaagtaaaaawtatatacattcatcatgtactacatagtgttttaatatataaattgtggaataataaattgtggaatttaaatataaattgtggaaaataaaatcaagctatttaacatgtatattaccttgttatttttttatattgagaagacttaaaatttctcttagcaattttgcaatatgttattattaacagtactcatgaagtgcagtagatctcttaaacgtttctcatttccagctgaaatgtgtgtcctttgaccaacattgcttcagtcctcccaccatcagcctcttataaccaacattttactctctgttcctatgaacttgactttttaaaactcctcatataggtaagataatgcagtatttgtttttagtgaytggcttactttatttaacattrtgttctccacattcatccatattatcacaaaagacaaaatttacttcctttttttaagggtgattttcgttatctattgatctgtggctggacactaagtttgaytccgtatcttggttattgtgagtaatgttrcagtgaacatgggagtacaaatatcycttttatatactgatttcatatcctttggaggtacatccagaggtgaaattgtggataatattgtagttctatttttaattttttgaggaatccctgtagtgttttccattatggctttactaatttacattcccaccaacagtgtacaagtgttcccttctcttcacatctttgccagcacttctcttccatctttttgataatagttactttagtgtgtgggaagtgatatttcattgtggttttaatttgcatgtccctgatgattagtgatgttgaacacttgttcatatacctgttggctatttgcatgtcttcattagagaaatgtctattcagatcccatactcatcttttatttgcgttgattgttttctaactattgagttgtttgagctgcttctataaattggatcttaactgcttatcagatttatgatttggaaatactttctctcatgcaataggctatttattcctactgttgattgtttgctttgctgtgcagagctttttagtttggtttaataccatttacttatttttgcttttattaccttgcttttggggtcatattaaaaaaatctttgcccagatcaacataattgagtgtttcccatattttcttctagcaattctagtttcagatcctaaatttatgtgtccttaatccaatttgagttgatttttrtatatagtgtgagatgaaggtataattttattcttctgcatgtggatatctagtttttcaacaccattgtatattttattccagtgatctacatgtctgtttttgtaccagtaccatgctgtcttgtttgctgtagctaaataatatgttttaaaattaggatgtacagtgcctccagctttgtttttcttgctcaagattgctttggctattcagcgtcttttatggttacatatgaatttttggattttttctatttctgtcaaaaaatgttrctgggattttgatagggattaaattcataactgatgggcattttaacaatattaattcttccaatscaggaacatgggatatctttttatttatttgtgctttcttaaacttcttttactaatgttttatagttttcattgtagaactttttttcctcctygkttaaatttattcctaggaacttaattttttgtagatattgtaaatgagattactttttgacttctttttcagacagttcattgttagagtataggaacactactaatgtttgtgtgttgactttctaccctgaaaattttatgaatttaatcatttggtctaatagttttttggtggagtctttagagtattctttttcttttttttttttttttcattgacaaagaagtttcaccsgtgttatttagtccttgtrgtagtcctttggaataagcaatgttattccctttgatttacactgagacctaaagatgatgaagagaaggtagattacaaagataataatataaatagctatcatttactgaattactaataaataccaggtacggcagtaggaagaacataatatttttctaacatacacaataatcctgcaaggttggacttagtatttcttttgttktttttatactttacgttctagggtacatgtacacaacgtrcaggtttgttacatatatatacatgtgccgtgttggtgtgctgcacccattaacttgtcatttacattaggtataacttctaatgctatcrgtcccccctycccccaccccatgayaggccccagtgtgtgatgttccccttcctstgtccaagtgttctcattgttcaattcctacctatgagtgagaacatgtagtgtttggttttttgtccttgcgatagtttgctgagaatgatggtttccagcttcatccatgtcctacaaaggacatgaactcatccttttttatggttgcgtattattccatggtgtatatgtgccacattttcttaattcagtctatcattgttggacatttgggttggttccaagtctttgctattgtgaatagtgccacaataaacatacgtgtgcatgtgtctttatagcagcatgatttataatcctttgggtatatacccagtaatgggatggctgggtcaaatggtatttctagttctagatccttgaagaattgccacactgccttccacaatggttgaactagtttacagwcccaccaacagtgtaaaagcgttcctatttctccacatcctctccagcacctgttgtttcctgactttttaatgatcaccattctaactggtgtgagatggtatctcattgtggttttgatttgcatttctctgatggccagtgatgatgagcattttgtcatgtggctgcataaatgtcttcttttgagaagtgtctgttcatatcctttgcccactttttgataggtttgtttgattttttcttgtaaatttgtttaagttctttgtagattttggatattagccctttgtcagatgagtagattgcaaaaattatctcccattctgtaggctgcctgttcactctgatggtagtttcttttgctgtgcagaaactcttcagtttaattagatcccatttgtcaattttggcttttgttgccattgcttttggtgttttagacatgaagtctttacccatgcctatgtcctgaatggtatcgcctagattttcttctagggtttttatggtttcaggtctaacatttaagtctttaatccacgtgaattaatttttgtataaggtgtaaggaagggatccagtttcagctttctacatatggctagccagttttcccagcaccatttattaaatagggaatcctttccccatttcttgtttttctcaggtttgtcaaagatcagatggttgtagatgtgtggtattatttctgagggctctgttctgtcccattggtycatatctctgttttggtaccagcaccatgctcttttggttactgcagccttgtagtatagtttgaagtcaggtagcgtgatgcctccarctttgttcttttggcttaggattgacttggcaatgcaggctcttttttggttccatatgaactttaaagtagttttttccaatcctgtgaagaaagtcaytggtagcttgatggggatggcattgaatctataaattaccttgggcagtatggccattttcacgatattgattcttcctgcccatgagtatgggatgttcttccatttgtttgtatcctcttttatttcattgagcagtggtttgtagttctccttgaagaggtccttcacgtcccttgtaagttggattcccaggtgttttattctctttgaagcaattgtgaatgggagttcactcataatttggctctctgtttgtctgttattggtgtataagaatgcttgtgatttttgcacattgattttgtatcctgagactttgctgaagttgcctatcagcttaaggagattttgggcagagatgatggggttttctagatatacaatcatgtcatctgcaaacaggaacaatttgacttcctcttttcctaattgaataccctttatttctttctcctgcctgattgccctggccagaacttccaacactatgttggataggagtggtgagagagggcatccctgtcttgtgccagttttcaaagggaatgcttccagtttttgcccattcagtatgatattggctgtggatttgtcatagatagctcttattattttgagatatgtcccatcaatacctaatttattgagaattttttagcatgaagggctgttgaattttgtcaaaggccttttctgcatctattgagataatcatgtggtttttgtctttggttctgtttatatgctggattacatttattgatttgtgtatgttgaaccagccttgcatcccagggatgaagcccacttgatcatggtggataagcttcctgatgtgctgctggaatcggtttgacagtattttattgagaatttttgcatcaatgttcgtcagagttttctatatattggtttatgttatctgaccaagataattttacttcccccatccaatttgaatgccttctgtttctttttctttcataatttatttgcctggggctgccagtgttctgtagaatagaagtggtaagaataagcatccttgtcttgtttcttatcttagaagaaacgctctcaacttactaccattaagtataatgttagctgtggcttgtttgttgtatatggcttttattgtggtgaggtacaatcctcctatacctaactggtttaaaatttttattttgaaatgatttggaattttactggatgttttttctgcatctattgagattatcatgtggtttttgtccttcattctgttaatgtgatgtatcacatttattgctttrtgttgaaccatccttgcacccaggagataaaccacacttgatcatggtgaattcttctttgaatgtgctgtcgaatttagtttgttagtattttgttgaggttttgcatgatcatcagagatattggcctttgtcttttcttgtagtgtccttgtctggctttggtatcagtratgctggcctcctaaaatgagtttggaagtgatctctcttcttctatttttttgaaacatttgaggggcattagcattaattcttcttaaaacattgggtagaatttagtagtgtatccatgaggtcttagcttttctttaatrgaatagtttatattagtgatttaatcaccttactcattattagtttattcatatttctcttcttcatgatwtagtcatggtaggttgcatgtgtctaggaattattcatttcttcayggttattgaaattggtgccatatagttattcatagtagtctctcatgatcttttgtatctctgtgtcatcagttgtgacagttcttcttttattcctggttttgagtcttttctctttgttagtttcattaaagattcattgattttgtcttttctttttttgttgttgttgttgtccataattctaatttattaactcatcattttaaatatttaactttcagggacagtagaatgtttgtattgttatacgtgaattctctttcttctcagtaaaattacataaaaggacaaattataatcagacgtttgcttggtgagcatggagtcaatccagggagaatgaattggatgatcaaatgtctattacatccatcttcgcttggggcacgtttgtaagagggattggatacttatttctggggtcgggacatgtcctttcctgggttgtcctgggttctttcctcttagagaccctttactgycttccctctggatcattcccttttcgttaatatattctttctttataatgaagacaatgcaatttatttgattatatgttttaatagtccttgtctgttgaggctgtgtcttaatgaatacaatccaaacattaccgaactccccagtcaacagttcataggattttttaagggtagatgatttcgttgttttttatagaaaaccattctaagttgcttcctgttgatttcctatacttttatttactttcttttttttttaaatttattattattatactttaagttttagggtacatgtgcacaatgtgcaggttagttacatatgtatacatgtgccatgctggtgcgctgcacccactaactcgtcatctagcattaggtatatctcccagtgctatccctcccccctccccccaccccacaacagtccccagagtgtgatgttccccttcctgtgtccatgtgttctcattgttcaattcccacctatgagtgagaatatgcggtgtctggttttttgttcttgcgatagtttactgagaatgatgatttccaatttcatccatgtccctacaaaggacgtgaactcatmatttcaaaataccaactcttagttttgttgatcttttctattgtttttttctcccttctattgtttttctagtatctattttgtttatttcttccatgagctttattattttcttccttctataaactttgggtttagtttgttctattttccttagttccttgtggtgtaacattaggttgtttatttrrgatcttttatttaatgtgggcttttagttctataaatggtacaattgtacagtgtgtttgtgttttaagctgtgtcattacaaaagagtaaaaaagtaaaaaacattaaaagtttattaaataaaaagttacagtaaactcaggttaatttattattgaataaagaaaattcattcaaaatttagtgtaacccaagtgtacagtgtttattaagtctacagtagtgcacagtaatgtcctaggccttgacattcaccactcacttactcactcactcagagtaactcttagttctgcaagctaccttgatggtaagtattctatacaggtatatcagttttaaaacctttataccatatttgtgctatgtttttctaattttcctgtttagatatacaaatatttaccattttattcaaattgaatacagtatttagtatagtaacatactgtacagctttatagcataggagcagtagactatatcatataacttaggtgtgtagtaggctataccatgtaggtttatgcaatgataaaattgcctaatgacacgtttcaagacatatccytgtcattaagtgacacacataactattttttctaacttgtctgatcctcctaaaaaatgttttgaattttttatgaggcagttcttatatctgcatttctttgggatcagcttcaggagattattgtggtgttttggtcatgtcgtatctttagtttttcatgtttcttgttgctttacattgatgtctgcaaatctggtgcagcagtcacctcttgtagcctcttctgactagtttagctgttgaaagaccttctcctacaggggtgtgagggcgcttgctgggtgggctgctgcagttctggcactcatgagattgagagttgtgtcacctttgtgtagctctgggaactgaggttggtgatgacaaagatttcraggatcctcagcagccaatgctgtgaatgtttgcaattgtggcaaaggttattggggtcttcagtggcaatgactattaaagttcttctgatttctttttctctcagtgaggaagttttgctgataaaatccctcttggttccgggtctgacttgtcagcttgcttgcattggtagtggcatgagtatttgattagtggtgccaatggagtggctgcagaactgagatgtgaagcacaggaatgtgtggagggagcatggttctgggacccagggcagtaacagcacttatgcccagggcacatgcacctctgctgccaccttggtaacagaatcaaggtgcagattcctgtgaaatagctgggcagctaagaatgagaatattgatatccacacagtttgagctgctctggagttggggcacagtccagctctctatgatggctaaaccagtgtytggagcatgggcacacacagtgaacgtgtggytctgggatttggaatgcaaactaccttgctgtgacaacgattcccaatgtctgaggtgtgkgtgggttcaatgtagacacaaaacccaggtctggaatgtggttacttgcagagtggctatgttttgggtcagggcacacatggggttagaggaggtggtgacttctttcccagtagtggcttaacagtgctgattcttgtttggaggaggagtgtacagacacatcaccctttctggggtttcctggtggggatggctcttggttacctcagtagaaagaaatggcagtgtcctgggtggatcaggccgttgggaaccatggtggttccagcagcatggctgatgcccatagcctccacctttcttctttgctcctagctatctcctggtgtctaagatatgctgacctcaccagagatcctttctacttggacattgtgctccactgtgttgctacagwttcattaatgtgcccatgacacctctctgggctattgtagtttgtgaaaggtgtctatatttgtttcatagcaggagggatgaaggttgctatctcctctgmcatcttggtgctttcctaccttatttattttttaaaccactttactaaggttgatttttttgtgtatagtgtaagagtttaatttcattyttttccatgtggatactctgtttccccaatgctattgaggagactatgctttcccttttgtgtattcttaccacccttgcagaagataagttcacaatatgtgcatagggattaattctggactccctgttacattggtgtatatgtcttttatggcagtacatatttttgacttactataatataagctttgtaatgtgttttaaaatcaggaagtatgatgcctccagtttttttttcttgctccagattgctttgactatttgggttttttggttccatatgaattttagaattgttatttcaatttctgtaaaagtgtgccattggtattttgataggaattgtacatcactttgggtagtatgggcattgtaacaatattaatttttccattttgaacaaaagatgtctttccattttaatttctttcagcaatatattatcgttttcagtgtacaagccttttgcctttcgaataagtgtattgctagtattttttcctttttgatgtgattgtaagtaggattgattttgaattcctttttggatagttcgttgttagtataytaaaacaaaaccaatttgtgtatgttaattttatattctgtacctttactgaatttattagttctaaccattgtgcaygtgygtgtgtgtgtgtgtgtgtgtgtgtgtgtgtgtgtagtttagggttttctacattaaaaaatcaataacaaatagtgagactgaaccagtaaccagaatctctgaacatgaaaaccatgaatcagtcttattatttactattgaccttttcaagttttccattttttcttgattcagtcttggtaggttattggtaggttctaggaatttaacaatttcttctttgttgtccagtttgttggtccataaattgttcataatagtcatttgtgatcttttctcatttccatggcatcagttgtagtgtctcctctttcatctagttttatttatttgagtcttctctttttaataattaatctagctaatagtgtgtcaattttctttatcttttcaaaaaccgaactcacattttmatcaattttttctatatttttttcctattttatttatttctgttctaattttrtttttttttctgtgaactttggctttagtttcttatttttctttttccttgaagtgtaaagttaggttgttcatttgaaatattttttatagtgattatcaactttccttatggtactgcttttgctgcatcctgctgtaagttttggtatattttagttttgtggattttttaaaatctcaagatagtttctaatttcccttttgatttcttccttgatccagtggttgttcaaaatttgttgtttaattttcatgtatttgtgatttttttccatttttctttcattactgatttctagtttcataccattgtgactggaaaataatcttgtaatggttttaattttcttaaatgtttaagacttgttttrtgatatagcatgtgatttatcctgtaaatatctcagtgtgtaggagaattgtgtgtattccrctgcttttggatggaatgttctttaaatggctgttaggtccatttggtctacagtgttgttcagatctgttgtttattgattttctgtttggatgatctatccatttttgaaagtggagtattgaagtctctctcttcatacctattattacttttcttatgtatttatgtgctctgacgttggacacaggtatatttatcattgttatatacatatatatatttttgagatggagtctygctctgtcgcccattttaatggtgaattgacccttttatttttgtgtggtgaccttttttttgtctcttgacatcttagttatctaagtacagccacttctgctctctttttgataccgtttgcatgggatatcttttcctctccttctcttttagtgtttaagcccgtcacttttagttcagtttgtccttaactctaaagcaagtctcttgcaaatagcatatagtggatcttgcttttctcatcctttcagcttctctgyatcttttgaatgttaactttaacctatttatatttaaaattattattgctaggtgaagacttactattgcaattatattgttttctctctgttttatagctgtgccctatcttcctctctttctgctttactttgtgatttgattactttttataatgatatactttatttccttttcatcttttttgtgtctgatayaggtttttctttacgattaccatgaggtttgattaccataaagttaaaattacagttacgattaccataaagttaaaatggtctattttaaattgttatctattttaaattgttaacaacttaacttcaattgtatacaaaaattttacatttttattccacccccattttaggttattgatgtcaaaaattactttatattctgtatccattaaccaatttttgtgattatagttatccttaatacttttgcttttaacttttatactagagttaaaatgattcatgtaccactattacagtattacattattttctgattatcaatatrtttacttgctagtgatatttatactttcatatactttggtgttactgttgagcatcctttcatttcaactttaagaattccctttatcggacgtgaaggacctcttcaaggagaactacaaaccactgctcaatgaaataaaagaggatacaaagaaatggaagaacattccatgctcatgggaaggaagaatcaatatcgtgaaaatggccatactgcccaaggtaatttatagatttaatgccatccccatccagctaccaatgactttcttcacagaattggaaaaaactactttaaagttcatatggaaccaaaaaagagcccgcatcaccaagtcaatcctaagccaaaagaacaragctggaggcatcacgctacctgacttccaactatactacaaggctacagtaaccaaaagagcatggtactggtaccaaaacagagatatagatcaatggaacagaacagagccctcagaaataacgccacatatctacaactacctgatctttgtcaaacctgagaaaaacaagcaatggggaaaggattccctgtttaataaatggtgctgggaaaactggctagccatatgtagaaagctgaaactggatcccttccttacaccttatacaaaaattaattcacgtggattaaagacttaaatgttagacctaaaaccataaaaaccctagaagaaaacctaggcrataccattcaggacataggcatgggcacggacttcatgtctaaaacaccaaaagcaatggcaacaaagccaaaattgacaaatgggatctaattaaactgaagagcttctgtacagcaaaagaaactaccatcagagtgaacaggcaacytacaaaatgggagaaaattttcgcaacctactcatctgacaaagggctaatatccagaatctacaatgaactcaaacaaatttacaagaaaaaaacaaacaaccccatcaaaatgtgggcgaaggacatgagcaaacacttctcaaaagaagacatttatgcagccaaaaaacacatgaaaaaatgctcaccatcactggccatcagagaaatgcaaatcaaaaccacaatgagataccatctcacaccagttagaatggcaatcattaaaaagtcaggaaacaacaggtgctggagaggatgtggagaaataggaacacttttacactgttggtggractgtaaactagttcacccattgtggaaggcagtgtggcgattcctcagggatctagaactagaaataccatttgacctagccatcccattactgggtatatacccaaaggtctgtaaatcatgctgctataaagacacatgcacacatatatttattgcggcactattcacaatacaaagacttggaaccaacccaaatgtccaacaacgatagactggattaagaaaatgtggcacataccatggaatactatgcagccataaaaaatgatgagttcatgtcctttgtagggacatggatgaaattggaaatcatcattctcagtaaactattgcaaggacaaaaaaccaaacaccgcatgttctcactcataggtgggaattgaacaatgagaacacatggacacaggaaggggaacatcacactctggggactgttgtggggtggggggaggggggaaggatagcattaggagatatacctaatgctaaatgacgagttaatgggtgcagcacaccagcatggcacatgtatacatatgtaactaacctgcacattgtgcacatgtatcctaaaacttaaagtataataataawaaaaaaaaagaattccctttatcactccttgtaaggctggtctagtgttgattaactccctaaatttttgtttgtctggaaaagtatctatgcttaacttttaaagcacaatttttctgggtgtagtattcttggttgacatttatttcattcagtactttgaatatattatttcattctcttctggcctgcagggtttgtgctgaaaagcttattgatagttttatgggtttatcttgtatgtgatgtcatttttttctttccattttcaaaattttctttgagttttgacaatttaatgtgtctcagtgtaaayttcttaagattcaacctatttaggatcctttgtgtttcgtgtatctggaagtccattttcctcctcagatttgaaaaaactgtattcattatttctttaaataagccttctgccattttccctctctttcttcttggacttccatatgcatatattggttcacatgatggtatcccatacatcttataggatttcttcactctttttcattatttttatttttgtttctcataataagaaatttcaaaggacctgtcttagagtttgttgctttgctattttcttctgcttgataaagtctgcttttgaggctatctatgaaatttttcagtttatccattgtgttcctctgttccagactttctgttggtttacatttttatggttggtaagtctttgttgaatctctcattttttgttcatgtgttgtttccctaattttatttggttgtctagctgtattctattttagttcactgagcttgtttaaggccattatttttatgtctttttcagggaggtcatagatctgcatttttaagaatctcttatttgagctatattttgttatttgagttatcacctgtgcatcaacagagcatcccgtggggttgtattgccctgattcttcatgatccttgtattttcattgatgtacgtgcatttaaagaakcatctttacatgctagctttggcccttcactagacagcccagccagagtttgtgtgggtccattagcagggttcatgggcaggtcagctgtcagggtccacaggagtgttggctctcagggtttgtgggcaagcctactgctgtgatttgtgtgtcagctattggatccatactgtttcttgagagcttctgaccacccctcttcctgcctcttttttttggtttttagctaccttcaggtgatctagccatgctgattccctgagtgttttgattgtggtgcagtataagtaggcctctcaggttataccataacaggctgggaaaagtccaatgctcactttattccccacgggaaaactgaaaagcccaggagatctctcttggcactgtgctgtgacagcttggggaaggtgtgacatgagtagagatgaaactgttcttattatcctttaattgcacttttgccttgtttctgtgttccaytgctgtgctgtagcctctcatttgaattccagaggtctcataaaggtaattttatccttgtctggttgttaagtcttcatttttgtggaagaawgagggctgggcctcctattccatgatcttacttacatcaatccccmtattttaatttattttaagttcaacttatcagaaattttttttgattcatgaatatgtatttgggcatatgtttcatagaaatttttaactttgacctaaagcatgtatactctaagataattagaaaataaaagtattgataacttttggttggaatttcttgtyttgagactatttcacaagcatgggttgtgtgctcagaattcaccaaagcccaataaaaggccaataattgtctcttaaagggtatatacttttcaggtatttctgaaaatgacaggttcaaaagcccaatagattcctctgacctgtggcagtgtccttctgccataacctccaattggcaaacagaagacctcttactcaaacagtaaatggatatcagagtggcccaggggtagtgctgtttgggttgcttgttggaggacctccaggccatcctcctgattgtggcacatataaaggaaacaactttcttgtaaccccatagttggatggcattaagattgccacatgggcaatacaagagtgtaagtagtcgaatagtctcattaatcttctttttaattgtttgatcagagagagccagagccagtattatcacatggaataagacaacattccccttacagataatgctcaggaattacacttgggtactaggtacttgtactttgtaataatgctttagagaattatcatctgtgcatcaacagagcatccagtcctatttggggggttgcatgtttgggatggtgtcatgaatggattagaaggctagtccttcctctggtagtgagacattttctatgttatggtttatgcatggatgacagatagggaattaagtatattagtggtcaattttatccattccatacaagggtaaactgatcctaatcatctctatgtagatagatactgaatggggcatgtgcagtgtgaattgttacgtaagttttcacactctagacaatagcttctattatgtttacaatgtcagataccattgacaaaggccaaagagctgttgtttggattgaacagccaaaatcaattgaaaatcttttattgatccaaggccctacacttagatgtactgagttattgaatggggatataatctcaaggagactttctctatattaacttcagcaaagaaggcagttgtttcttttttattcctagacagattatgggagacagaggtggtaagtataggacattgggcaggttcgcagtcttcctgtgccctgctgaaatggttctaactgcagcaataagttaaggaataataaggaaataagccttccatgaggccktggataagtcagtggggttgcacatagataatatatctatattcataagaccttcattagttggggccataccaatgagagtttatgttggcccatagggacacacatatgttctttctttttttttttaatttattatactttaagttctagagtacatgtgcacaacatgcaagtttgttacatagctgtacatgtgccatgttggtttgctgctcccatcaactcrtcatttacattagctatttctcctaatgctgtccctcccccgacaggccccactatatgatgttccccaccctggggacacacatattttcttatctgggtaaaggtcctcttgatgttggcctcagacccaaaaccagacagcattatctatttgcctgtcatcttggcgtcaagggttgtcaagatcacagtcatcttgacaccactattcaaaatgcttaaaaartgtacttctttcccatctcccaattcattacttttcttagcagaggtccttgggtaatggggacataaggacctgatctactccatatttttgttcacttttgaaaactgagagaatttggggaaaatttcaccaggctctctgactcatttaaagattcactggaagaagctgagtgataacacttgttttagtcataggaactattacaatgtgtacgctagtcagtgagcaccccttggttactacatgtccctgagtgctttcctggagagccccatcagtctccacctttgagattccgttttcattaacaaaagatctcttcaagaaagcctttgctcagattttccaggaattagtcctcagttactactttttttcatcactctctcagctagtaagtaattgctgtgctggaagtagctgctatttcagcctagtaatttgtcagttaatatctgaattttgtggtgggccaattgactggacctgtgtctgtgggaggtagtgctggggaaggctaggattggttaagtccagaataytgagtcagaactgagaaaagtttctttaaggatttcctctaccccactacttcacaccataggtggtctggccagacgcactgactgaacaatacagtcattgtttgtcacaatacagctactgtctgaacaatacagtcaagcccccaccttcccctataaagaggttttcaacttaaggcgattagactaaaaatgttatatgcccaagagcctggttggccaaggggagaggagttgattcaagastgcgastacctcctatgcctgcagtacacaaatcttacctcaagtctcttttgtgttgggaatctctatgataattgccaggtagtgcctttgtaactgtccataattggacctgaaagatcacacaaaagcagggttggcctgaagttggattcttcagtgtatttatatgtatacacacacacacacacacacacacacacacacacacacacacacacagcttcatacacacatctgcatacatatatatgtgcatataaacatggatatagacctgtaaagtcatatttagaattcatggcaaatctcttggacaccttaaattccagttcattttctcagaggttgttcttgtctttctccatttcatatatatatatattctttcttctactgtgcgaatcctgactaatccacaacacaattacccaattgtatcagcatcattattatttttcaacttttattttaggttcaagtggtacacttgcaggtttattacwtggctatattgtgtattgctggagttcgatgtacaaatgattttgtcaccaaggtagtgagcatagtacccaataggtagtttttcagtcctyacactctgcctaccctccaccctcaagtaagccctggtgtctatttttcccctctttgtgtccatgtgtactcaatgtttaagtgtacccacttacaagagagaacatgtggcatttggttttctgtgcctgtgttaatgtccttaggataatttccttccagccttatcaatgttgctgcaaaggatacaatttatggtgtacatgtaccacattttctttattcagtccactgttgatgagcaggcatctaggttgattctgtctttgctactgtgaatagtgctgtgatgaacatgcacatgcatgtgtctttatggtaaaatgatttatattcttttggggtyattcccagtaacggggttgctggatcaaatggtagttctaagttctttgagaaatttccaaactgttttccacagtggctgaacttatttacattmccatcagcaatgtataaagccttcctttttctctacaacctcaccagcatctcttatttctgactttttagtagtagccattctgactggtgtgagatggtatctcattatggttttgatttgcatttctctaatgattagtgatgttaagcatttttcctatgcttgttggcagcatgtatatcttcttttgataagtgtctgttcatgttctttgcccatttttaatggggttctttggtttttgcttgttgattagtttaaattccttatagattctggatattacacctttgttagatgcatagtttgagaatattttctcctattctgtaggttgtctatttgctctattgatagtttcttttgctctgcagaagctctttagtttaattagatcctatttgttaatttttgtttttattgcagtggcttttggcatctttctcatgatatctttgccaagtcctayatccagaatgatattccctaggttaattttcagagttttatatttttgaattttacatttaagtctttaattcatcttgagtttatttttttatgtggtgaaaggaagcagtccaatttcagtctactgcatgtggctagcctgttatcctagcacaactttctgaatagaaagtcctttccctgttgcttggtttgccagctttgtcgaagatcagatggttgtaggtgtgtggctttattcctgagttctctaacccatttccttggtctatgtgtatgtttttataccactaccatgctgttttggttactgtaaccttgtagagtagtttgaaattctgtagtgtgctatcttgggctttgttctttttgctgaagattgctttggctatttgggctctttattgctccatatgaattttagaataggtttttcttattctgtagtttgataggaatagcatagaatatgtaaattgctttgagtagtatggcaattttagcaatattgattcttcctgtctatgagcacggaatgtttttccacttctttgtgtcatctctgatttcttttagcagtgctttgtaattctcactgtagagatctttcaccctgctggtgagtactgctgcagcagcaatggcagaggggcttgttgccarttgccaatgggaattccaccccagagaaacacagagctgccacagacggaagtgatcaggcagaagtagggtggctgcattgagggccaaggtcggaagrccctgcttagtaaggagtagcaaggcctgggacctgcatgaaaagcagtgtggctgtttttctttatggcacgtgttgcatgttggaggcacgagatagcttttgagctctatactgtctctctatcctcagggcaatggggactggggagactatggcagtggcaaaagctgtgggcctattgtgttacctctggaatctctgcctcagagaaatgcagagctgcagccagcccaagtgatcaggttgsggggtggggtgaggtgggttgctgtgctggggacctaggccgattggctttgcttggcaaggtgccccagaggtgaggcctccagtctgtccacatttcagtatcctagatggggcccttatcctggggcgcatgggagatccctgcctcccttcttggcagagctatggcagctggtcccagggtgctcaggaatccaaagcccttggagctccacatgggcctgaatagcggctctgcggagactccatgcagctttctgtgtcagtctgggggccccagggagtagggttgggcaggatctcttgtgcctaggtttgcaaaggttcatggcagaggtatgtgtccccaggggctctcaagcactcactctttccccatggtggggagccttccctggctctgtgccaatcccaggcaggttgctgtcctgtctcactcctctctgctctccatgggtcaccactayttccttgatgaatcccaaggtggcctcctggatgatccagttgaagagccacttgccacttataaatttgtaagtttacttgccactctgtcttctctcctgtgaaagcagttcacactagctgcttctagtcagccatgttggtcttaaaatctggattgtattgcagttccaaaattattttagaattgcttagcacatacttctagaaaaacaaacctactgaaaatattttgtgatgtgtgtaccgtctcttctccacacacttgtccaagtattagggcatatgttaaatatcgtattgatgatttacctgtatgagttttttctctttaataggttcactaagtttgctttcagttttagtttcttcttatcctttgtgatttaatttaattttttttttttgaaatatacgaaacctgaaactgattccaaaagtaaaaaatatgcgaggtatacttagagaagttccattccttccctagttcaccctccttcatcttgtaggtaatcaactatattgtattcttacatttcacctgtttcattttgtaaagctaagtatctttctaatttcctttctttcttttttttaatccttcttccttacctaacggtggcatacaagttttctcttttttggatttttttttttttcacttaacattatctcctggaaatccctacaggtcagtttatagagattttttaaattgcttttacaactctatgtatagctgttgtaccacattattaaccataactttcattatactatagtttatagcaagcttgtccaacctgccttattttgttgttgtcattctggtctgttttgttttaggcttttagcagcccaaagccatggtttttagtttctgtctctagtgatamgcagaaaagaggaatgagaaaggggctttactggctcaaccagaagcagaaactaagaatccatgacygtattctctcccttggacacccctagaactttatggtatatacattggcttattcaaccaatatccaatgcttgaacatttatgtggttttgagtattttgtaattacaaataatgccataatgataaacttgtacatatgtatttttattgtttggtttatgacatctatatgatctatacaatataaagaacctaggaaaaatatagactaactatatatgattcctagaaatgtttataaaktgagaaagcatcaacatacagccattaaaattcttttcagcattttctcatcaaatctattattattgtaatttagttataactttgtagaagtgactgagaatgctcatgtaaatgttttataaatttgaaacacagaaatttcacaaaagatccatttttctatttagtggaataaatgtattttctttatgtagctcataatgaagtaccaaatgaaaggcttgtagttgagcatcaagaatcattgtcaaaaaccaaattacaartaaagaaacaagaaacttctacagagcaaccactcaccagtaagtataaaaattacacataactttacattattttaaattagtcacagcaaaggtatttttcttcagttcatgaatcttgaatttacagaaattttaccttgaacctaaagtatgaataccataagataactagagaacaaaagctagagtatttatcacttggcagttagtatttcttgttgtaacggtattttgtagccatgatcatgtgctcagtattcaccaaggacaatagcaggccaataattgtctttcaaagagtgtgtaccttttatccaactctaggaagttacaggtccaaaagcccaatttattccactgacctgttcagtaagctgtttccatttggcatcaatcagtgaacagaaagtttgccragacctgtaactcaaataaagatcagaggagctaaggggaacaatagcataggaggcctgttggatggactcgagggcattctgttggttggggcctgctccagggtagaggcctttttggtaactttaaaatgattgcaatcaggattccatcaagggaactgccagtagcagaataggttcacaarttgcttggcctcttgtgtatttgttgtaatagagagggaccatagtttgacagttacctcctcaggagtgagacatgtttcccctttctagtttactcccaggaattcctcttgggtaacaaggtctttgtactttttatgtattaatggcccagccatgttgctgcatgtgggccaatacaacatccagtccttgctggatagtggacttgcctgggcctaccagtagggagtcatcaacgtcgtagaaggttaataggaacagaactgtttccagatcatggttttgtggagggattttaaagatgtgttgcaacctgttccatataagacaaactgttcctgatcatctgtgtggacaggaatgctgaaaagggcatttgctatgtcaattgctttatacctacttccctcagcttgggtaattacctttatggacagtcacaatgtcaggtcatatcagtgttctaagaagtaccatagcattaagcttcccataatcaatggagtttataggcaccyaaggtgatacacacaagctaacttaattattgcatggagaaatagtctcatgaacatctttggattcatgatcatgaagagctgagcaataagggcagtgatttctatttctccctcaggcaatttttggagaccaatctctagacacttgtggtttagtaagttwacagtcttccacatgcttcactaaaatgaccttaaccacagtagttccccttagggcttgaggctgatgtgattggggattcacacagaagatacatctatatcaataatatattcagtagagggagtcataaaaatggaggtttgtagtggcccagtgggacccacccatagttgtgtttgggtaagggtcatgtttttggtggcttcagacctcacaccatatagcattatctgtttcaccctcatcctggtgtcagagattgtggagataaatcattggtaaactagtattcaaatgatgtgagttatgtaattctacactatgacctctttgaactctgacttggtatacatcctyaggtgccactgtggaaatagggacgttggtctaacccctaattttgttttgttttgaaagctgaracttctgggtaaacacagaccatgttctctgattcatcttaagatcactgtgatgggtagaggaaatagcacatgtgttataggtatcgtcaccattttgactctagtggggctgtmtgttggccctatgccctactgcctggccagaagatccttagtggggrgtccatcaagctcttctttgagacttcattgttgagtaactagacaatgcttgcagtgtcagggaactcatcatgagtgggccaaactttcagagaacaaatgatagcctatagagaaaggagagtgcctctagtgttcatatctcttttttttccctgccacccttcctcatcttccttggacacttttagggcactcagaatgaggggctctgttgtgacacactatacacggtgccactgtcgcacactatcttaacacgcttacctcctttatggtagaagcaaactattcaagttcctataaactcctcaggtcactggtgaggtgaacctgagagatctttattctttcaaatttaatataaatctcaaacaatgtgtcatcataggctgtctgttcatgccagggacatatttagagttaacaatagttattgggtgccactcagcaagcagtgtttgcagtgacttggtaacaaactactttgttttctggtttatctttctgtgtttatttaataaagatagatatctccccatatttttcttatttcctcttctktcttacctaaaagatagtatactagatattctcccttttggtttttttccactaaacattatttcatagaaatatcaccaagtcagtttgtagggatctttttcattccttttgtaactgtatgtacagttttttggaccacattatagcccatagttgatattgtcatagtttatatgctttactcaacagatctatgcttgtatatttaggtggttttgagtatttgcaattatgctgtaatgaataacttggtgcatatgcattttcattgtttggtctatgtatacttattaattgaaaatataaaaaacctaagaaagccagagactaagataaaacatattcaaagtgcaggaatattgatatggtgagatagtttcaacacacacccattgaaactcttctcaccattttcatagtagatatagcattatggtaatttattcataactttacaaaaatgagagaaaatgccactgcacattcgtaaatttgaaatctacagatttcaaatggatttatttgtaatttagcggactaaacacatctttttctgtagctcctgataaagaaccaaatgaaaatcttatacttaggcatcaagactcaatgtcaaaatcagaaatgcaagtgaaggaacaaagaactctcaaagggcaaagaattattagtaagtataaaaagtaaagataactttaaattatttaaaagtaarttcatccgaaggtatttttgctttgattcacaaaagttttacactttgaytaaaatgtgaataccctaccataattaaagaaaaaagtgaaaaatattgatacattttggttgagagatttctggcccttakattatttcatgaccacaggacacacagtatcccccaaggctttataacaaatgtataattgtctttccaaagtagtgtgcctttcagccaactgaaagtaattatgggcccaaaaacttaatgggcacctctcacctgtggccttcttccataggcaccaatcagcaaagatattgctaagatctgcaactcaaaacagcaaatggggatcataataacctagggaaaggtaacctaggacacctgtttaagggactctagggcatccttttggtcatggccccactgaaatgaaacagaatttctggtaaccccatagatgaatgaatgtcatcaaggatcccacatagggaaaatgagagtgtatttatcgaaacagttccagtaactgctgggcttgtkttttttttttgagacacggtctcactttcttgcccagactggagtgcagtggccygatcttggctcactgcaacctccgcctcccgggctcaagtgattttcctgcctcagcctcctgagtagctgagattataggcacacaccaccacgtctgcctaatttttgtatttttagtagagacagagtttcaccatgttggccaggctggtctcgaactcctgacctcaaatgatccacccgcctcggcctcccaaagtgctggcattgcaggtgtgagccgttgcacctagcctgggcttatttttatttgttagaccagaaaggatcaaagcttggcagtctcctctggaatgagatgtcaccccttagaaatcaatcctaggcattttatccaggtactaagtaactgtatcttgtctgaactaatggcccagttaagagccactggtgagkcattagagcatccagtccttttgggagatttccttgcttgagtccacttaaatgatataatcaatataatgaaaggctagtcctccccttgggagcaggccatttagaggtcattatgcattgatgacagatattagagcagtttggtagccttgtggaaggatattagttatgttttccaacttattctatataaggttaatctgaacatctaagtgaaaaaaagatatggacaggcatttgaggtgtcagttgttgcaaacaagttccctcagtttggaaaatatcctgtatgacaactgtagtcacttgtgtctttggtggccagggctgtaatatagcattggaccagcaaaatcaattgagtcattatgcacctgagggtgtgtacaagatctrcttagttattgaatggagaaatagtcttatagagaacttttgcttcattaagctcaacaaatgacaacagcctttctgtttcttcctaggaagctattctgggaaacaaaggtgctaggtgctgttaatctggatatttacattcttccatatgccccactaaaatgaccttaaatgcctcagtttccatcagggactgggatgaatgcaagtgggggttcacatagaaaatacatctataccaacaatacatttggtgggggaggggaataaaatggagttttgcagttgtccgaaaggatactctcatggtagtgtttgaccaagggtcattttggtggtgtcctcagatgcaaaaccagagagcattacttcttttccccagttcctggtgtcagaggttgtggggatcacagccacctgtgcaccagtatcctaatggccctagaaatgcaatttcttcccaccttccctttaaattctgaccttacgatacattctcagattaccactggtaacatggggatcttggcctaactcttaattttctttattttcgagagcmtgaagtttgagcaaaagtagtggagggttctctgattgatttcaatatcactgggaggtgcaaagggaagagcacttttattagtcatggggtcatcgcattctggatttagtagggctatgtgttggtacccatggcccactacctggccaggaggttcttggtgaaaagtccatcagtgtcctacttcagattccatcattgattaactagactcagatatttcttggggagagcccttaactagatcacccaggaatgggtgccaaattaccatttttaggtcacactgttcactggtcacacattgctatcttggtggtagatgctttttctatgcccagaaatttgtcagttaagatctgaattgtgccacaaattaattgacattatcttataaggaggtttaattgagctagtaaaggctatgaaatgaaactagacatctaaatctggttaaatcttgtcattactgtcctcactccatcagtgatcttagagacagcggartggctcaagggccattacagcctctgcagatgaaggcccaaacatgttttccagtagcagggaacacaactgtcctcactccatcagtgaccttagagacagcggagtgcctcaaggggccattgtagcctctgcagatgatggcccaaacatgttttccagtagcagggaacatgtcatgggkgggcaatcctgtcagagccaaaaatagttcccaactgaggaaggagagggtttcagatgtttacatcattcgtccccctttcctccacttccttaggcaatatgggcactgtcaagattctcttaaggaggcattctgtagtgataagctccacaatatgcccctttcactccctaagttaaacaagattattgctttattgtgaaggcacactacccacatctcttagttgctgggcaaaatgatcatcaggactctgcattgtttttcattaaagcatgagtctcaataactgactgcattacaggctgtccaccatttttaggggagtgcctagggctaagaatagtcattaggtacaactcagtgtgcagagtctccaacttttttgagcccattgacttagggccaggagcaataaccacaaaattgcttccctagctttctcagagcccatctgctggatttttcaattgactcactggatatcttggtatgtgaatcagaggataaagagactattgttccatgtcagaattgaaaagctcatgtaaataatacattagcattctagaaaaccgcatggtgtctgctggcactttctaagagatgattgattgacatgactggcagagtgccctgtgggatgttgagtctcttgcaattgatccagtagcctccccatcacccttccactgagagtgtcctgcaggctcactagtacctaccaaagtgttccttccagaaaggctttgtgcttcattgaccaccctgctctttgtggtagtttgttagaaacagaaatgccagtttttgagttggtctattaagataacatgccaaactcaaagtaacaattaaccttattcacttactagcatattaaaagccatagcctagatagaggcaggtccccagctctaccagtgtcccattttaccccacagaaaagcacttagcaagggtcagatgcatcagtgtagactgtgtgagtgggcatgggatggggttgtctcatggtggaaggagtcccaaacaagaagctrttttccattttatggaccctgaggctgagttagctggagctctgaaccacatgaatacctttagctatttgctccctattctaattcctctcaaattgagttcagattgcttaacacatactagaacaacaactaaaaagatttcatgatttgtttacactccacctccacctctcatgtccaaywgtgagggtttatgtcaaatactatattgatgagktactgcttttattttttcttcaatgatttcatttcattatttccttttaattttcaccccaccttcttttccttgttgatttaattttgtttttgaaattgtaggacatgaaactacttttgaaagtaaaacaatatatatgcaaaaagttatacttagaggagtatattttcttccccagtcctctccctcattttgtaggtaaccaataacattgtttcttatatctctcctctgcttctttttgtaaagataactatctctctatttccttctctattttttttctcatttcttcatcttccttccccaaagatggcattcaagttttccccttcgtaggtatttttttccttcacattattctttgaaatcccttcaggtcaatttatagacatgtttaatttgttttacagttacacttacagttgtttgtaccacattatttaccatatgtactataccatagtgtgtggtatacagcacgtccttgaataacatcattttgttcaacattgtttgattataatgttaataagaaaaaaaaattgattcctagccaggcacatggtctggagttagcacattctccctgtgtctgcatgaattttctccaggtgctccaatttcctcccacattccaaagatatgtatgttaggtaaattgatgtgtctaaatggtccctgtctgagtgagtgtgggtatgtgtctgagtgcgccctgatatggcatagcattctgtcgagggctggctccccccttgtgctctgagctgctaggatatgttccaaccasctgcaacccttaactgggataagtaggctgcaaaacatgtgaatgaatgaatgaatacaagttattataaaataaaaattcatatacaataattatacaaatgcagacaataaacaatgcagtacaaaagcactctgtaagccaccatatttgtgattgcttttaaattatatgatgggaggagatgctccttacaattttgctttgcttttgatttattcctttgaataaatcaagaagtttattccttgacttaactcaccaccactatgacaaccatcattcactgattaaccacaaattgggtaaataattgtcacttgtttttattattttttcttaaatctgtgtatagctcacatttattttagtgtttactattagaagtgttttgggtctttatttagaagtttgtgatgtttttgttaccaaaaaaatactgtaagaacttaactcttgtttatgtcaatttgcctacggcaaaatgggtttcattatgtgtcattttgcttaaggtcacagtttccaagattctatcaatgacattacgtgaggacttactggatatacatatctcagtttattcaaccagtctcctctgcttgaaagtttatgtagttttgactattttgcaattacatatatgctataataaataacattgtacctatgcatttttatttttatttctgtgaatatgtattaacctaaagtataaataacataaggaaactagtgactaatatatatcagatgcctagaaatgttatgaaataatgagcttcaccacacacccattaaaaatgttcttatagtagtcatgtcacatctggatttctgataatttacttacaaatttatcaaaatgagaaaattttgctacacaattacaagtttgaaatctagagatttcacagtaggtctgtttttccattaagagactaaatgcatctccttatgtagctcatgatgaagaaccaggcaaaaatcttgtgcttgaacatcaagattcagtgtcaaaactggaaatgcaaattgaaaaaaccaaaaaacttcctagagagaaaagacatagtagtaagtataataattatagataacttaaaaattttaaagttaatctcattagatcatttttctttggttcatgactatgtagttgagcatatagtttatggaaattttatactttacagtgtgaataccttaaaataactagagaacaaaagccatataatatttggttggaatttctggtcttgagactattttatggcatgctcatgtgctcggtgtccaccaaatccaataaaaatcattagtctgtcaaagggtgtttgctttcagccaactgtaggagattatgagtccaagtgttcaacaggaaccttgggacatgtggcagtatccttctgtcatagactstaattggcaaacagagagattggtgagatgtgtaactcaaatgacaaaatgtatcagagaaggccaaggggaaaaacaacctatgtggtcactggagggtctccagaacatcctgtctttaggcttcacctaagggtagaggtcttattggtaacctgatagatggtgtcatgaagatgcccrttaagggaatttgagagctctagtctgggctttccttttacttgttggggctaagagtgactaaagctgagagtgacctagcccttgccgggtagtgtttttgtctgggcccagacaaaatgaatatagtggaaggccagtgcttcatctgggagtgttgctgttttcacgtcacagccttgaggaggacattaaaggtgtaatgcagcccatttaatgtaaggcggactgatcttgatcatctttgtggacaaggatgccgaaaagggcatttacaatgtcagttgctttaaagctatttccctcagcttgggtagtagcctctgtgatagtcatagtatcaggtaacagcagtgccaaagacagaactacggcatgagccaccaatagtcaattcttttccaggcacacaatgccttaagcaaaaggccagatggtgaactttggcttccttaagcacagcaatgaagacttttttttttttaatccccaagacagttgatagtgtttttaagagacaaagacactagcttctggtagtctggtgggtttagtcttccatataccccaaaaaaatggtcctaattgcaacaattcgcctcagggactgggggtgaatacagtcaggggtagacatagacaatatgtcataacaataacccattcagtaatgggttccataatgatggaagtatgtagtggcttgaagagacctacctgtagtcagatcaggatgttggtggtggtggcctccaactgaaaaccagagaaccttatctatttcctcctcattctcatgccagggattttggggatcacagtcgcctgtgcactattatgcaaaaggcccaagaaatgaaattctccatgtccactttgaactttaactttgatatagggcctccattcctcactggggacatagggacattggccatgtcatagtcttgttttctgttttttttttttaagccaaaagatttgcataaaaattggcagggctctctaattcatttcaaaattcaatggtagaagaggagagcagcatttgtattagttataggggccagcactgggcagaacctaggaggctgccattgagcccaaaatggcacactaccaccaaaccatgagttccctggtgaagagcccattaatctccttttgtgagtccttattgttgggtaaccaaacctagagatctctttggtgaggcccttacctagatcattgagaagtgtgtgcccaatgactatttttatgttgctgtctctgataatctctttttgcttttttgtagcagttgcttcttccatgctgaggaatttgacatgtacaggccattgcttacagtatcacaataaatgaaaaaaattatgatctagatcagtggtcctcaacctttttgcaccagagaaagtgaacaaaattaacattttttgcatggaccagggctgaggtgggggatggttttgggatgattcaagtgcattacatttattgtgcactttatttatattattattacattgtaatatgtaatgaaataattatacaccataatgtagaatgagtgggagccctgagcttgttttcctgcaattagatggtcccatgtgaggcatgaaagacagtgacagatcatcaggcattagattctcataaagaacgcacaacctggaaccacccaagatggccgaataggaacagctccaggctacagctcctagcatgagcgacccagaagatgagtgatttctgcatttccaactgaggtaccgagttcatctcactgggactggttggacagtgggtgcagcccacagagtgtgagccaaaatggcaggacatcgcctcacccaggaagcactaggggtcagggaatccctttcttagtcaagggaagccatgacagatggtacctgaaaatcaggacactcccgccttaatacagcgcttttccaatggtcttagcaaaaggcgcaccaggagattatatcctgcgcctcgcttggcgggtcccacacccrtggagccttgctcactgctagcacagcaatccgagatcaaactgagaggtggcagcgaggatgggggaggggcatctgccattgctgaggcttgactaggtaaacaaagcaactgggaagctcgarctaggtggagcccaccgcagctcaacaaggcctgcctgcctgtatagactccacctctgggggcagggcatagctgaacaaaaggcagcrgaaacttctgcagacttaaacgtycctgtctgacmgctttgaagacagcagtggttctccgtgcatggagtttgagatctgagaatggacagactgcttcctaaagtgggtccctgaccccccagtaggctaactgggagacatctcccagtaggggctgactracaccacaaacagctggcagcccctttgagacaaagcttccagaggaaggatcaggcagcaacctttgctcttctgcaatattatatttgctgttctgcagcctccgctggtgatacccaggcaaacagggtctggagtggacctccagcaagctccagcagacctacagctaagggtcctgactgttagaagaaaaactaacagaaaggaatggcatcaatatcaacaaaaacaacatccacaacaaaacccatttgtaggtcaccatcatcaaagactaaaggtagataaaaccacaaagatggggagaaaccagagcagaaaagttgaaaattctaaacaccagagtgcctcttctcctccaaaggatcgcaggtccttgccagcatcagaagaaagctggacggagaatgactttgacgagttgagagaagtagacttcagaagatcggtaataataaacttctctgagctaaaggaggatgctcgaacccattgcaaggaagctaaaaaccttgaaaaaaagattagaagactggctaactagaataaacagcatagagaagaccttaaataacctggtggagctgaaaaccatggcacgagaactatgtgatgcatgcacaagcttcagtagccaattcagtcaagtggaagaaagggtatcagtgattgaagatcaaatgaatgaaatgaagtgagaagagaagtttagagaaaaaagagtaaaaagaaatgaacaaatcctccaagaaatatgggactatgtgaaaagaccaaatctgcatttgattggtgtacctgaaagtgacagggagaatggaaccaagttggaaaacactattcaggatattatgaaggagaacttccccaacctagcaaggcaggccaacattcaaattcaggaaacacagagaacgccacaaagttactcctcgagaagagcatctccaagacacataattgtcagattcaccaaggttgaaatgaagggaaaaatgttaagggcagctggagagaaagttcgggttaaccacaaagggaagcccatcagactaacagctgatctctcagcagaaactgtacaagccagaagagagtgggggccagtattaaacattctttttttttattttactttaagttttagggtacatgtgtacaacgtgcaggtttgttacatatgtatacatgtgccatgttggtgttctgcacccattaactcatcatttaacattaggtatatctcttaatgctagccctcccccctccccccaccccacaacaggcctkgtgtgtgatgttccccttcctgtgtccatgtgttctcattgttcaattcccacctatgagtgagaacatgtggtgtttggttttttgtccttgccatagtttgctgagaatgatggtttccagcttcatctatgtccctacaaaggacatgaactcatccatttttatggctgcatagtattccatggtgtatatgtgccacattttcttaacccagtctatcattgttggacatctgggttggttccaagtctttgctattgtgaatagtgccacaataaacatacgtgtgcatgtgtctttatagcagcatgatttataatcctttgggtatatacccagtaatgggagtgctgggtcaaatggtatttctagttctagatccctgaggaatcgccacacwgacttccacaatggttgaactagtttacagtcccaccaacagtgtaaaagctttcctatttctatacatcctctccagcacctgttgtctcctgactttttaatgatcgtcattctaactggtgtgagatggtatctcmttgtggttttgatttgcatttctctgatggccagtgatgatgagcattttttcatctgtctgttgactgcataaatgtcttcttttgagaagtatctgttcatatcctatgcccacttgttgatagggttgtttgtttttttcttgtaaatttgtttgagttcatcgtagattctggatattagccctttgwcagatgagtagattgcaaaaattttctcccattctgtaggttgcctgttcactctgatggtagtttcttttgctgtgcagaagctcttcagtttaattagatccaatttgtcaattttggcttttgttgccattgcttttggtgttttagacatgaagtccttgcccatgcctatgtcctgaatggtattgcctaggttttcttctagggtttttatggttttaggtctaacatttaagtctttaatcgatcttgaattaatttttgtataargtgtaaggaagggatccagattcagctttctccatatggctagccagttttcctagcaccatttattaactagggaatcctttccccatttcttgtttttgtcaggtttgtcaaagatcagatrgttgtggatatgtggcattatttctgagggctctattgtgttccattggtctatatctctgttttggtaccagtactatgctcttttggttactgcagccttgtagtatagtttgaagtcaggtagcgtgatgcctccagctttgttcttttggcttaggattgacttggcgatgcgggctcctttttggtttcatatgaactttaaagtagtttactccaattctktgaagaaagtcgttggtagctagatggggatggcattgaatctataaattaccttggggaatatggccattttcacgatattgattcttcctatccatgagcatggaatggtcttccatttgtttatgtcctcttttatttcattgagcagtggtttgtagttctccttgaagaggtccttcacatcccttgtaagttggattcctaggtattttattttctttgaagcaaatgtgaatgggaattcactcacgatttggctctctgtttgtctgttattggtatataagaatacttgtgagttttgcacattgattttgtgtcctgagactttgctgaagttgcttatcagcttaaggagattttgggctgagacaatggggttttctagacatacaaggatgtcatctgcaaacagggacaatatgacttcctcttttcctaattgaatatcctttatttccttctcctgcctgattgccctggtcagaacttccaacactatgttggataggagtggtaagagagggcatccctgtcttgtgccagttttcaaagggaatgcgtccagtttttgtccattcagtatgatattggctgtggatttgtcctggatagctcttattattttgagatatgtcccatcaatacctaatttattgagagtttttagcaggaagggctgttgaattttgtcaaaggccttttcttcatctattgagataatcatgtggtttgatttgcgtatgttgaaccagccttgcatcccagggatgaagcccatttgatcatggtggataagctttctgatgtgctgctggattcagtttgccagtattttattgaggatttttacatccatgttcatcagggatattggtctaaaattctcttttttggttgtgtgtctgccaggctttggtatcaggatgatgctggcctcataaaatgagttagggaggattccctctttttctattgattggaatagtttgagaaggaatggtaccagctcctctttgtacctctggtagaattcggctgtgaatccatctggtcctggacttttttaggttggtaggctactaattattgcctcaatttcagagcctgttattggtctattcagagattcaacttcttcctggtttagtcttgggagggtgtatgtgttgaggaatttatccatttcttctagattttctagtttatttgcatagaggtgtttatagtattctctgatggtagtttgtatttctgtgggatcggtggtgatatcccctttakcattttttattgcgtcwatttgattcttctctcttttcttctttattagtcttgctctagcggtctgtcaattttgttgrtcttttcaaaaaaccagctcctggattcattgatttttttgagggttttttgtgtctctatttccttcagttttgctgtgatcttagttatttcttgccttctgcaaacttttgaatgtgtttgctcttgcttttctagttcttttaattgtgatgttagggtgtccattttagatttttcctgctttctcttgtgggcatttagtgctataaatttccctctacacactgctttgaatgtgtcccagagattmtggtatgttgtgcctttgttctcgttggtttcaaagaacatctttatttctgccttcatttcgttgtgtacctagtagtcattcaggagtgggttgttcagtttccatgtagttgagcggttttgagtgactttcttaatcctgagttctagtttgattgcactgtggtctgagagacagtttgttataatttctttgcttttacatttgctgaggagtgctttacttccaactatgtggtcaattttcgaataggtgtggtgtgatgctgagaagaatgtatattctgttgatttggggtggagagttccgtagatgtctattaggtccrcttggtgcagagctgagttcaattcctggatatccttgttkactctctgtctcgttgatctgtctaatgttgacagtggggtgttaaagtctcccattattattgtgtgggagtctaagtctctttgtaggtctctaagggctttctttatgaatctgggtgctcctgtattgggtgcatacatatttaggatagttagctcttcttgttgatccctttaccattatgtaatggccttctttgtctcttttgatcttcattggtttaaaatctgttttatccaagactaggattgcaacctctgcctttktttgttttccattttcttggtagatcttcctccatccctktactttsagcctatrtgtgtctctgcacgtgwgatgggtttcctgaatacagcacactgatgggtcttgactctttatccaatttgccagtctgtgtcttttaattggagcttttagcctatttacatttaaggttaatattgttatgtgtgaatttgatcctgtcattatgatgttagctggttatttgctcgttagttgatgcagtttcttcctagcattgatggtctttacaatttggcatgttttcgcagtggctggtactggttgttccttttcatgtttagtgcttccttcaggagctcttttagggcaggcctggtggtgacaaaatctctcagcacttgcttgtttgtaaaggattttatttctccttcacttatgaagcttagtttggctggatatgaaattctgagttgaaaattcttttctttawgaatgttgaatattggcccccactctcttccggcttgtagagtttctgccgagagatccgctattagtctgatgggyttccctttgtgggtaacgygacmtttctttctggctgcccttaatattttttccttcatttctmctttggtgaatctgacaattatgagtcttggagttgctgttctcgaggagtatctttgtggcattctctgtatttcctgaatttgaatgttggcctgccttgctagattggggaagttctcctgcataatatcctgcagactgttttccaacttggktccattcaccccttcactttaaggtacaccaatcagacgtagatttggtctttttacatagacccatatttcttggagtctttgttcatttctttttattcttttttctctaaacttctcttctcacttcatttcattcatttgatcttccatcactgataccctttcttccagttgatygaatcagctactgaggcttgtgcattcgtcacgtagttctcgtgccttggttttcagctccatcatgtcctttaaggacctctctgcattggttattctagttagacattcgtctaattttttttcaaggtttttaacttctttgccatrggttagaacttcctcctttagctctgagtagtttgatcatctgaagccttcttctctcaactcgtcaaagtcattctccacccagctttgttccattgctggcgagcagctgcgttcctttggaggaggagaggtgctctgatttttagaattttccatttttctgctttgttttttccccatctttgttatctacctttggtmtttgaggatggcgacgtacagatggggttttgrtgtggatgtcctttctgtttgttagttttccttccacagtcaggaccctcagctgcaggtctgttggagtttgccrgaggtccactccaggccctgtttgcctgggtgtcagcagcggaagctgcagaacagtggatattggtgatcagcraatgttgctgcctgatcgttcctctggaagttttgtcttakaggagtacccagctgtgtgaggtgtcagtttttccctactggggggtgcctcccatttaggctactcargggtcagggacccacttgaggaggcagtcagtccattctcagatctcaaactccatgctgggagaaccactactctcttcacagttgtcagacagggacatttaagtctgcagaggtttctactgccttttgtttgggtatgccctgcccccagaggtggattctactgaggcaggcaggcctccttgagctgtggtgggctccacccagttcgaacwtcccagccgctttttttagctactcaagcctcagcaatggcaggcgcccttcctccagcctcactgctgccttgcagtttgatctcagactgctgtgctagcaatgagtgacgctccrtcagtcagtgtagcactctccgakccaggcgcgggwtatattctcctggtgtgccatttgctaagactgttggaaaagcgcagtattaggttgggagtgactcgattttccaggtgccatctgtcacaccwttscttggctrggwaagggaattccctgaccccttgcacttcccgggtgaggcgatgcctcgccctgcttcgggtcccgctcagtgcgctgcgcccactgtcctgcacccactgtccgacaatgcccagtgagatgaaccyggcacctcagttggaaatgcagaaatcattcgtgttctgcattgctcatgctgggagctgtagactggagctgttcctattcggccatcttggctccccaatattaaacattcttatagaaaagaattttcaacccacaattacatatccatccaaactaagcttcataagtgaaggagaaataaaatcctttacagacaagcaagtagtgagagattttgtcgccaccaggcctgccttacaaaagctcctgaaggaagcgctaaacatggaaaggaacaactggtaccatccactgcaaaaacatgccaaattgtaaagaccatcgatgctaggaagaaactgcaccaactaacgagcaaaagaaccagctaacatcaaaatgacaggatcaaattcacacataacaatattaaacttaaatgtaaatgggctaaatgccccaattaaaagacacagactgacaagttggataaagagtcaagacccatcagtgtgctatattcaggagacccatctcacgtgcagaggcacacataggctcaaaataaagggatggaggaagatctaccaagaaaatggaaaacaaaaaaaggcagaggttgccatcctagtctctgttaaaacagactttaaaccaacaaagatcaaaagagacaaagaagggcattacataatggtaaagggatcaattcaacaagaaaagctaactatcctaaatatgtgtgcacccaatacaggagcacccagattcataaagaaagcccttagagacctacaaagagacttagactcccacacaataacaatgggagactttaacactccactgtcaacattagacagatcaaygagacagaaagttaacaaggatatccaggtcttcaactcagctctgcaccaagcggacstactggacatctacagaactttccaccacaaatcaacagaatatgtattcttctcagcaccacatcgcacttattccaaaattgactacatagttggaagtaaagcactcctcrgcaaatgtaaaagcmaagaaattataacaractgtctctcagaccacagtgcaatcaaattagaactcaggattgagaaactctttcaaaactgctcaactatagggaaactgaacaacctgctcctgaatgactactgggtaaataatgaaatgaaggcagaaataaatatgttctttgaaaccaatgagaacaaagacacaacatactggaatctctgggacacatttaaagcagtatgtagagggaaatttatagcactaaatgcccacaagagaaagcaggaaagatctaaaatcgataccctaacatcacaattaaaagaactagagaagcaagagcaaacacattcaaaagctagcagaaaccaggaaataactaagatcagwgcagaattgaaggagatagagacacaaaaaacccttcaaacaatcaattaatccaggaaatagttttttgaaacagtcaacagaatagatagatggctarcaagactaataaagaagaaaagagagaagaatcaaatagacgcaataaaaaatgataaaggggataccacccattatcccacagaaatacaaactaccatcagagaatactgtaaacacctctacacaactaaactagaaaatctagaagaaatggataaattcctggacacatatgccctccaaagactaaaccaggaagaagttgaatccctgaatagtccaataacaggctctgaaatagaggcaataattaatagcttagcaaycaaaaaaggtccaggacctgatggatttacagccgaattctaccagaggtacaaagaggagctgataccattccttgtgaaattattccaatcagtagaaaaagagggaatcctccccaactcattttatgaggccagcatcatcctgataccaaagcctggcagagacacaacaaaagaagagaattttagaccaatatccctgatgaacatcgatgcaaaaatcctcaataaaatactagcaaacagaatccagcagggtatcataaagcttatccaccattgctaagccggcttcatccctgkaatgcaaggctggttcaacatacasaaatcaataaatgtaatccatcatataaacagaaccaaagtcaagaaccacatgattgtgtcaatagatgcagaaaaggtctttgagaaaattcaacagttgttcatgctaaagactctcaataaattaggtactgatgggacgtatctcaaaatagtaagagctcyctatgacaaacccacmgccaatatcatactgagtgggcaaaaactggaagcattccctttgaaaactggcacaagacagggatgccctctctcaccacgcctattcaacatastattggaagttctggccygggcaatcaggcaggagaaggaaataaaaggtattcarttaggaaaagaggaagtcaaattatccctgtttgcagatgacatgattgtatatttataaaaccccatcgtctcagcccaaaatctccttaagctgataagcaacttcagcaaagtctcaggatacaaaatcaatgtgcaaaaatcacaaacgttcctacacaccaataacagacaaacagagwgccaaatcatgagtgaactcccattcacaattgcttcaaagagaataaaacacctgggaatccaacttacaagggacgtgaaggacctcttcaaggagaactacaaaccactgctcaatgaaataaaagaggatacaaacaaatggaagaacatcccatactcatgggcaggaagaatcaatatcgtgaaaatggccatactgcccaaggtaatttatagattcaatgccatccccatcaagctaccaatgactttcttcacagaattggaaaaaactactttaaagttcatatgaaaccaaaaaagagcccgcatcgccgagacaatcctaagtcaaaagaacaaagctggaggcatcacgctacctgacttcaaactatactacaaggctacagtaaccaaaagagcatastactggtaccaaaacagagatatagaccaatggaaaagaatagagccctcagaaataataccacacatctacacccatctgatctttgacaaacctgacaaaaacaagaaatggggaaaggattccctatttaataaatggtgctaggaaaactggctagccatatggagaaagctgaatctggatcccttccttacaacttgtacaaaaattaattcacatggattaaagacttaaatgttagacctaaaaccrtaaaaaccctagaagaaaacctaggcaatacctttcagatcataggcatggacaaaaacttcatgactagaacaccaaaagcaatggcaacgaaagccaaaatagacaaatkggatctaattaaactgaagagcttctgcacagcaaaagaaactaccatcagagtgaacaggcaacctacagaatgggagaaaatttttgcaatctacccatgtgacaaagggctaatgtccagaatctataagaacttaaacaaatttacaagaaaaaatcaaacaaccccatcaaaaagtgggcgaagcatatgaacagacacttctcaaaaggagacatttatgcagccaamaracacatgaaaaaatgctcatcatcactggccgtcagagaaatgcaaatcaaaaccacaatgagataccatctcacaccacttagcatgttgatcattaaaaagtcagaaaacaacaggtgctggagaggatgtggagaaataggaacacttttacactgctgatgggactgtaaactagttcaaccattgtggaagacagtgtgccaattcctcaagcatctagaactagaaataccatttgacccagcactcccattactgggtatatacccaaaggattataaatcatgctactgtaaagacaacrtgcacacgtatgtttattgcagcattattcacagtagcaaagcttggaaccaacccaaatgtccctcagtgatagactggattaagaaaatgtggcacatatacaccatggagtactatgcagccataaaaaaggatgagttcatgtcctttgtagggacatggatgaagctggaaaccatcattctcagcaaactatcgcaaggataaaaaaccaaacaccacatgttctcactcataggtgggaattgaacaatgagaacacttggacacaggaaggggaacatcacacaccgaggcctatcgtgggtggggggaggggggagggatagcattaagagatatacctaatgtaaatgacaagtcaattggtgcagcacatcaacatggcacatgtatacatatgtaataatcctgcacgttatgcacatgtaccctagaacttaaagtataataaaaaaataaataaataagaaaactaaccataaaaataaaacctagatctttcagatgtgcagtttacwatagggtttgtgttcctatggaaatctaatgccactggtgatctgacaggaggcagagctcaggcagtaatgtgaatgatggggagcagttgaaaatacagatgaatcttcgctcactcacccactgctcacctactgcyktgtgacccggtttctaacaggccagagaccagtactggtcatggcctcggtgctggggaccccaatctagattatttcactgaccaatttgcctgaccttagaggaggattaattttaatttggctccataaccagtaggagtgacacttataaccctagaaatctgagacttgttaaaaatcttatcattgactgctctcactctcgtcattgactgctctcactctcaagcaagagaccaagrgatcaccagtatggtttgtgggtctgtatagccagataaatctgaaaatgtattttagtcatagggaagagagcatgggtttgccaaagttgtcagaacccaaatagaacccagttgaaaaagaagggcttgggtgttcccttctcattctctgactttgcttatcctccttgagcaaaacctattctgtcatgacastctaaaggaggggttttatagtgacacagcccacaaggtaccactaagttagtttaccaagattacctcattcatcatgcaggcaaataatccatgcctctaaattctcctagatcacacaggaaagcaatcccaaagggctctccattcgttttatttaaaccatgagtctcaatcccttgctgggtcataagctgtctgtcattgcctggtacctctttagaactaagagctgttattgatgcaaatcagctcgcaggttctctgaaaactttcagtctcatctgcaggggacaatagcagtggccaaggaattgcttctctagctttctcagaggccgtctgttggatctctaatttgccccaccaggcatctttgcctgagagtctaggcctaaagaggaggascactggtgtccctcagaaccaaaaagcttatgtaaacaatccgctagcattctcygagagtgccccatggtgttggacagcactttctaagacccactgatagggctggcagagtgcaccatgggacagtcagactcttgcaaatgatccactagtatcccccaagaggtctcaactctagcatctcccacaaatgccctggggatctgcatgctttttgcttttccagaaaggcattgtgcttaattgaccaccctgctcacagtcatttgttaccaggggagctgccaagtgtgaaggtggtcaattaagatagcaagcgagattgaaggtaacaattaagcctttattcacttactgcaacaacataagcaagagtgtaaacatggaaggtcactgactccattaatgttacattttcccacaaaaagacattgggcaaaggtaggatgtatcagcatagatgggagggtaacttctcactgtatgtacagccatgtgtaccatatcataaaccatatatattcatccacacatagatacacataattatataccataattgatattataccattgtttctggtgtgtgtgtrtrtatatatawawatatatatatacatacacacatatmcatgtatatatgcatgtgtgtatatatatacatataactgtgtgtgtgtgtatatatatatgttcattcagccagtctcctgtgcttaaaaatctcaatggttttgaatactttgcaattacaaataatgctgtaatgaatgaccttgaacatatgcattttcattgtttggtctatgattatgtattaacctaaagtataaataacttaaggaaagtagagactaatataaaacacatttaatatctaggaatatttatgaaataataatacatcttcaacatacattgaaacttttctcaccattttcatgtcagagctagcattaaggtagtttacttataactttataagatgaaagaaaatgttgcttccacttgttataaatttgaactctaggatttcatagtagatttgtttttctagtaagggactaaatttctctcttaacatagctcatgatgaagaatcaggtgaaaatcctatgcttaaacatcaagattcagtgtcaaaaatccaagtgcaattagagattcaagaaacttctgaaggagaaggacgtagcagtaagtataatgatgatagctattttatattattttaagtaaatctcaaaagaacttttttctttkgttcatacttacgtatttgagaacatatattttattgataatttatactctgtaaatactctaacataactcaagaaagaaarcaaagataatgatatgttttggttagaatttcttgtcgtaatattattacacaacttaatttatgctctcagtatccatctcaggacaataataggccaataattgtctcacaaaagatgggtacctctcatctgctgctggccatttatgggcacctctgatctgttgtagtcccagtcagtaggcagaagtattgccgagatctgtaactgaagcaacaaatggaaatmagagaggtacaagggcagccagggtggccagtagaaggatttccagggtatcatgctggtcaaggccccattcaaaggtagtggtctttatggtaacctgatagaggatgctgtctgatctctgtggcttgaatgtgagcatggcagcagatgaatggtcccatttattgctcacattatttttacttttcgagtcagagctggccaaaagcatcgacaatmatcatctctggaatggagcaccatagcctttacagattacaccatagcctttayggattacacccaggaatttcacttgggttttaggtccttgtgccttktccaatgataatggcacagtacatgctgcacgtgggtgaacagagcatctggttccttttgggtagtgtccttgtctgagctcactaggatgatttcataaacagttcagaaagttaatgcttcttccaggagtggaactttgtccaggtcataacctatgcattgatacagatagttggggaattttggaagccttgtggaaagatattagtggtttattgtaacctatcctacataattctaactaatcctgatcatcctcttggagaggaatgctgaaaggacatttgctatgtcaattggtacataccaagttccttcatcctggacaacagcctctgtractgtcacaatgtcaggttaccattggtgccaaaggtagcacttaygctttttagaacccttatcagtacagagtttaggcacctgaggtctttcacataggccagatgagtctattgaatacagaaatagtgtacagatagttgggttcttaaagcttggcaatgagggaaattattcccttttttatccccagagtgttaatactggttttggtagacattggtactacgtgccagtagtttggtaggtcatgatcttccacatatcccaygaaatacctggactgcagcaaatcccatcaggaggtgggtgtaaatgctagtgttggttcatatagaaaatgtatttaactagtaatatattcagtagtagaggccatgacaataggggtttatagtggcccaaagggatctaccccatagttggtttagaaagaggtcctgtttgtggtgacctcagattaaaaactagaaagaattatttgtttcctcctcgtcctcatgtcagggattgtgaggatcacagtaatttgttgaccagtatccaaaaggcccaagaaatgtcattttttcccacccccacttcaaactttgtcctaggtgtaggtcctcagttccccactggggacctagggaccttgtactaacccctagtcatgcttatttgtgaaagatgagagatctgggtaaaagtaggaagggtctgtatgttagatcccacaatgtatcactctaaatttcataagattacttccttcatcaaggaagcaaactactcaagtctcaagattcactgagagggttagagaaaatagcactcatactgttcatagtggacatcaccatatggaccttagtgcctggtgggaccaccatggctcactatctattggggggcccatcaatcctactcctttgagaccctgttgtttggtgaccaatctcatagatctcctctagaaggccattgcctggattgagcagcagagggcacatgattgccatttttttgccactctttccattggccagtgtttgctatctgggcagcagccacgttttccatgctcaagatttgccagttaatatctggactatatctgattgacatgaccttaggaggaggtttgataaccagcagaattgaaataactgaatctagaaatctgagtctggtcaacaatcttatcatctgttcttttcactctcactgtgcaaccaagggactatcagcgtggctggccaggatactgtaagaagccctttgttggttctctaatttgaaccactgtgggagtttggttagaaaactgggggctatattcccaggcaagatggccaaataggaacagctccagtctgcagctcccagtgataccaatgcagaaggtgggtggtttctgcatttctaactgaggtactcggttcgtctcattgggactggttagaaagtgggtgcagctcaaggagggcgagcagaagcagggtggggcattgcctcacccaggaagtgcaaggggtcagggaactccttcccctagccaagggaagccgtgagggactgtgccatgagggacagtgccatctggcccagatactatgcttttcccacagtcttcgcatcacrcagaccaggagattcctttgggtgcctacaccaccagggccctaggtttcaagcacaaaactgggcagctgtttgggcagacaccaagctagttgcaggagtttttttcataacccagtggcacatggaatgccagtgrgacagaaccattcgctcccctggaaagggggctgaagccagggagctgagtggtcttcctcagtggatcccaccctcacagagcccaactgagatccactggcttgaaattctcgcagccagcacagcagtctgaagtcaacctgggatgctcaagcttggtggggggaggggtgtcgccattactgaggcttgagtaggtggttttcccctcacagtgtaaacaaagctgctgggaagttcgaattcggtgcagaacccaccacggcgcagcaaagccactgtarccaggctgtctttctagattcctcctctctgggcagggcatctctgaaagaaaggcagtagccccagccaggggcttatagataaaactcccatctccctgggacagagcatctgggggaaggggtggctgtgggcgcagcttcagcaaacttaaatgttcctgactgctggctttgaagagagcagcagatctcccacacagtgctcaagctctgctaagggacagactgcctcctcaagtgggtccctgaccccagtgcctcctgattgggagacacctcccagcaggggtcaacagacacctcatrcaggagagctccagctggcatctggccggtgcccctctgggacaaagcttccagaggaaagagcaggcagcaatctttactgttctgcagcctccgctggtgatacccaggcaaacagggtatggagtggacctccagcaaattccagcagacctgcagaagaggggccggactgttagaaggaaaastaacaaacagaaagcaatagtatcaacatcaacaaaaaggaaacccacgcaaaaaccccatctgagggtcaccaacatcaaagaccaaaggtagataaatccatgaagatgagtaaaaaccagtgcaaaaaggctgaaaattccaaatgccagaatgcctcttctcctccaaaggatcacaactcctcgtcagcaagggaataaaacaggagagagaatgagtttgacaagctgacagaagtaggcttcaggaggtgggtaataacaaactcctctgagctaaaggagcatgttctaacccaatgcaaggaagctaagaaccttgrtaaaatgtcacaggaactgctaactagaataaccagtttagagaagaacataaatgacccgatggagctgaaaaacacagcacgagaactttgtgaagcatacacaagtatcaatagatgaatcaatcaagtggaagaaaggatatccaagattgaagatcaacttaatgaaataaagcatgaagacaagattagagaaaacaggatgaaaaggaacyaagaaagcctctaagatatatgggactatgtgaaaagaccaaacttaacgattcactggtgtacctgaaagagacggggagaatgaaaccaagttggaaaacatgctgcaggatattatccaggagaacttccccaaaatagcaagacaggccaatattcaaattcaggaaatacagagaacaccacaaagatactccccgagtagagcaaccccaagacacataattatcagatttaccaaggttgaaatgaaggaaaaaatgttaagggcagccagagagaaaggtcaggttacccacaaagggaagcccatcagactaacagcagayctctctgcagaagccctacaaaccagaagggagtgggggccaatattcaacattcttaaagaattttcaacccagaatttcatatccagccaaactaagcttcataagcaaaggagaaacaaaatccattacagacaagcaaatgctgagagagaattttcaccacaggcctgccttacaagagctcctgaaggaagcactaaatatggaaaggaaaaactgktagcagccactgcaaaaacataccaaaatatgaagaccagtgacattgtgaagaaactgcatcaactaatgtgcaaaatagccagttaacatcatgatgacaggatcaaattcacacataacaatcttaaccttaaatgtaaatgagaaaatgcctcaattaaaagacacagactggcaaattggataaagagtgaatacccattggtgtgctgtattcaggagatccaattcatatgcagagacacacatagcctcaaaataatgggatggaggaatatttaccaagcaaayggaaaacagaaaaacccaggggttgcaatcctagtctctaataaaacagattttaaacaaacaaagatcaaaaaagacaacgaagagcattacataatggcaaagggatcaatgcaacaagaagagctaactatcctaaatatatatgctcccaatacaggagcacccagattcataaagaacgttcttagagacttagactcccacacaataatagtgkgatactttaacatcccactgtcaatattagatcaatgagacagaaaattaacaaggatattcaggacttgaactcagctctgcaccaagtggacctaatagacatctacagaactctccaccccaaatcaacagaatatacactcttctcagcaccacgtcgcacttattctaaaattgaccacataattggaagcaagttataactcctcagcaaatgcaaaagaatggaaatcgtaacaatctctcagaccacagtgcaatcaaagtaaaactcaggattaagaaattcactcaaaatcagacaactacatggaaactgaacaacctgctcctgaatgactactgggtaaataacgaaatgaaggcagaaataagtgaattctttgaaaccaatgagaacaaagacacaatgtacaagaatctctggaacacatttaaagcagtgtgtagagataaatttatagcactaaatgcccacatgagaaagtgggaaagacctaaaatccgtaccctaacatcacaattaaaagaactagagaaggatgagcaaattcaaaagcttgcagaaggcaagaaataactaaratcagagcagaactgaaggagagagagacacgaaaaacccttcaaaaataaatgaattcaggagctgtttttttgaaaaatttaacaaaatagatagaccacgagccagactaataaagaggaaacgagagaagaatcaaatagacacaataaaaaatgataaaggggatatcacccctgatcccacagaaatacaaactaccatcagagaataccgtaaacacctttatgaaaataaactagaaaatctagaagaaatggttaaattcctggacacatacagctttcccaagactaaaccaggaagaagttgaatccctgaatagaccaataagaagttctgaaattgargcagtaattaatagcctaccaaaaaaaaaaaaaaagcccagggccagacagattcacagctaaattctaccagagktataatcaggagctggtaccatttcttctgaaactattccaaacaatagagaaagagggaatcttccctactcattttatgagaccagcagcatcctgataccaaaatctggcagagacacaaaaacaacaacaaaaattcaggccaatatccctgatgaacatcgatgcgaaaattttaaataaaatactggcaaacagaatccagctgcacgttaaaaagcttatccaccacgatcaggtcagcttcatccctgggatgcaagactggttcaacatatgcaaatcaataaatgccatcagtcacataaacagaaccaatgacaaaaaccacatgattatctcaatagatgcagaaaaggcctttgagaaaattcatggtaaaaacactcaataaactaggtaatgatgggatgtatctcaaaataataagagctatttatgacaaacctacagccaatatcatactgagtgggcaacagctggaagcattccctttgaaaaccggcacaagacaaggatgccctctctcaccactcctattcaacatagtattggaagttctggccagggcaattagggaagagaaaaaaataaragatattcaaataggatgagaggaagtcaaattgtctctgtttgcagatgacataattgcacatttagaaaaccccattgtctcagcccaaaatctccttaagctgataagcaacttcagcaaagtcccaggatacaaaattaatgtgcaaaaatcacaagcattcctatacaccaataatagacaaacagagagccaactcatgagtgaactcccattcacaattgctacaaagaaaataaaatacctaggaatacagcttatgagggatgtaaaggacctcttcaaggaaagctacaaaccactgctcaaggaagtaagagaagagataaaccaatggataaacattccatgctcatggatrggaataatcaagatcgtgaaaatggccatactacccaaaataatttatagattcaatgctattcccatcaagctatcattgactttcttcacagaattggaaaaaactactttaagtttcatatggaaccaaaaaaagagcccgtatagtcaagacaatcctaagcaaaaagaacaaagctggaggcatcacactacctgactccaaactatactacaaggctacagtaaccaaaacagcatggtactggtaccaaaacagatatatagaccaatggaacagaacagaggactcagaaataatgttacgcatgtagaaccaactgatctttgacaaacctgacaaaaacaagcaacggagaaaggattccctatttaataaatggtgttgggaaaagtggctagccatatgtagaaaactgaaactggaccccttccttamatcttatacaaacattaactcaagatggattaaagacttaaacctaagacctaaaaccataaaaaccctagaagaaaacctaggcaataccattcaggacataggcaagggcaaagacttcatgactaaacaccaaaggcaattgcaataaaagccaaaattgacaaatgagatctaattaaactaaagagcttctgcacagcaaaaatatcatcagcatgaacaggcaacctatagaatgggagaaaatttttgcaatctatccatctgacaaaggactaatatccagaatctacaaggaacttaaacaaatttacaagaaaaaaacaaacaacctaatcaaaaagtgggtgaaggatatgaacaggcacttttcaaaagaagacatttatgcagccaacaaacatgaaaaaaagctcatcatcactggtcattagagaaatgcaattcaaaaccacaatgagataccatctcacatcaattagaatggtgatcattaaaaagtcaggaaacatcagatgctggagaggatgtggagaaataggaatggttttacactgttgatgggagtgtaaattagttcaaccattgtggaagacagtgtggcaattcctcagggatctagaactagaaataccatttgacccagcaatcccattacttggtatatacccaaacgattataaattatatacccaaacgattataaattattatactataaagacacatgcacacgtatgtttattgcagcactattcacaatagcaaagacttggaaccaacccaaatgcccatcaatgatagactggataaagaaaacatggcacatatacaccatggaatactatgcagccataaaaaaggatgagttcatgtcctttgcagggacatggatgaagctggaaaccatcattctcagcaaactaacacagcaaactaacaacacacagcaactaatacacagccaactaaccaaacaccgcatgttctctctcataagtgggagttgaacaatgagaacatatgggcacagggagtggaacatcacacactggggcctgttggggggtagggggtcaaggggagggatagcattaggagaaatacctaacgtagatgatgggttgatgggtgcagcaaaccaccatggcacatgtatacctatgtaacaagcctgcatgttctgcacatgtatcccagaacttaaactataattataatttaaaaaagacaactgggggctaagggaaggataacgattcccctaagaacatagaatcttaygtaaacatcccttagaactctctcagagctgtttgtggcattcagtgcactttctgagacccattggcatagttgatgaccctmagactcttgcagattatctgtgtgcactacctaaaagtgccccagaggcttttcagtatctccccaaaatgctcagtagtagcttcaggaattttggtttatgattgtataatcccagcactttgggagaccgaagtgggtatattgcttgagctcaggagttcaagaccagcctgggcaacatggcaaaaccctgtgtctacaaaaaaatgcaaaaattagccatgcgtagtggctcatgcctatagtcccagctacttgcgggtgctgaaatggaggatagcttgagcccaggaggttgaggctatagtgagctgtgttcacacaactgtgctccattctggggkacaaagtgaaaccctgtctccaaaagaaaaaaaaaagatattttatactgtgaactaatatgtaaataccccaagataacttaaaaaatagcccagaattggtgaactttggttgaactttataacactattttatggctatgagtcatagactcagtatccaccaatgtccaataacaggccaaaatttgtctcatgaagaatgtgtagatttcagctgattttgggagattatgaattcagaaacccaatggacacctcagtcctgtgtcagtgtctttctgccgtaggctctaattggtgmacaaagaagttgctgagacctataactcaaaggcaaatgtggatcacaaggactcagggtaaagttagcagcatggcccattggaaagcctccaggcaatcctgttggtcagaacaccactcaaaaatggcagccttactggtaacataatatatgggtgtcatctagatttctgcttgtgtgatgtgaatgtactagtagctgaatagtcccaatagtccctgggacttctttatatttgttgggatagagtgggccaaaggcttggcaattgtctcctctggaataagaccttatgcccctttctagatcataccctggaattcacttgggttttaggtctttgtaccttgtctgtattcttgggctagctgtgttgctgcatgtgggtcaacagggcaacagtttttgtttggtagtgtctggacccaccaggaagatgtcttcaatatagtagaaggttagaacagggacatggatattgaaaagagtatacgagatgtcagttgttgtatattaagttcctttgtcttgggcagtagcctctgtgacagtcacaaagtcagtactgccagtgcttagggctacactaatggaatgaactaccaataatcaatcgaatctctgtgtgtacccaaggccagtacacaggccccatggggttattggatggaaaattagtcccatagaaaactggctttattaagctcagaaatgaaatagttatatcttttctcccctagttcatggattttttttggtagacaatagcattaggtactattaatcaggtaaattcatggtccccatatatcccaccaaatggctctaactagagcaattttctttggggcttgggaatgaatgcaagcaggaatatactaaaacaatataactatactgttatacattcagtagttggggrccataacaatggaggttttagtggtccagtgggacccatgcatactttgttacagcagcgatctacttcccagtggtagggctaccattacaaagtacccacaaattgggtggcttcaacaacaaaaattgtcgtcagtgggctagaagtctgggatcaaggtgttgacatggttggttcattcttggaaaatcaattccatgcctctgcctgagctccttgtgggttgctatttttgacattccttggcttctatatgcatcaccccaatctctgccttcaatttcacatggcattttcccagtgtgtgtgggtgctccaattttctgtttttataaggacatcatttatattgaattagggcccactctaatgacctcattttcattaatctctgtaaagttcctatttccaaataagatcacattctgagatactgagggttaggacttcaacttacctgttttagaggggcacaattcaacccgtaaccctcccatcatagtgttagggattatggagatcatagttgtgcaccaaatccaaaaggcccaagaaatgcaatgctcctctatatccctattgaacttttaccttgttatatgaccaccgttcttcataggcacatagggaccttggcctgatccttagtcttgtttagttttgaaagctgagacatcggttaagagttgaatgggagtctccagttcacctccagcttcactgggaggagcagaaggaatagcrctttattaatcaggatccattacttcgtagaccctagcagaccaccctgtaggsccccatggcycactaccttgccatgagttccttggtgggagagcccatcaatttccttagaacccacacttaagtaactggaatcagcgatcttgttgtgaaagtgcttgcccagatggtcctggagagagtgmgtgattaccagttttacatcactctttctgccagccagttgttgctatctgtgmagcagctactttttcaattctgataccgatttgtcatcagttaatatctggattgtaccacagactgatcagcatggccttatgaggatgtttaattgarttcagtaaccagtaggagtaaaacgaatgaacctaaaaaactgagtcttgttaacagtctcatctaccaccggggtggctaacagggaagctatatacattggaagaatagtccaactatgttttttaatatcaaggaacttatcatgttggatcaaatctttctaagcccaaataatatccagctgaggatgtagattgttttggatgcttgcagcctttcatcccagtcctctcttcctcctcctctttaggcaaagtggctgctaatagtatactctgaaagtgggggtctataatgatacaccccacaagatgacactctcactaagtttaacaagatttccttcttcatcgtggaggtgaaaaacccaagtctctaagatcactttagatagctgggtgaagtaactccaaagggctctacattcttttccattttaggcatgagtctcaacaatttgctgcatcgcaggctatctttcagtgtcagagacatgcttagagctaacactagtaactgggtgcaactcagcaactcagggtctctgatgacttttgttgccattgcctccgagattgtattactaggtagggattgcttccccagctttcctagagtctctcttttggatttataatttaacccaccaagcaagctcagctagggaattggaagctaaaaggaaggatyattagttctccctgagacctgaaaagcktatatatacaatcactagcattccccaaaagcactcccagggcccacaaaatatttcctgagacacattgtcatggctggtgaagtgctctatgggactcccagactcttgcaaaggattcattggcatcatccgtgagtgtcccatgcatttctctaacatctcccaaaaaatttccatgggatcctcggggttcttttcttttctagaaaggcagtgtatttactggtcaactctgctcactgcaccactttgtcagagagagagctgccagttgttgagttggtcaattaatataacaagtcaaactgaaaggaataattaagccttttttcagatactgtgataacataagcaagagtctacacaggaaagggcccagcttcaccagaattccacttttccccattaaaggcaccagatgagtggcagatgtttcatttaaaaatggggggatcatttcactgccatgggaaccccaaatgaaaagctcttgccattatatagatgtggcatgtggagaggaccaggagtggaaaagtactgaacactgtcagaagaaagaaaattgtcttcaaggctccccagcaaggtcatctaaccagagtccccttaataatacagtaccttagtcgagctctctactccctcacaagaaggactccaaatggagggttcctgagctaggtgtgcagatatgagtaagagcatggttggcctggagagatctgaacccatacctgcacatccctacggagatcacagtgcactggctgtatgttacatccagtgtgggatggaaagctgtcttccataactgccagataaaacctttgtacttgtctatgggtgtgcctgaaagatcacacacaacattttaacttgaacccatactccttagaatacacgtatatatttatgtgtatatatctacttatacatacacacacatacacatgcatgagcacatatgcatgcatgtgtacatgaatacacatattttagaaatcatgagatctcttggacacctttaattttagtgtctmagggcttgttcttgatttccttcattttgtatgtatatatcctttcttttgtattttgaatcctttctctcgaagcaccaactgatttatgcagttgctctmtcctataatactttgaaacttttacaaaattgcttagcatatactactacaaaaacaaacctactaaaagaatttcatgatttctttgcagtctgcccccaacactcttgcccaagactgagggtatgtttcaaatactgtatttattagttacatggattagtacttgtttttttgttccatatattaggttagtttcctttcagttttagttcccacttcttatccttattgaattaattttatttttagaatattgtgttcatgcattttgtattgctgtgaaggaatacctgaggctgggtaatttatgaagaaaagaggcttatttggctcatggttatgcaggctgtacagatatggtaccaacatctgttcagcttctgatgaggcctcagggagtttttagctatggtggaagggaaggggaaccagcatgtcacatggcaagagaagcaagagagagatgggggacatcmcaatgtctttgtcaacaaccagattttatgtgaactcattaccatagagagggcaccaagccattcatgaaggatctgcccccatgacccaaacacctcccaccaggcaatacctccaaccttagggatcacatttcaacatgagatttggaggggactcatgtccaaaccatatcaaatatgtaaaacattaacctacttccaaaagtaaatattatgcaaaagatatccttagaagaatataatttctgccacattccttctctttgtattcccatcctttttcctgccctgttgtcttgtagatracaaactacagtgttttcttgcttattttacctgtgtctcattttgaaaaggttaatatttctctatttctgtttttttctgattggttatttctgactcaaaagttaccgtactagatatcctgtttttaagattatttttcacttaacattatcttctagaaatccctccatgttagtttatagaaacctttattatttttacataatatgtatagaattatatatagtgatatgtagartatttatatcatatcataatttatagtatatatctttgtttattgagccaatatattatacttgaatatttagatgtgttgaatattttgcaattatgaataatatggtaatgaataatgtgcatacaaatttttattgtttggtctattactgtgtattaacctacagtgtaaataatcaatgaattctgaagaccaatagaaaatatatttgatgccttagaatatttatgatataatgagacagcttttgtaacacccattaaaactattttcatcattttcatgtcagatttaaattatggtgatttacttataattttataaaaatgagaaaaaatattgctatatacttgttataaacttcaaatatagagatttcacaatagatttgttttttcatttagcggactaaatgtatctctttatgtggttcattttgtagtaccagataaaaattctatgtttgttcatcaagattcagtgtcaaaactccaaatgcaagaaaagraaaaaataactcctggaagggaaaggcgtaatagtaagtgtagtaattatagatractttaaattattttaaaattaaacttatcagaagatctttgcctttgattcctgaatgtgtattttagcatrtattttatggaaatcgtagactttgccctgaagtcttaagataagtagagagcaaaaatgaaaatgttaacttcrtgttggagtttctggtcataagattatttcacagccattggacatgcactcaatatctaccaaggcccaataattcgcctacagtatcttgaagagtgtacctttcagctgactctgggagattagtttcctggagatcatacccaatgatcacttaccacgtgtagcgatgttgttcttccctaggcttcagtcaacaaactgagaggttgttgaggtctgtaactcaaatagcaagtgggaattataggagccaaggagaaggatagtcctgaaggcttgttggttagccctagggcattttgttggttgagcgccacacaaaagtaaggtcttcttggtacccttatagatgggtgccatcaagtttcttgtgtggtggggaatgttaaagtgcccatggccaacaatgattgtgcttccttttcattttaggggattgagaggacsaaaagataggcgactgcacatcatctccaaattcacagggaagggtggagggagtaacacttcattaatcatrgggtcttcaatgtgctgaccctagtagggcccatcaacttcactgtttagtaaccagacctagagattgtctctacaggcatcattcaggagagggcgcttgattgccattttattaggttggtgcaaaagcaattgcrgtttttgccataaattgcttttgtaccaacctaatatatcrctttcctgctggtcagtctttttctacctcaggagctgctgcttttcccatgcctgaaaatttttcagttaagttctggattttgtcacagaacatatgacctgcccttatgcataagtttgattgaattggaaaatcagcaagagtggcatgaaagaacctagaaatctgagtctggtcaaccatctcctctattgttcttactcttgattgtagaaccaaaggacaaccagcgttgtgattcatagggctgctcttgcctctgcaagggtggtccaaacatgattttagtggtaggttcatcatgggtatgcccaagcgatcagagcccaagcaatcactaagctgaggaatgagagggtcttgaagttggcatctcatacaccccctttctttctcccccttgagtgaagcttctctgtcatgacactctgaaggaggggttctgtagtgacttattccacaaggtaccactttttctcattaagtttaagaagagtacataatgttctaaggtgcctttggtaggtaggtaaagtgatctcagaaggttctacattttttttaaaaaaatcccttataatttaaccatgagtctcaatactttgctgggacataggctgtctrtcattgcctggtagctgtttagaagtaacagcagtcattgggtgcaaattagctctcagattctctggcaactctcagccccatctccacataattatatactgtaattaatatcataccattgtttgtggtatatatatctgttcatttgaccaatctcctgtgtgtgaaaatctcaatggttttgaatattttgcaattacaaataatgctataacgaatgatcttatgcatatgcattttcattgtttggcctatgattatatattaagctaaagtataaattatcatgtattatgtaagtattttgattatgtattaaagtataaactcatgaatcctggagaccaatataaactttatttgatgcttcagaatatttatgaaataatggcttagcttccacagcagccattaaaattattctatttttgtgtcagatctagcattatggtaatttacttataactttataaaaataagagaaatgtacatattatacattcatagatttatgtttcyatttgatggactaaatgcatctcttgatatagctcrtattgtagtaccaaatgaaaatgtgatttctgttcatcaagattcaaagtcaaaactccaaatgcaagaaaagaaacaaataaattctggagtggaaagacacaagagtgagtataataattatcgataactttaaattattttatgttgaactcatcagatcttttcctttgattcrtcagtgtgtacttcagactatatttcatcaacttttaactttgacctaaagtgtgaataccctatgataactagagaacaaaagtaatgatactttttggttggtatttgaatggtcattaattataagtagtatcactgcctccacacatgctcatgaaaactattcacatgattttctcattttacttccatgggttgaaattctgatgattacttggcatatccagaagttctattgcacatctatttttttctatttagcgtttcctttagaaatcaaaaaaaaggatatatcacttgaacatctgttgcctgaggagaaagttttattatcaagaagcgaatctcaaacsaagaaacttcaagctaaagtaacttcaagaaaaagtaagtaattatttataaatcttataaattgtttttattaaattcaggagaaatttgtttttggtttataaatatgccttcaaccatatgcttcttctrctaattatttccatcacrctaccagatctttattgataacttgtttcttttataattactcagttgcatgtgtcaaatctgccactttgtggatttctctatttcttcttgtattagtgtcaggttttgctttatatcttataatgctctatttttgtgtgtgtgtgcaagtaaactttaaatttatattcttcaaaactttatattcttcaaaaaacagttttttccttataaaaggattcacttcatcattttcataatttttgttgttttccttaataactactttatctgttattatggctccacaaactttcttccagttggtatttgcttgatacgtttttttcatcatattatgtttaacttctttgtttctttgtgattttgctatgtctatcgtaagaaacttayaattgtatatactctttttaaaatcagcttgaattttaagttctggggtacatgtccagggtgtgcaggtttgttacataggtaaatgtgtgccattgtggtttgctgcacagatcaacccatcatccaggtattaagcccagcacccattagctgttcttcctgatgctgcccctcctcttgccccccactccagacaggccactgtgtaggttgtcccccacatgtccatatgttctcattgttcaactcccatttataagagagaacatgtgatgtttggtatatgctcatattcagtctgatattttttcttttaattatctcttataaccatatataatctaattattgattttttaggtgcaattatatcatttttttcttggcttctcctatttctcctacatggtatgtttctttcactgtctactccattttttatcatcatacatttttccttagcaatatttggtaccaaaaattttaagctttacctaaagtgtgaatataataagaaaaaataaggaaaaattttaaatatacaagtatttgtaataatgtttatagtagtaaataaaataataatgtttacaaataaaatatatttaatacccatgtatataaaaattaacagaacagcttttatatgcacaagtaaaagatgtatttatatgcttatattttaactagacactgatttgcttatatcattaacatayagtaattaacatatattgtgaatctggaggttcckccatagatacagttctctagtgcttttaagagccttccttcttgtagtccagaaaaagatgaggtattagatgaaaatcttttgcctgcaactagagctgctagaaagaagagattccatagtaaatatggaaataatattattaaattatttttaattacattagttaaattttaattaagcataattttgttcatggatatgtattctgctacaatgttacagacatccactgaactcattttttattgtgtcatttacatttatttcttgatttccttgaatcttgattattctatcaattattgagatgtatattaaattatcccactatgtggatttacctatttcttcttatagtactgtccattttccttatactgtctatgttattagatgtatacaaataaaaagttagattttcctttgaactctgccttttatttttatgaaagggatcatctcagtctctagtaaggtcttttgactaaaagtctattttgtctgacattgacataattactacagagtgattttggttagtgtttgcatttttttaagtcatatctctaataaagaacttatagttgaattgtttatcagttcaatgtgtctgtctttgtctattcctagaatatgtaaaatatgtaatccatttacaattattgtacttactgatatatttggatttaaatattttgggtgagggtgcttttcagtttttttttgtctgattcagattactttctattttatttctttccttattttggaattacttttaatcagttgaattattcaatgtgtcacatatgttataaaaactttttaaaatgtgaatacacttagtaaaataaagtctaatttcaactttctaagtgtatgtatgaagtaataagagtgcctccacatactttcaggaaaagtactctggtggtttttgcatttaccttcatgattcattttgaaaatgtgtcagaggttttattgtgtgacatttatttaagttgtattgtctagtgtaaagtcttataaaactgatagggctgggcacrgtgactcaagcctgtaatcccagcactttgggaagccaaggcgggctgatcacaagttcaggagatcgagaccatcctggctaacacgatgaaacctcgtatctactaaaaatacaaaaaattagcggckcatggtggcacgcgcctgtagtcccggctacttgggaggctgagacaggagaattgcttgaatccgtgaagcgcaggttgcagtgagctgaatcggccactgcactccagcctgggcaacagagttagactccgtctcaaaaaaaacaaaacaaaactgataggaaactttgaatggtcctttctatatattaataattcagagacttcacagtaaagtttttttcactttttattgggttaaaagcctttctttttgcaactgagaaaatggatgaaatagcagatgaaaatctttcacatgaaataaagttttaattttaaaaagcccatctcatattacaaaacttaatacttgcagaaaagtgagacttcaaagtaattataatcattaagaatattgtgtaatgactttaaagttctctccttagtttatatgttcaatcacaartatgatttttacatgtcatgtgtataaagaaaacatgtatgtgcgtatattcatgtatattctccattgtcgttgattaatyatatttttcatgtgttcttaacttcactgaggttctgtttattttatcatttatgagaaaggtattttaaattctgctactgtgattacttatttctctatctctttgtagttctgccaatttttgttctaygtttctaaagcttttttttatatacatacacattttaaattgttaaattttcttaagaatgctgaaactcttgtctttatgatggacattttttaaaatagactgtatttttagagcattcttatgttcacagtagaaagaaagatagagatttctcatataccaccttcccccacctacatgtagcattacccacgatatgatggacattttgtagcaactctctttgccattaatctgtcagatattaacatagcatctttttaatattagtatttgcagaacacaatttttcaccattgtactttcaacctttttgtattattatagcttagctgtattatatgtgttaaatgtattatagttcttttttaaatccaatgtggcaaactttgaattgaaaacataacatttaacacattcatatttaatgtaagtactgatattttgtgggttaatataccatcacttatgttttctgtatttcttgcctgatctgtttttgaatctccttttaaagtttatttttaatatgtttttatcttttttattactcatatctgttataaaaatttaacttgattataaaatatgaataccttatgaaaccattttcttgaaaagttctcctatatttttacactttacatactcagtctataactcactgtctcaacaacgtggcagttggttatattatttcaaaacatgagagaaaatattgctggataattgatatgtattttgaattacagaggttttttgataaatttgtttatttaatggattaaaagcatcttttttgtagctcagaaaatggaagaggtattagatggagatttttttamttgaggataaatttgcattttcaaaaagcaaatctccagctaagatatttggagctatcaaaatggaaacactaagtagtatgataattttcaatatcattgatgtatttttaattagagtaagctgaagaattttgttcttagctttgtgactgtttagtcaatatgtcttttgtatacatctattagatcaaatatgtttattctgttcagttcttacttttttcattgaggtttttctgtttattctatattactaagataagtatgttaatttctcccactgtgattatggatttctctatgccttatggtagttctgtcaaattggtttatatatttggaaaatatttatttattgtgtgcaaatttatactttttatctggtaaatggagactgtctgttaatctctgaaaatgcattttgttttatacaawtcaaaaccatagtgagataccatctcacactagtcagaatggctattatttaaaagtcaaaaacaacacatgttggtgaagttgtggagaaaagagaacacttacacactgttggtgggagtgtaaattcgttcaaccattatggaaaacagtatggtgattcttcagagagctaaaagcagaactaccattcaacacagcaatcctattactgggtatatacccagaggaatataaattattctaccataaacatacatgcatgtgaatgttcatcgcagcactattcacaacagcaaagatacggaatcagcctaaatgcccatcaatgacaaattatctgtataaagaaaatgtggtacatatacaccatggaatactatgattactatgcagccataaaacaggacaagatcatgtcctttgcaggaacatggatggagctggaggccattatacttagcaaactaatgcaggaacagaaaaccaaatactgcatgttctcacttataagtaggagttaaatgatgagaactcatgaacacaaagggaacaaaaaacactggggtctacttgagggtggagggtgagagaagggagaggagcagaaaaggtaactattgggtattgggcttaatacctgggtgatgaaaaatctgtacaacaaacctccatgacatgagtttacctatgtaacaaacattcacagatacccscgaacctaaaatgaaagttaaaaataaataaataggctgggcgcagtggctcatgcctgtaatcctagcactttgggaggctgaggcgggcagattgcctgagctcaggagttcgagaccagcstgggcaatatggtaaaaccccgtctccattaaaatagacaaaaaattagccaggtrtggtggcatgcacctgtaatcccagctacttgggagggtgaggcaggagaattgcttgaaccagggaggtgggaagttgcagtgagctgagattgtgccactgcgctccagcctgggtgacagagtgaggcttcatctccaaaaaacaaataaaattaaataaaataagttaaaataaaataaaataaaataaattttaaaaaatgcattttgttttaatgtttatctgatatttgtacagctacatatgctttcttgtgataagtatttacacagtcttttgtaaacagtttagacagaggctcttggtgcctatatgatttcagtaattttttcacaatactcctaaaccacaaaaagagtccaacgatttcttcattaattaggtgcaaaacaacttagtacctgttggatactgcataacttttgtagggacatatattttttacacaggtaaataccaaggagcacgattgctgtatcatatagtaatactatatttaactttgtaagaaattgttaaactgtcttcaaagttgctgtagtgttttgcattcctaccagcaatgagtgagagttcccatgttccttgccagtttttgtgtttttaatgctttggattttagccattctgataggtttgtagtggcatgtagtggcatctcaatgtagtggcatctcattgttgatttaatttacaattccttaatgacatatatgttgaacatctttttatgtttatttgccatctatatatcttttttggtatctcttcagctctgttgcccatgttgtaataggtttatttctttttcttattgtgtcaggtatgtgttttctaaatattttcttcctgcaggtggcttttattttcattttcttaacagtgtctttcacagagcagaatgtttttattttagtaagtacaacttatcaattttttattcatggattgtgcttttgttgtatctaaaatgccatcaccaaatttaaggccacctacacttgttcctttgtgtcttctaggaattttatagtttttgcattttatatttagatctatgatccactatgagttcatttttggtaaggtgtaaggtctttggttatattcattttttgtttacatgtggatgactagttattccaacatcacttgttgaaaagagtcctttattgaatttcctttgcttctttgtaaaaatttgttgactatatttatgtgattctttttatctctcttctgttccaattgctctatttgtctattgtttcatcaatagcatactgtcttgatttctgtagggctacaggaatttttaaagttgggtagtgtcaatcctttgattttgttttcctttaatattgtgttaactattctgggtctttwgcctttccattcaaattagaatcagtttgttgattccattttgattcccacagaatggcttgtgggaattttgattgcrattgcattgaactgagttgaaaagaactgacaacaaacaatattgagacttcctattctttaacatggactattgctccatttagatcttagatctgtttattctttgatttccttaatcagagtattttagttttcctttttttgtggttaatatttttttaattttagtttattattatactttaagttttagggtacatgtgcacaatgtgcaggttagttacatatgtatacatgtgacatgctggtgcgctgcccccactaactcgtcatctagcattaggtatatctcccaatgctatccctccccgctccccccaccccacaacagtccccagagtgtgatgttccccttcctgtgtccatgtgttctcattgtttagttttctttatatatctcttatacatattttgttaggtttataattacctcatttttttggtgataatgtgaatagtattgtgtgtttaatttgaaatatcacttgttctttgctggtatataggaaagcagttgacttttgtatattaaccttgtatctagcaaccttgctataatgacctattagatttttgctgttgttgagcaaaaacaattttactcattttatatttattttattctcttttcttgtcttactgcattagttaggacttccagtacaatgtagaatacatgtggtgagaaatgatgtccttgatttattccttatcttagaaaaaaaagcatctgttttctcatgattaagatattaggtatttgttttttgcagatattctttatgaaattgaggaagtttcctactattcttagtttgctgatagtttttaaaaatcataaatgggctttagattttgccaaatgatgtttcttcatttcttattgatcatataattttttctttagtctgttgatgkggtggattacattaattgatttttgaatattgcatgaatgttgcgtacctgggataaaccccatttggttgtggcatataattctttttatacattgttgaattcaatttgctaacaatttgttgaggatttttgcatctttattcatgagagatgttggtttgtagtttttttcttatagtacctttatctacttttggtattagggtaatatagtttaaatgtattatggaatgacactgtactttgtgtgacttttgttcttttaaatttgttaaggtttgtcttatagcccagaataagatctgtcttactgagtgttccacagaagcttgagaagaatgtgtattctgctgtttttgaatggaataatctataagcatcaattagatccagttgattggtgatgtgctaagttcaactatattcttagtgattttcagcctgttgtagctgtgaattacagttagatggtactgaaggctgcaaatataatgaatttgtctgttttctttgcagtcccatctgtttttgcctcatgaattttattgctctgttgttaggtgcatacttattaagtattactatgttttcttgaataatgacctttttatcactgtgtaatgtccctccatgtctctgatcatttttcttgctctgaagtccacattgtctcaaattaatatagtttctccagctttgctttgattagttagcatggtatatcttactctgttactttacttttaatcttatcattttcatatatttaaagccaatttctggtagacaccatatagtcagatttttttattcacctactctgacagcctctgtctttgaattgatatatttagaccattcacatttaaagtgattattgacatatttgcttcaatakcaaccgtatttgtagctattttctctttattgtcctagttctttgtttctttttcaccttccacacctttcctgccttctctggctttaattacatatttaatatgatcctatatcttctcctttctcaggatatcaattacatttcctaaaattttgtatagtggtttccttagaatttacaatgtacatttatagaatatccaagtccacttttaaatatcactatatcgcttcatggataatgcaggtattctgatttcagagaattcccatttcctgccttttgtcactcataagattcctgtcatttatttcacttatatataagctataatcatggagaacattgttaccattattattatgaatagtctgtatctgttagatcaattaagagaaaagaatataaaatggtttctttcacttttttttttttttttttttgacagggccttgctttgttgcctagtctagagtgtcatggtgtgatcacagttcactacagcctcgacctcctgggctcaagtgatcttcccacctcagcctccaagtacctgggactacaggcacatgccaccatgcctggctaatttttgtattttttgtagagctaggtctttgccatgttgcccaggctgatcttgaactcctgagctcaagcaatccatctgctttagcctcccaaaatgcwgggactacaggcaagagccacyattcctggagttttttacttttattccttgkctaatattttttctctctttatgtagacctgtgtttctgacatgtattatattccttctctctgaaraatgtttaaaaatattttcttccaatgcaaggatactggcaacaaattatgtcattttttttctgaraatgtttttatatctctttaagttttgaaggattatttgtctggatacaggttctagttggttgtatttttcttcaacacttgaatattttaaatattttaagtttttcccacctcttttatctctcaagattttctttttgtctttgattttctgtagtttgagtatagcatatgattaggtctagacatttttgctattgaccattttttatgttctctgarcatctaggatctgtggtttgatgtctaccattaattttcgaaaattcttagccaktattatttcaaatatttctcttttcttgtttgctttttctccttctgttactctcattatgtacgtattataccttttgtaatwttcccaaagatctcggtattctgtttattttattattttttctcttttcaattttagaagtttctaatgacacgttttcaagctcacttattcttttttgactgtgtccagtatactgataagaacatcaaaggcattcttaatttctgttacaatgttttttatttctaacatttcctttttttcttagtttttctagcttcctgcttacattatctatttcttattacgtgttgtccactttttctatcagtggtcttaatatctyagacataattattttaaatttctggtatgataatttsaaaaattytgccatatctgagtttgatgctcatgcttaaactgtctcttcagactatgttttttttttttacttttagcatgacttgaaatttttgttgttgttgttgaaatctagacataatgtattggacaataggaactgaggtatgtaagcatttagtgtaatatggttacctagctagcagttaggctgtgttttctgtttgctgaaattgtaggtatcaaatgataaaattttctaaaatattgtcattatttttgcccccccccaccaaactgctgtttctggtttccttttagatagggtctgaggcttgcagatattttagctgtaatctgctattattatgcaggagcctgattaatgtggtgataagatgtcatgggaggagaagcaatctataatcctctaattaggtctcagtcttttagtaagcctgtgcctcaggagtctacacttcacaggagactcctatgtttttctccccaacatcccaggcccttaggtgaacaggaggtttatagggggctgaaactgggtatttcccttccccgtgttgaaggstagaaagcagctggagttggatatttcctttcccccaggtctatattgtataataaagcctgtgttagttattctctctgataaaatagtttcccttgagtgtagtcttttgttaagaacagaaaggtctgaatgtgatttaaaatgatttctttaatataattaatgatatatttggatttacatgtttcatttttgggaggaaatacagttgatacttgaacaacatgagtttgaactgtgtgggtccactcatatgtggctttttttccaaccaaatatagattaaaaatacagtatttgtgagatgcaaaacccaacatatacagaggacccacttttcatatacaagttccacagggccaactacaggacttgactatgtgcagattttggcatatgtgtgtgaaggggtggtcctggaactaatccctatgtataccaaggaatgactgtatacagactcatgaaccaaagaacaaacttctcctaattttaattgaaaagattccagcagtgtgcataattttaatatgtactgaaaagactatctgttttggtggctccaagttcttagtttgagattgagttttaataaaggattaaaactttatctttgtgttttctattttttcctatcttacttatttttacttctctcacatttattgtttcttttaaagtaaccttttttatcatttctttttctttcttaattataatgcttatgagttttaaatttttttgaatgatggctttccatacaaaactgaagataatattaaatgttttaaatgtttgtgtatgtctagaagtaataagaatgtgtctacctgcattaatgaaaaatattctcctaattattattttatactatataatcttactttaatagttcatagcacataaatgtgattatttgctaataagttgtaaaaatgagagagatactgcttaatattgacatttattttgaaattctgagatttctcaataaattattttttcctaggtagtrgattaaaaacatctcttcttgcaacttacagaatggctttacttactgaaactcttttgttcaaagataaagttttaatcctttattaaaactcartctcaaactaagaacttggagccaccaaaacagatagtcttttcagtacatattaaaattatgcacattgctggaatcttttcaattaaaattaggagaagtttgttcttyggttcmtgagtctgtatacagtcattccttggtatacatagggattagttccaggaccaccccttcatacacatatgccaaaatctgcacatagtcaagtcctgtagttggccctgtggaacttgtatatgaaaagtgggtcctctgtatatgttgggttttgcatcccwcaaatmctgtatttgtaatctatatttggttggaaaaaaagccacrtatgagtggacccacacagttcaaactcatgttgttcaagtatcaactgtatttcctcccaaacatgaaaaaaatgtgttagtgagattcgttaattgtattatttaaatcttccatttctcttacaactggtaatgtttgtttcatcaattattgaaagaatatgttcaattctcccattgtgagtgtgaatttctctattactctgtgtgattttgtcaatatttgctttacctcttttgatgttctcctatttcaacatacacgttacacatttaaatttgttatatcttcctatgaactgaacttttgtatttatgaaaggttccttctcatttctagttaggttttttgcctaaaggcctattttatctgatattaatgtatctacaccaacttactttatgttggtatttatgtgatgtattcttataaggccagttctcatgaacaacatatagttagaattttttgttccaatgtgaacatcttttccttttaactagaatttagatgcatttatatttactgtaaatactaatatctttgagattaaatattccatttttataaaatttatttttagagcagttttaggttcagttcacagcaaaattgagcagaaagtacagatttcctctgtgccttctgccattcccccmacacagactccccactgtcagcatcctgcaccagagtaaaacatytgttataaccaatgaacctacactgacaccacattatcacccaaagtccatagtttactttagggttcactgttggtgttcgtattctgggttttgacaaatgtgtgatgacatgtatatgatcattatagtatcgtacagaatagtttcactgccctaaacatcttttgtgctctccctatttatttctcccttacccctaactcctcacaaccactgacctttttgttgtgtccatgattttgcttttttcagaatgtctaacagttggaatcatacagtatgtagcagtctttgtctgctcaggctgccataacaaaataccatagactaggtagctgaaacaacagaacttattttctcacagttctgaaggttgggaagtccaagatcaatgtgctgactggtgaagaagggctctccttagttgtagatagccaccttctcactgtaccttcatgtagtctttcttttaaggccaccaattctgtaagattaggagtccactcttacaatctcattttaccttaattatctccgtgagggcatatgtccaaatacagtcacattagagattagagttttgacatataaagttgagrgataaaattcagattggcttatttcaacttagtaatatacattttaaggttcctccatttcttcagtggcctagtggctaatttccttttagccctgagtagtgctgaatactctggatataccacagttaatgtatctatttacctactgaagaatgttatgggttttttccccaagttktggcaattatgaataaagctgctgtaaacatccatgtgcaggtttgtatatggacatgttttcaattcatttgggtaaatatcaagtagtgcaattgctggattatatgacaagaataggtttagtttttaagaaacagccactttttgatggggttgtttgtttttttcttgtaaatwtgtttgagttatttatagattctggatattagccctttgtcagatgagtagattgcaaaaatgttctcccattctgtaggttacctgttcactctgatggtagtttcttttgctgtgcagaagctctttagtttaattagatcccatttgtcaattttggcttttgctgccattgcctttggtgttttagacatgaagtccttgcccatgcctatgtcctcaacggtattgcctaggttttcttctagggtttttatggttttaggtctaagatttaagwctttagtccattgtggaagacagtgtggtgattcctcaaggatctagaactagaaataccatttgacccagccatcccattactgggtatatacccaaaggattataaatgatactgctataaagacacatgcacacgtatgtttattgcggcactattcacaatagcaaagacttggaaccaacccaaatgtccatcagtgatagactggattaagaaaatgtggcacatatacaccatggaatactatgcaaccataaaaaggatgagttcatgtcctttgtagggacatggatgaagctggaaaccatcattctcagcaagccatcgcaaggacaaaaaaccaaacaccgcatattctcactcatagctgggaattcaataatgagaacacttggacacaggaaggggaacatcacacaccggggcctgttgtggggtggggggaggggggagggatagcattaggagatatacctaatgtaaatgacaaattaatgggtgcagcacatcaacatggcacatgtatacatatgtaacaaacctgcacattgtgcacatgtatcctagaacttaaagtataatttaaaaaaaaaraaaaaaaaaagaaaataacatggccaacaggctatatgggtactaaatctaagaacaaataatgtgaatgagatactaaatgttcaaagcctatactgtttgctaaaaagcataaatccagttgatcagatgccagattaaatgtagagagactaacaaaatattwccgtagcagaaaatactgttagaaattaagcaaatgaataaacattttcctgstggtgaaaaaaaaaaaaaaagaaacagccaaagtgtcttccagagtggctatgccattttgtattctcaccagcaatgaatgaagattcctgttgctacacgttcttttctgcattkatgtcagttttttggagttaggccattctaataactgtgtaattgtgtttcattgttgttctaatgcacaatttcctaatgacatatatgttacacatctctttatatgcttacttatcatctgtatgtcttcttyggtaagatgtctgttaaggtattttgcccatctttcaaatgggatgtttgttttaatattgagttttaagagttctttgcatattttgggtaacagtcttttatcagatatgtcttttgcaatgtaatttcccaacctgtggcatgacttttcattcttttcacagtgtcttttacagagcagaagttgttgaattttaattaagtccagcttatcaatttcttctttgttgttgattgtctttcatattttgtctataaagtcatctccatgcccaatgtcacctaggaatcttttatattatcttctagaagttgtatagttttccattttctatttakacctatgatacattttgagttagtttttgtgaagggtataaggtctgtatctagatttatattttattgcatatggatgacttgttactccagcatcatttgttgaaaagatattcctttcgtcatcaaattgcctttgctccttcattaaaattggttgaccatatttgtgtgaatccacttctgggctctctgttctgtgccattgatctatttgtctattctttttataagaccacactgtcttgactactgtagctaataataagtcagtcatctaacttggttcttctccttcaacattgtgttgtctcttgtcttagttcctttgcattgctataaaagaatatctgaggatgggtaatttataaagaaaacaggtttatttggttcacagttctgcagactatacaagaagcatggtgtcagcatctgcttagggtctaaggaagctttaactcacaatgtaaggggaaggagagccagcatattacatgacaagtgagggagcaaaagaaagatgggaggagttgtcaggctctttttaacaatcagatctataggaaactagtagaatgagaactcactgattattactatgagggcagcaccaagacattcatgagggacctgccctcatgacctaaatacctaacaccagctacgacctccaatattggtgatccagtttctacatgacctttggaggggacaaatatccaaataatgtcagccattctgggtattttgcctcttcatataaactttagaattagtttgtcaatattcacaaaataacttgctggggttttgactgggattacattgaatctctaaggaagaactgacaccttgaaaatattgtcatcctaactctaagcatataatctctctccatttatttagttcttccttgatttcttttatcagagttttgtagtttctactatagattttatatgtattttgtcagctttatacctaagtattcaattttggggggcactgttgtaattgatgttgtgtttttcatttcaaattccacttgttcattgttggcataaaggaaaacaattgacttttgaggagaagacccaagatggctgaccagacacagccaggaagagcatctcccactgagagaccagaccatcaagaagacggacacactctgagcatgtctttggaaggacggcattgagagtggacagagggaggatgtagaccctgggctgaaggagtaggaagctgggaagcctgcacagggctgccaagcatcaggactcattcttggtcyccagaaatttttggggaaagggtgagttaaataggtgaggagtggtcttatctcaccatgcacctccagaatcctagctgcagaagaccctattgtcctgatagacatttgagctggcagggagagctgctttaagaggtggcagggacaggggtctaggctgtgtggattccagagggtttggcgctgcaatgactacagtggagcatggccagcgatgcccatccctcaaggcttgccatgcttctctaggtggctttgacctttgttaactgtcaggcctggacaaagcagagctgtcagtgacatcgggccaatcttatctgcacacctccctgtctgccagcctctcctggggtccctgcctggctatgtctacttgcaacacagtctccaatgcccaattgtggtgcttcctggtggccactgccatggtgcctttgccagcagacctcggctaaccatcagaaagcttctgcagagggaccccaccaatgtgcacccacctgcagcctcctcgcaccactttgtcattgtgcactaactttcagcctcccctcaatgctttgccagcatgtgcacatggatgccatcaggccacagctggcatgcgcacacaaggaccccatagcaccactgctggcatgcatctgcagacagcactacgctgctgccttgtcacagccagcacatgcacatgtgcagaatccacagtgctgctgcctagtcaccactggcacatgcggggaccctgctgtcaccaccaccctgacaaagcactttgctgggacccccccaactgagtgttgttgccagcagactgggagacccttggcccctgcaagcatagcaggtgtttaacctcaaggagccagagagaaaagccacaggcctggccccataggaagaagattgaaactggaccccccttcctttcwccacatgtaaaaatcaacccaagatggatcaaagacttaaatgtaaaacctacaactataaaaaccctagaaggaaacctaggaaatacccttctggacacatgccctggcaaagatttcataacaaagaccccaaaagcattgcaacagaaacaaaaattgacaagtggaatctaattaaattaaggagcttctgcacaagaaaagaaactatcaacagagtaaagagacgacctatagaatgggagagaatatgcacaaactatgcatccaacaaaggtctagtatccagcatctwtatggaactcaaatcaataagcaaaaaacaaccccattaaaaaatgagcaaaagacatgaacagacacttctcaaaagaacacatacatgcggccaacaagcatatgaaaaaaatgcttaacatctctaatcattagagaaattcaaatcaaaaccacaatgagataccatctcataccagtcagaatggccattgttaaaaagtaaaaaataacagatcctagtgaggttgtagagaaaagggaaggcttatacactgctggttggaatgtaaattagttcagccactctgggaagcagtttagagattggytctcaaagaacttaaaacagagctaccatttgacccaggaaccccattactggttatatagccaaaggaatataaatcatcctaccataaagacacatgcatgtgcatgttcatcacagcactattgacaatagcaaagacatagagtcaacaaagatgcctatcaacagtggactggataaagaaaatgtggtacatatatatcatagaatactatgcagccataaaaagaatgaactcatgtcctttgcagcaacatggacagagctagcagccattatcctaagcaaattaatgcaggaacagaaaaccaaataccacatgttctcacttataagtgggagctaaatattgagctcacatgaacacaaagaagggaacaatagacactggggcctacttgagggtggagaatgggtggaggtgaggatcaaaaaactatcaggtaatatgctgtcactacctgggtgacaaaataatttgtacacctaactcccatgacacacaatttacccatctaacagacctccacatgtacccaaaataatagaaaaaaaaagtaaaacatgtaacttttgtacattaaccttgtatcctgcaaccttgccataactgctagtctgacaattccaacatccctgttgtatctgaatttagttgtaatgcttgctctgtctcttcacttttttttgtctgttagtgtgcattgtaatattttattaaaagccagacatgatatactaggaaaagaaactccagtaaatgggtctctaattttgtggcgaataagtatgagggaaaaaaagtcttctataatcttatggttagatctcaatcttttggtgatcctgtgtccctggactatgaacttctccagtgcttctcagttttttcccttcttatgtggggcaggatggctagacggggctggagttgggtatttcccttcatgtaggcttgttaggctctgataaaaccctagtcggtttggctctggtaaaaagtacgtgtcctgagagcagaccttgttaagaagaacagactgctctggcatattttgaagtggttcctttttcctttccctctcttaggaacataaagggatttttttctccactattcattgtgagaacctggtacagctcctggaggcaaaactcacaaaagtgtggaaactccctataactgagcctccttggtggttttatccttcagacgtgtcctcactgaggttccagcaattcactaattgcaattcaggttttcttatcctggttaaaaaggtttctgcttcattaagttgtgattccctatctttacctgtttctccagttttgggggcagcagtttgccctgtgacgtcttttctatgaagtatctaagaagagttatttttcaacttgttcagctttttacttgttgttaggatggagtgacagtttctgagatttttacatgttagactggaaattggaaggtccgtttaaaaaattttttatcttccttacctcagaaaaggtatttatctcttcattgctctcttttggactggtgacttatagcatccttccatttgtgtcagtcatttatcttattttaataatttaaacttttttctaaaatatgtataccataagagaatcaagtaataaattcatttgtttaataactagrtatrtctatgaaatagcagattttcacgtatacactgaggagaactattgtctttatttttatgctttaagtatgtactatattttaatatgtcagtgcaacttactgtggacatgtgattgttacaaaaattagagaaaatatttttgtccagttaaacaatatatagtttgtctttcttttatagtgaactacaaaagtatctcttgttcagaacttgaatatgtattgaatgaaataccaaaatgaaaatatttgagagcaagtattctttttaaagtttactttttaaacagtgtttactacaaaatatgttacaggtaatttcataagacttacgtgtaaattttaacaaataagcatgaagcaaaactaggataaccaccacttaggtcaagaaatagagttctactytcacataaaatyttcagtgtatctctcacaatttcctccatcctcacagtggcaatagttatattgattttaagataacagttttcttgtttcctcttattttggtcaaaacatatgtaattgccaatattcaactatttttgacctataagaaaatgacaaattcatgtggttcaacctaatagttttaccatttcagtatgtaattataatataatttttgaagattttaagaataaataattctctaaatatcctttctcatcttgctttttaaaatttaatgtaatgtaagacatgtaaccatattttgtttattttcattgctgtatgaaggcactactgtttgtttatccagtctgctagttatgggtatataagtcatgatcttgttggaaaagagatagcacaaattgggtttcatttgagtttaataaagtgacatactctttacaaaggaggggtgtccagcaaaaacataaggaaaactttaataatctcgaggcagaaaaagtgggataatgttactacccctaaccttgaagaggaaaggagaaggaatggttattggagacctaggtaaaagagagctctatggagagagtagtgtaataagaggwaagaggtctgggaaaggtacatgcccactgctgtgatgctgcagggaagaaaccatggaaatacattccttgatctcattgtatttcctccctctgatctcctgccatggttccactggctgaattcacctggaagccagagagcaagcaagcccattgattcactctttggaggttcactctttgaaacatacagtaactggagaaagttggagagtaaatctggaaggtaaaataagagatgtcttctcagtttactttgtttggccttcaatattctcacattgtttatcattcaggtgatgaaaatgtgtctccaacccaagaaacattaagccctattagaatccataatatttcagagtaatttcaactgggtcttactcccatttgtaacctacaacattcattgttcagcatcaatgttctttatataaagtggcagaggataaaagggggtagtggtataagaaataattaatggacagaaatcattgccacagttgccatttctataactagttatgaaggcaattaattatagctaccttcctccattgcccctccatgttctcactagtctttgcctccaccttggctgcacaatatttttttatctggtaaggtaacccaaacctttattgttatgaaagctgatacyttagtggttttgttaaatttctgcagtcctctatttatctagtattttgagcaagggagtatttaaaggtagcccagtgaacccccagggatcaaaattagtccttcttgcctccattaattaggagaaacttacttctttccaattattgagatcaagccagtaccgaaacttttttctctgtgtcgatttatttaatggcatgggatcccaaatkccaagatggcagtctcagcttctagtttattggaagcatgaatatttggtgggagcattcttcctttgagcaccaggaagaatgcttttgcatggagcttgcttaatgaaagtcattgggaaatcaagtaaaagttctttaagtgggttattaaggcatatgtgatatgagattggtaggctatggcatagatagggccatatattggctttcattttaaagcatatatgatatcctgtaaatcaagactgtagcctctcagggtgttttctatcagaagtcatagtaaccaagacttcacctagccatttcactgttccatcagacttgctgcttgtgggtaatgggggcttgtgctgataccagtgaattttataggcatgaactcattatgacacatcagttgcataaaacatgcccctggttagagatgatgtataggatactatggcagtcgaaaagatattcttcaagtttatgaaccacaatattggtagaagttctatmggcagagaacgtgattcagtgcctataataaatgcctaactcactgaaggcagttcgcttgcctctgtatgatagaaaatttacagtagtccatctgcaaccagatgttttgctaattcttctggaaaatgatgctatacttggaggctcaactttggcctacgcttttgacaatttcagcactcagcagaggcaatatccatattayttttgataggaaaaaccctataccattaagtttattcaaaagccagtgtcaccgtggcctcttggtacttaagtccatggaataagcactaatgtagctgaggcatgaggttgactagtatttatagccctctaattgagagctaacactatggtaaatgccttcctatgcacatttacatgggggatggataactttatacactatcatcctattctggaaaatcatagacaaaactccccaagacatgcctgtcaccattttttcaacctttttcccccaagtcttcaactgattacctggcgaattccattagctcctgcctacaaatcaatgtaaatctaaatctcaaaccatctctagtcccacgtatagtggagtcttagttgtactcctcaaatttctgttcacaagaaggatttcttcttgctattgtctttcaggtccccccttttgtgtgactacaatacagtgtcaaataatggcttaatatataaaataggacaagcagtctagtacaaawattgggaaaagatagaaataggcctgtgaaaagtttgcttctcaatgttattagtgggagtatataatgatttaaaatactcttaattatttaaaaatatatcaatgatattacatatctgtacccataagatttctkaagtatttcaatgtctagatttttccttaagagttagcaccttctcacttaccttggtctcagacccctgtccttaactttccatatttgttattatgtaattttttttcctgaggtttttgagttgaataaaggagagggatgacaacttgtatttagtccactgacttgttcacatgtgctaattttgttacaacttacaagagattaaytgatggttattcagctatgcaatttaatatgggaaattactagcttaataaaatgaagaagggaatatgtcatttctcaatatgttttacgtttttagagtagatgtattttcttttcaatgtatttcaaacatctattttgtagctctgaaggtggctcagatgataggtaaragtcttttgccaatggactcaaaatcagaagatgagcttcaaattaagaaacataaaattgcccaagtggaaacacatagtgtgtaaaatattagcaaataaccttaagttatagtcatattcatattcagaagaataagtttggaatgtggtcataaatagatattaaacaaaccagttttgatttttatatctggacccttacaataataacagcaaacattttcttattaatatttattgagcctttattatcaaatatttaataaataatccacaaagaatttctatgagggaaatactgaaatactactactattactatttaggagatgaggagagtaagacatggagtaactgcctaaagtcacatcattacagatggatttcaaacccggataatctagctctttattctgttgtgatcactccaggaaaactataggaaatcttagaagaatctgactatatttggctttaaagtatataatgagatagtttccttgaacctctcacgcaaactcttctktcgctcttgctatttcttttgctaccatttctctgtggctaccagaaattcttaaattactcttagaacatgcaattgtgttaccttaacaattatggtatgttcctcaatttcagatttttaagtgacaagaaatgttgaaaattgattgaaaaaatgacatttacatgttttcttaattgtttattttttcataaatttcgttttttgtgagtagatatacatctgttcctgattttttttaaacaatgaaacaaatgatttttttaacgtgttggagaaaatctcttactaatatcccaataccatgtttcatgatgaaatgaaatgttcaattaaagttaaaaataagatawaattcctattgctgctaaagtaagtattgttgtaaaatgtataaccaatgtaataaaaaagaaaacctgttattataaatattagaagaaatgatacaacacrattattacttacagattattagattttgacttttaaagcttaaaagaatcaaataaaagaaaatttaatatcagtatgatgttcagcaatgtggctaacacaaatttggcaaaggaaaacaaaaacatttctatatatcccagtagtgaaaagagcacaaaaataataaaataactgataaataaacactargaaatatgtggcctcatatgatggaaacaatgaactttaatgactaaagaaatgttgactacatagggagatatttcatgctcatgagtgaaagactcttaaaagtaatgggtaaataacttacttccaatcaaaataccagtggttgattattgcttttggtgttgatgaaattttataaatatgattctaaaacttggcaacaataacatatttcagtatgaaaataattgattaaagaaagaggataaggcagtggcacttgatctaactgcatattaaaaagctgcattataaaataataaacatgagggaggttccaagagggctgactaggaacagctccagtctacagctcccagcatgagcaacgcagaagatgggtgatttgtgcattttcaactaagttaacgggttcctctcactggggcttgtaggacagtgggtacagcccacagagtgtgagctgaagcagggcggggcactgcctcacccaggaagtgcaagrggttagggaattccctttcctagaaaagggaagccgtgacagatggtacctggaaaattgggacactcccaccctaatactgcgcttttccaatggtcttagcaaacagcacaccaggagattatatcccgyrckggcttggagggtcccacacccacaaagcctcactcactgctagcacggcagtctgagattgaactgcaaggcagcagtgagactgggggaggggcatccaccattgctgaggcttgagtaggtaaacaaagcacctgggaagctagaaatgggtggagcccaccacagctcaaggaggcttgcctgcctctgtaractccacctctgggggcagggtagagctgaacaaaaggcagcagaaacttctgcagacttaaacgtccctgtctgacagctttgaagagagtagtgtttctcccagcatggagtttgagatctgagaatggagaaactgcatcctcaagtgggtccctgatactcaagtagcctaactgggagatacctcccagtaggggccgactgacacctcatacagccagttgcccctctgagatgaagcttccagaggaaggattagggagtaacatttgctgttctgcagcctctgctggtgatacccaggcaaataggatctgcagtggacctcaagcaaactccaacagacctgcagctgagggtcttgactgttagaaggaaaactaacaaacagaaaggacatccacaccaaaaccccatctgtatgtcaccaacatcaaagaccaaagttagataaaaccacaaagatggggagaaaccagagcagaagagctgaaaattctaaaaatcagactgcctcttctcctccaaaggaatgcagatcctcgcaagcagcagaacaaagctggayggagaatgactttgacgagttgagagaagaaggcttcagacgatcagtaataacaaatttctccgagtcaaaggaggatattcaaacccatcacaagaagctaaaaaccttgaaaaaagatgagacgaatggctaactagaataaacagtgtagagaagaccttaaatgacgtgatggagcagaaaaccatggcacgagaactatgtgatacatgcacaagcttcagtagccaattcaatcaagtggaagaaagggtatcagtgatcgaagatcaaatgaatgaaatgaagcgagaagagaaatttagagaaaaaagaataaaaagaaatgaacaaagcctccaagaaatatgggactatgggaaaagaccaaatctacatcagattgttgtacctgaaagtgacagggagaatggaaccaagttggaaaacactcttctggatattatccaggagaatttccccaacctagcaaggcaggccaacattcaaattcaggaaatacagagaacaccacaaagatactcctcgagaagagcaactccaagacacataattgacagattcaccaaagttgaaatgaaggacaaaaagttaagggcagccagagagaaaggtcgcgttacccacaaagggaaggccatcagactaacagcggatctctccgcagaaattctayaagccagaagagagtgggggccaatattcaacattcttaaagaattttcaacccagaatttcatatccagccaaactaagcttcataagtgaaggagaaataaaatcctttacagacaagcaaatgctgagagattttgtcaccaccaggcctgycttacaagagctactgaaggaagcactaaacatggaaaggaacaactggtaccagccactggaaaaacatgccaaattgtaaagaccatcgatgctaggaggaaattgcatcaattaaagagcaaagtaaccagctaacatcataattacaggatcaaattcacacataacagtattaaccttaaatgtaaatgggctaaatgccccagttaaaagacacagactggcaaattggatagagtcaagatccatcagtgtgctgtattcaggagtcccatctcacgtgcagagacacacataggctcaaaataaagggatggaggaagatctgccaagcaaatggaaaacaaagaaaaagcaggagttgcaatcctagtctctgataaaacagactttaaaccaacaaagatcaaaagagacaaagaaggctgttacataaaggtaaagggatcaattcaacaagaagagctaactatcctaaatatatatrcacccaatacaggagcacccagattcataaagcaagtccttagagacctacaaagagacttagactcccacacaataataatgggagactttaacaccccactgtcaacattagacagatcaatgagacagaaagttgacaaggatatccaggaattgaattcagctctgcaccaagtggacctaatagacatctgcagaaatctccccccgaaatcaacagaatacacattcttctcagcagcacatcacacttattcyaaaactaaccacatagttggaagcaaagcactcctcagcaaatgtaaaaaaacagaaattataacaaactgtctctcagaccacagtgcaatcaaaccagaactcaggattaagaaactcactcaaaaccgcccagctacatggaggctaaacaatctgcttctgaatgactactgggtacataacaaaatgaaggcagaaataaagatgttctttgaaaccaatgaaaacaaagatacaacataccagaatctgtgggacacatttaaggcagtgtgtagagggaaacttatagcactaaatgcccacaagagaaaggaggaaagatctaaaattgacactctaacatcacaattaaaagaactagagaagcaagagcaaacacattcaaaagctagyagaaggccaaaaataactaagatcagagcagaactgaaggagatagagacagaaaaaacccttcaaaaaatcaatgaatccaggagctgttttatttgaaaagatcaacaaaattgatagaccactagcaagactaataaagaagaagagaagaatcaaataggtgcaatgaaaaatgataaacgggatatcactaccaatcccacagaaatacaaagtaccatcagagaatactataaacatctctacacaaataaactagaaaatctagaagaaatgaataaattcctgggcacatacacccgcccaagactaaaccaggaagaagttgaatccctgaatagaccagtaacaggctctgaaatggaggcaataattaatagcctaccaaccaaaaaaagtccaggaccagatggattcacaaccgaattctaccagaggtacaaaaaggggctgggaccattmcttctgaaactattccaatgaatagaaaaagagggaatcctccccaactcattttatgaggccagcagcatactgataccaaaacctggcagagacacaacaaaaaaagagaattttagaccaatatccctgatgagcatygatgcaaaaatcctcaatgaaatactggcaatccgaatccagcagcacatcaaaaacttatccaccatgatcaagttggcttcatccctgcgatggaaggctggttcaatatataaaaatcaataaagtaatccatcatataaatagaacctaagacaaaaaccacatgattatctcaatagatatggaaaaggcctttgacaaaattcaacaccccttcttgctaaaatctctcaataaactaggtattgatgggacatatctcaaaataatgagatatttatgacaaacccacagccaatatcatactgaatgggcaaaaactggaagcattccctttgaaaactggcacaagacagggatgccctctttcaccactcctattcaacatagtgttgaaagttctggccagagaaatcaggcaggagaaggaaataaagggtattcaattaggaaaagaggaagtcaaattatccctgtttgcagatgacatgattgtatatttagaaaaccctgtcatttcagcccaaaatctccttaagctgataagcaacttcagcaaaatctcaggatacaaaatcagtgtgcaaaaatcacaaacattcctatacaccaatagcagacagagagccaaatcatgagtgaactcccattcacaattgcttcaaagagaataaaatacctaggaatccaacttacaagggatgtgaaggacctcttcaaggagaactacaaaccactgctcaatgaaataaaagaggactcaaacaaatggaagaacattccatgctcatggataggaagaatcaatattgtgaaaatggccatactgcccaaggtaatttatagattcaatgccatccccatcaagctaccaatgactttcttcacagaattggagaaaactactttaaagttcatatggaaccaaaaaagagcccgcattgccaagtcaatcctaagccaaaagaacaaagctggaggcatcacgctacctgacttccaactatactacaaggctacagtaaccaaaagagcatggtactggtaccaaaacagagatatggaccaatggaatagaatagagccctcagaaataatgccacatatctacaactatctgatctttgacaaacctgagaaaaacaagaaatggggaaaggattccctatttaataaatggtgctgggaaaacyggctagccatatgtagaaagctgaaactggatcccttccttacaccttatacaaaaattaattcaagatggattaaagacttacatggtagacctaataccataaaaaccctagaagaaaacctaggcaatacctttcaggacataggcatgggcaaggacttcatgtctaaaacaccaaaagcaatggcaacaaaaggcaaaattgacaaatgggatctaattaaactgaagagcttctgcacagcaaaagaaactaccatcagagtgaacaggcaacctacagaatgggagaaaatttttgcaacctactcttctgacaaagggctaatatccagaatctacaatgaactcaaacaaatttrcaagaaaaaaacaaacaaccccatcaaaaagtgggcgaaggatatgaacagacacttctcaaaagaagacatttatgcagccaaaaaacacatgaaaaaatgctcatcatcactggccatcagagaaatgcaaatcaaaaccacaatgagataccatctcacaccagttagaatggctatcactaaaaagtcagcaaacaacaggtgctagagaggatgtggagaaataggaacacttttacactgttggtgggactgtaaactagttcaaccattgtggaagtcagtgtggcgattcctcagggatctagaactagaaataccatttgacccagccatcccattactgggtatatacccaaaggattataaatgatactgctataaagacacatgcacatgtatgtttattgtggcactattcacaatagcaaagacttggaaccaacccaaatgtccaacaatgatagactggattaagaaaatgtggcacatatacaccatggaatactatgcagccataaaaaakgatgagttcatgtcctttgtagggacatggatgaagctggaaaccatcattctcagcaaactatcgcaaggataaaaaaccaaacaccgcatattctcactcataggtgggaattgaacaatgagaacacttggacacaggaaggggaacatcacacacyggggcctgttgtggggtgggaggatgagggagggatagcattaggagatgtacytaatgctaaatgatgaattaatgggtgcagcacaccaacatggcacatgtatacatatgtaacaaacctgcacgttgtgcacatgtaccctaaaccttaaagtataataataataaaattwaaaaaaaaagatattacaaaaaaaaagaacacccaaagcaagatggctccggaaggttcaaaataaaaattatcaccccaccctgcacacacaagacaaattgaaatggaaagtaaatagaagatagaagtatgccttcaccttaattctgacttcctcaacatatattttcagctgaactatgagagaagaccccaaattgtgtgctagtcatggtgatattcagtatatttaacaactggtatggcaatatattaataatgtaacgtatgaattcagaaatggaagtaattgtattttattctctaaaagtaactattatggcactcccaatcattgtgagtttcaggctataataaattcactagacaaaacagactttaaactaatactacatttatttggcttcttaacataatacagaagagggaatacagaaagcacagtgtctctctcactggggcacccagcagttaccacataccttgtttcttttgttcttttcacctatattgaccatgtgcagctactaataaaggaataaaagggtatatggtacttgatacagaacaaagagagcactgataccgtggcatcatatggcaataggacacaaaatatcaccactggwtactcctaatcaaatacttaaaaatagcaggtttctgagtgaccatgtctttgataccttaacatacttttgccaaagtaatgagtgtaatgagattagctggtyactcttattatgttagacaaagtggggaaagaaaagtatgagcttggaattcagatttccagcccaagagccacataatgacctaaaactttctatgactaccctgaaagaaaccctggtctgctatagstacaaattgctgaaaactagctcagattgctgaaaaccatatccagagtctcatcctgtgagtggctgaattataatgcaagttgaattcccaattttataggatatcttctgttaaaatgagagcatygattaggatagaacaaaatcctaaaaaytggaatgaggaaatatgggaagatcctaatgaagctagggatgtttacctctaaactctgctgggtcctccttgcctttggaagcagaatttgtagagactgatgtcagcaacatggtggaataggaggttccttacttttctctctcccacagatgcagagaataaacatttccacatggatcaattctctctgagagccagaaagtggttgagcgactcctacacattgggaaactkwaaaaatatccacatattgggtagggaaagcaaagactcatgcacaaactgcatcctaagcacagtgtcatacaattgggaaataatccacaactgataacttcttcctgaggaataaagggtttggaccacatatagtgttccgcaacatttacagtttctgtcagaaggtttggctcttaaatcacctacttcagggagtggagggaacttggaagtcatgagtttgcctggagaagagagaacaaacagatggttttgaatgagtgtgcgagcacttctcatggctagctataggtccccagaatctagtttattcctggaagtggtttgttggcacactcttccagaagctgcctgatatwtatataataaatatatatatactacccagagtyacatagattcaacacagtgcttatcaatattccaattacatttttagagaaacagaaaacaaaaattctataacttctatggaatcacaaaagacatcaagtagccaaaacagtctttaaaaagaaaaacaaagttgcaggcatcacactttctggtttcaaattgtattacaaagtgattttaaaatataaaaatattttaaaaatatttttaaaaaacaactatggtactggtataaaaacagatgtacaaactgatggaagagaatagatgacccagaaataaacccaagcatttatgtcaattaatttttcacaagagcatcaagaagacacaatgggagaatgaccatctctttaacaaatagtgttgggaaatttgaatactcaaacgcaaaataatgaaactggaacttattttataacattcacaaaaataaacttaaaatggattgaagacctaaacataatacctttaactataaaactcttgaagaaaacataagggaaaaacttcttgatattgatcttggcaataatttttagatagctcaccaagagcacaggacacaaaagcaaaagtatacaagtggaagtataataaaactaaaaattttctggacaaaggaaataatgcagaaaatgaaaagagagccaacagattcagagaaaacattcgtgaatcatatattgttaggtaagcagttgatattcaaaatatgtaaggaactcacaaacttaacagcaaaatgacaataataaaagtctgacaaaaatgggcaaagaacctaaatagacattttttgaaatgaaacatacaaatggtcaacaggcatatgaaaagatgctcaacatcactaatcatcagggaaatccaaataaaaaccatgagttatcatcacacacctattaggatggctatcatcaaaaacataacatatgttggtgaggttatggagaaacagaatccttacatactgttcaggtggtgaaaaacaatagggagtttctttaaaaaattaaaaatagaattaccatataacccagcaattccccttctgggtacatacgcaaaggaaatgaaataaatacctagtaaagatatctgcatccccgtgtccatgtaacagtactcacaataaccaagatatgaaaacaacgtgtctgtcagtggatgtatcgataaagaaattgtggtgttctcatacaatggaatagtattcttccttttaaaaaggagatactaccattctcaacaacatgaatgaacctggaagacatgctaagtgaaataagccaggcacataaagaaaaattctacatgatctcacatatatgttgaatctaaaaagtcatattcatagaagtggaaggtaaaatggtggttacctgaggctgagggaagggggacaaatggggagatgttacaaaagggcacaaaatttcagttagataggagtattaatttctggacagctactgtatagcatggtcattatagttaatattctgtatacttgaaaattgctaagagagtagactttattctcactataaaaagggatatgtgaggtgatagatatattaattaacttgatttaatcattctgcaatgtatacatatatcaaaacaccactcataccccataaatatatacaataaaaagacagaagcagccttttcattcctgtcagaagaaattaatcktgctttgtccgaagaaactataattgcctcccttgagatagttaccttgcaaaacacttctgattctccccaagactcacccccaccacyctcttttgcttgtagacctataattagacacaagtcccaccagccccctaaagatgaagtacaaagtatggctcatgagaaggtgcactgcattccaaaaaaactacataatttttctaatttatttagacagaaatcaggggaatatgtttgggaatcaatattgcatgtataggatgaagatgaaaagaacaaagttagatcacaccaaatttattgatatggtataatttatttatcactaagcagagattcatggtttaatgttgcagcatggaggttagaaaggactgtaacggtcagtttggttggctgaaaatggaccaaaagatggcctatactaagtgaagttgaaatgcagaattgccgtggtttactgaaaaggaagggattcgaaggcctaggaaaattggagtgttaatgtggatttatcatttaagatctgctcacccatcttaggagggtccagaggacacacctttcaccacaactgtgagaaatgtgaagacagccccagcattctcaaacagccctgtggttgctcttctctacagctcagaaatcacactggatgttgctgctactgaaatgggaaccttaaatgcaataggaataattgggtctcagaggccaagtggtggcatttaaacatcagaaacaacagtgtcatggttaccataatggaaatcaaagtagaaatcagaatagtctgacttgagatatctatggcattggctagttgataattgtgtttgttgaagtgacacaaatggtcagtctactaaattcttacttaatctgtataagcagaagagttctagatcaagtggacaaagtctaatttaaataataaaagcacagtcatggcctctcaatcaattcccagacttgatcaagtttacagacccaggaccccttgaaggaagggtaccttgaggaaggacctagkatactgccmaaaatttatacctttaatttttctcccagccttcctcaaagggacctatggcctttttgctgggttactacrcaacatataaaaggaaataataagattttttagggattaatggacagtgcctctgaactgacastaattccaaaaggccaaaaatgtcatgatggtccactggaaaggaaamtatggagggcaagtgatcaatgggactttagcacagatctgtctcacagtggatccagtggaagctgaactcatcctcttgtcatttccccagttygtgaatgtataatttaataaatatactcatcaactggcagaattttcacattggtttcctgacctgtggagtaaggaccattatggtagaagaggccaattagaagctactagaactgattctacctaggaaaattttaaaccaaaagcaatattacattmtcagagagatttggaagattagtgacttcatcaaggacttgaaaaatgtagaggttgtgatttcaaccacatccttcaactcacctatttgtcctgttcagaaaacaggtggatctcagaaaataacagtggattatcataaatttaaatagatggtgattctaattgtagatrctgtactaaataatgatttcattgcttgagcaaattaacgtatcccctggtaacwggcatgcaaatattgatctggaagattgctttattttctgctttcctatagtgaagaagcagttttcttttagctggaaagtstagcaatgcatcttcactgtcctaccttaagggtatatsagttctcccactctctatcataatttagtttgcaaggaacttgaaagcctttctacaagatatsatacttgtttattatattgatgatatgctgactggacytcttgagtaaaaagtactctagatatattagtaagatatttgcatgtcagaaggtgggacatgaatccaaaaaatttaggggccttctacatcatgaaatgtttagaagtctagtggaatgggacgtgtcaagatattccttctgaaataaggaaaaattgttgcatctggcctctcctactacccaaaaaaacaggtataatgcctatttgacttctctgtatattaaggcaacgtattcctcatttgggcatgctactgtggctcactcacttactgagtgacctggaaatctgttagttttgagtggaaccaagaacaagagaaggttctgcaacaggtacagggtgctcttccacttgggaaacatgatcttacagatccaatggtgctggaagtgacagtagcagatagggatgctcttcagagccttcggcaagttcctataggtgaatcacagtgcaggccccttggagcaaagccatctcattctctgcaaataattatcctttttgtaaaacagttcttggcctgctattgggtgttagtagaaactgaacacttaaccatggaccaccaagttgccaagcaatctgagctgcccatcatgaactggatgttgtctgaccctccaaatagtttggcatgcaggtagtactccatcatcaaatagaagtggtatacatgagacagtgctcaggcaggccctgaaagcacaagtaaaatatatgatgtggccaaatacctatggtctccacttctgctacattaccttctctctcccagcctactctcttcagtacccctttcagcaatatgaggttaaaaccaggtactgtgattactcgcttgatttctggttcttgtgatggtgctttttccatattgttagttgttaaaatttgatgtttctgtaagggggatgaatagtgtagacttccattcagccatcttgctccaattctgccaggctcttttcaacaaccagatcttgcaggaactaatactaatagagtaacaactcactcattaytgtggagagggcaccaagccattcwtgagaaattttatcccatagccaacacacctcccactgggcacgtgtccaatattggtgatcaagtgtcaacatgagatttggaggggacacatatgcacaccatattacttttccattaaatttttgtttggccactgttctggggattgtaagagatatgwtatattcatactacgttttgccttttacctaatttttatacactggtcatgttaaatgtgattctttgtccaaatgagatatatttcagggagccaagtggtataaaatgtgtttttctaaactattgattgtattttctgctttggcttcttttagaagcaattaaaaaaccaaaatagaacaagtatctattcctttaaaaatttatttgtgaagtggaggcagagcaagatggctgaaaagaatgctccaggagtcatcctcctctcctccctgcaggaacatcaaattgaacaactatccatacaagagagcactttcatggaaccaaaaaatcagctgtctgaagaaggatgggtacgagcaagtccagactgcaaagacgcataaagacctaaacttttcaatgcccagacattaacaaatgtccacaggcatcaagaatatataggaaaatataacctcaccaaactgattaaataaggcatcagtaaccagttctggcaaaatggagatatgtgacctcttagagaatttaaaatagctgttatgaggaagctgaatgatcttcagataacatagagaaggaatccagaaatatatcagagaaatttaacaaagagattgaagtaataactttaaaaacacccagaaattctggagttgagaaattcaatggacatatacaaaaatgcatcagagtatctcaacagcagaagtgatcaagtagaagaaaggattactgactcaaagacaggcttttgaaaatacagagaagaaaaaaatggaaaagaatgcagtatgcttacaagattgtatggctatttaaataacattatttaaatattacaagtatgtatttagtacttgtatttaacattacaagtatggctatttaaataacattaattcctttctttcatcagtattctgtatttttccttgtagtggtctttctcctccttggttaaatatattcctaagtattttatttgtagctattgtaagtgggattgccttcttgatttaattctcagcttgttaaggtatacagaaatgccactaatttttgtacattgattttgtatcctgaaactttactgaatttgtttatgaaatctaagagatttggagaagtctttaggtttttctagatattagatcatattatcagtgaacaaagatgatttgacttcctattgtcctattttgatgccttttatttttttctcttgcctcacagctctgggtaggacttccagtattacgttgaataggagtggtgaaagtgggcatccttgttctacttcttagaagattgcttttaacttttgtgtgtttagtacgatgttggctgtgggtttgtcatatatggcctttattattttgaggtatgtttcttctatacctagttgactgaagatttttatcctgaagaaatgctgaactttatcaaatgccatttttaaatatgtcragattatcaaaagtgttttgtttttaattctctttttgtgttgartmacatttatttatttgcatatattgaaccatccttgaatccctggaataaaccccacttaatcatggtatattatatttttgatgtgctattggatttggtttgctagcattttgttgaagattttttcaactataatcagcagaggattttggtctgtagtttttttgtgtgtccttgttcagctttggtaacagggtggcttcgtataatgaattgtagaggattctctctttttataatttttggaacagtttcaacaggattggtaccagttcctctttgcacatttggtagaatttggctgtcaatccatccagttctgagctttttttttattgggagatttttattactagttcaatcttactactccttattggtctgttcaggatttctgtttcttcctggttcagtcgtggaaggttgtatgtttacagaaatttatccatttcctctaggtttttctctttgtgagcatatagttattcatgtactctgataatctttttaaatttctgtggtatcagttcttatgtcycctttttcatatctgattatgtttacttgkatttttttttggttagtctagatagtgatttatcaatttttaaaaatcttttcagggaactgagttttcatttggttgatccattgtattattattattatttctttttgaaattatactttaagttctgggatacatgtgcagaacgtgcagttttgttacgtaggtatacatgtgccatggtggtttgctgcacccatcaacccgtcatctacattaggtatttctgctaatgctatccatccccaagccccccacccctcaacaggccccagtgtgtgatgttcccctcccagtgtccatgttttctcattgttcaactcccacttatgagtgagaacatgcagygtttggttttctgctcctgtgttagtttgctgagaatggtggtttccagctttatccatgtccctgcaaaagacatgaactcatcctttttatgtctgcatagtattccatggtgtatatgtgccacattttctttatccagtctatcattgatgggcatttgggtttgttcctagtctttgctattgtgaatagtgccgcaataaacatacatgtgcatgtgtctttayagtagaatgatttataatcctttaggtatatacccagtaatgggattgctggatcaaatggtatttctggttctagatccttgaggagtcaccacactgtcttccacaatggttgaactaatttacattgtattatttttaagtctcrdtttcatttagttctgctcttatctttgttatttcttttcttctgctagttttgggtttggtttgttcttgtgtttctagatccttcaggagcaacgttgggttgttaacttgtgatatttatatttatttgatgtaggcatttaatgttaacttctctcttagcactgcttttgctgtattcaagaggttttggtatattgtatctccattttcacttgtttcagaaaatttttaaatttccatcttaatttcgttattgacccaaatatcattcaggagcatgttgtttaatttccatgtatttgtatagtttcaagaattcctcttggaattgatttctagttttattctttgtggtctgagaagacacttgataagattttgattttataaaatttatcaggatttgttttgtggcctattatatggtctgtcttggagaatgttccatgtgctgatgagaagaatgtttattctgaagatcttgaatagaatttactatagatacccattaagtttatttgttctagcatgtcatttaagtccrttgtttctctgttgactttttgtctcaaagatcttttgagtgttatcagtggtctattgaagtcctactattattgttttgctatcttatgatgctaggagctccagtgtttggtacatataaatttaggattgtaatatctgcttgttgaattgatctttttatcattatgtactgaccatcattgtctttttttctttttactgttgttgctttgaagtattttgtctgatacaagaatagctactcttgctcacttttggtttccatttgtgtacaatacctttttaattcccttttccttgagtttatatgaatccttctatgttaggtaagtctattgaagacagcagagatttgggttgtgattttttatccattctgaatattttaagtggatcatttaggccatttacrttcaatgttaatattaagatgtgaggtactgttttcttcatcatgttaattgttacctgattttttaaattgtgtttttattttataggcctgtgagttttcagctttcaagaaattatatttcagtgcatattgtgcttttgtttcaaggtttagaattcctttaatatttcttatagggctgatttggtagtgacaaatttcctcagcatttgtctgaaaatgactttatttcttcttcatttataaaacttagttttgcaggatacaaaactcttggctgacagttattctgtttaaggagattgaaacttagttttgcaggatacagtattcttggttgacagttattctgtttaaggatgttgaagatagtttcccaatcccttctggctaatatggtttctgctgagaaatctgctgttagtctgatagtttttttctttttaggttacctcatgcttttgtcttactgcttttagatttcttctaactgcccagtgaagttgccacattccaggctgctgatggggcatgtctgcaaggtgatatgacctgtcctcaagttttccagtagtgggtaccagcaccagctttaatgggggtggcaggagagtcacatagactctgtgaaagtacttggttattgatagcctcagtgtgttggcttttttgaacaccagttaagagtagtaatgaactggtcccacaggcagactaaggacctcctggttagcagagtggtgcaggcagtagtgatagctgagatcatgcagctrttttcttcttcttgggtgcagtgctattctgccaggagatactgtagtggattgtcttggctggcctccagccagatggcagtgcttccaactgtgggagtagtagtggaatttttgcttgccttatgttgtccagggtggggtactctgatttcataggcaatgggcagggccatgtagctttcaagagattctatcctttgtgttaagccaggatgtgtggcagggcaaagccaggtgggaactgggtctggtgggtttgtactctgagtctccctgtgcagggcaagcagcaacmcctgtgggtgttggggaatgggagtggtctcagaccactgggttgatgttccacaggggagcattgctgcctctgctatgcagaagagtttgtgcagggagtggggagtagcaggcagtggtaagccccacatagttcccactcatttggtgaggcagatccactcccacagtgttccactgacagcagaaagctgagtcccagtcagcctgtaatcagaactcacagctactgggagtcataaactttccccagggaaatagcaaccatggcttttaggccacactcctccctgttcactgcaaagctaggcacccagctcttgaatccacagctacaacactcaggactcctgtactcaaagtctgcttttcactctccccaaccatggccctagccaagagagtttgtgttatattgtgaaaccgtgttgggagcttctttcaacctgtgaccaacacctgaactttttgactgtcgtctgcagggtcccctgttaagatcagtaaggaatggctgcccttggtccacactggaatctgggagtgcatgcaaggatcatgctgctcctacttttatattccattatcctccccaagtcagttcctgcactgggtgagattagggccttccctggtgatatggactttcaggatccctggtgggggtgtgtatgccagaggcaaccttccgacctctcacattctggggactgggagcccttcacctgactcgcagtgtaggctgcagccttttgcttctttcaaagggtccatagattcctttggttttcctgttcaggttcggcatcacttcttgaaaaaaagttcacagtgtcaatctcattatcccatcttctcctgatctccagggtttctgctgagaaatcaactgaaagttgtattaagacttcattaattttgatatgtttcttttctcttgctacttttaatattctgtccttaacttgttaatttgattatgatgtgccttggtgattacattttggcttgaatttgactggtgacctgagcttcctatacctggatgctgttttctgtcaccatgtttgggataatttcagttactatttccttaaatatgcttgctaggcctttttctctcttctatcatttagcaactcctattatgctgaggttagcttatttgatgttgtctcgtaattctgataggccttcttcattgttttttattcacttttctttttgctcctctaattgtataatttcatatgttctgtctttgagttcactgattttttttcctgtttaagtctgctgttaagctttttttgaattttttattcaatttacatattctttattttgagagtttctctttggtcttaaaaaattgtttctatttcttggttaaatttctaattttgttcctgaattgttttccaaatttcatttagttttctatctgtatttttttgtaattcctttaacttttaaaagtagattattctgaattatcagccattttatagatcttcaatttttctgagtccattactgaaggtttttttgctcttttttggtggtgtcatattttcctgagtttttacaagtcttgatttttatgttgatgcctgcacattgagcttttgcaggtgtttttgatagtgttaggtctttattgcttaatactagaacttaattactggtctgctcttgcttctgagtctggggaagacttatagtgagaactggaaattaaatggtgcactggaaataaatcactgccctgttgttttcaagtctgtggaagacttatagtgagccctgtaacttaaacactgctctagaactatgttgctgccctgccattgttcttcaatcaattacaaaaactattaatataaatagtttttatttttaagtgagcaccagaacttaattgccaaacatgttgatgtttccagatcaagaggaggcttcacatgaatatgtggattttgtgggaaatccagccaggaatttggtccttcctgtggattgtgtcttcttcagcactatgggccatccactttactcaatgtggtatcttcactgattggagcacagaacacctacaaaaattcacatgccagtcgatgcaattagaaccttcccctttttttttttttaaccacagttcatcccaggtggttcagtcctccctgcactttaaatgttccatgggacaggactggagtgagcttcctgtgaagattctataaccagctgggagactgaacattcacctccaatttcctcctcccacactgggaaccatgtgtctagggaaattctgtgagtggtgttagccctgcttgcaggagggggtgacacccttaaaagtgattattcctcttaccagcatcagattttcttgattctgtgtgtccaggaagtttctccactactcccttgagttttggtgaattcaggatggtattcttgtctttgaataatttctagttgtattttttttctaggggaagtgatgctgggagatcttctagtctgccatcttgcttacaycactctgtgattttcctggttatttatcttttaggtttatttgtgattgttgcagtttctgtgctggcttctcatgctggttggattattattaatttttgaatgggaacttctaaataataaagtggttagtggaatgtatatgtgtggtagattgatggaggatgagattttgtgggaaatggatagattctgtccaggtttggtatcatattattaaatcttttgttgttgttgttaaagaagctattgcaactcacatatgtgtcttttgtctgttgcagttttgcgctatcttcctccctctgtttttagccatttttactgtcagcattcctaacttctattaggaatctctgtctcaagcaatagaaatggtccatcagtgtggtttcttcttcaactctcctttcttaggaccctaaatatgattactgctataaaggcatattaggcatgcctttcagtgatgacactttggaggaaaacctgtgtactgttataggttcaagacagcatgactattatctcttagtattctccaaagccttgtgccagatttcatgacagtacttttagtatcagagggctatggaaattttcttacttwttttcttttgtttctgggagttttataggaaaagtgagggcaaaggggagctttattctgccatcttcttaaggatataaaaatagaaaataaccagagactttgcaagattactgtatgactttctgacgttgagtactttgaagattactaagagcacargtttaaatacctatagtaactatctgtttttagaaaaaaaccgtaatgctctagatctccaaagtgatttggtgaggaataaacctatatactatataatccaaaattrcttttccatggtcctagatcatagagagatacattggtgggtaaattatcatattttcgaaggaaatataccagtgattggcccttaaattgcacccatatattagaattaatccctttctaaagacagataatttttttgtagtactagctgaagatttgtccttcacacatgaatatatgtcttaaactatctgcaaatattttgaaattttgaaaattatcatgctgctataaagacacatgcacacgtatatttattgcggcattattcacaatagcaaagacttggaaccaacccaaatgtccaacaatgatagactggattaagaaaatgtggcacatatacaccatggaatactatgcagccataaaaaatgatgagttcatgtcctttgtagggacatggatgaaattggaaatcatcattctcagtaaactatcgcaagaacaaaaaaccaaacaccgcatattctcactcataggtgggaattgaacaatgagatcacatggacacaggaaggggaatatcacactctgnnnnnnnnnnnnnnnnnnnnggactgtagactagttcaaccattgtggaagtcagtgtggcgattcctcagggatctaaaactagaaatgccatttgacccagccatgccattactgggtatatacccaaaggattataaatcatgctgctataaagacacatgtacacgaatgtttattgtggcattattcacaatagcaaagacttggaaccaacccaaatgtccaacaatgatagactggattaagaaaatgtggcacatatacaccatggaatactatgcagccataaaaaatgatgagttcatgtcctttgtagggacatggatgaaattggaaatcatcattctcagtaaactatcgcaagaacaaaaaaccaaacaccgcatattctcactcataggtgggaattgaacaatgagatcacatggacacaggaaggggaatatcacactctggggactgtggtggggtgggggaatgggggagggatagcattgggagatatacctaatgctagatgacgagttagtgggtgcagcgcaccagcatggcacatgtatacatatgtaactaacctgcacaatgtgcacatgtaccctaaamcttraagtataawaaaaaaaaaatctagatttctagcttctttggggaatttagarcacctgagaatatctgtcatgcatttgtagtggtaagaataatggttttttttttaatagaacaggtacttctctattttaccttgctctttatgctatccctatcatcaccaggctcattacactcatataacatactcagtctcagtagacatttgggtttattagttggagaacagattttggaaactagaagaatcaattcattccaggtttttatacttaataactatgtggccttccacaatatgcataatatcaataagttctatttccctcatctgttaaatggagataaaatacttattttcttcaattattataatgattaaatgagataatacttcaaaagtacttagtataatcgatggcatatagtagctattttgtatgaatttgaaattatttaacatatttgtattcaattgaataattagtatgttaaattgcaaagtaaataaggttagatgattagatgattgggaggtaaaatatctgtaattagtactatgtactatacttctgcctcaaacaaaatgttagggtttttttgttgttttttactatgtgtactttttttttactttttcagyttctatcttagaagcagctggtacacatgcagattagttacaaagtctgttgtgtgatgctgaggtctgtggtatgactgaatgcatcacccagatagcataatacccaagaggtcattttacccyttcttcctcccccttttagtattccacagtctctatgtctgtgtttacccagtgtttatctcccacatataagggaagagatgcagtatttggttttctgtttctgcattagctccctcaggataatggcctccagctgcatccatgttgctgcaaaagacatgattttgttcttttttattgctgtttattattccgtggtatatatgtaccacattttctatatccagttcaccattgatgagcacctacgttgattctgtgtctttgctattatgaatggcactgtggtgaacgtatggatgcatgtgtccatttggtagaacaatttattttcctttgggtatatagccaggaatgggattgccgagtcaaatggtatttcaactcttggttctttgagaaatctccaaactgctctccaagtgtttagactaatttacatycccaccaacagtgtgtacatgtccccttttctccacagacttgccatctgtttttatcttttattttttaataatagctattctgggccgggtgtggtggctcatgcctgtcatcccagcactttgggaggccaaggtgggtggatcacttgagatcaagagttcgaaaccaaccaggccaacatggtgaaaccccatctctactaaaaatacaaaaaaaaaaaattagccaggtatggtggcatgcgcctgtaatcccagctactctggaggctgaaacaggagaatcgcttgaacctgggaggcggaggttgcagtaagccaagatcgtgccactgcactccagcctgggtgacagagtgagactccgtctcaaaataataataatagccattctgactggtgtgagatggtatctcattgtggttttaaattgcatttctctgatgattagtgatgtggagcattttttcatatgtttcttggccacttgtatgtcttcttttgagacgattctgtttatgtcctttgccccactttataatggagttatttgttttttgcttgttggtttaagttccttatagattctagacctttgttagatgcatagttcatggatatttttctcttattctataggttgtctgtctaatccgttgatagttccttttgctgtgcaaaatatttttagtttaactagatcccatttgtcaatttctgtttttattgcaattgcttttgaagagatagccatacattctttgccaaggctgatattgagaagggtatttactaggctttcttctaggattgttatagtgtgaagtcttacatttaaatctttaatccttcttgactaaatttttgtatatgataaaaagcaggggtccaatttcattcttctgcatatggcttgccagctatcccagcatcatttattgagtaaggagtccctattgcttattttttctgggattctcaaagatcatatgattgtaggtatgtggctttatttctgggttctctactctgttcagttggtctatgtgtctgtttttgtaccagtacaatgctgttttggttactgtagccctgtaatatagtttcaagtcaggtagtatgatgccttcaactttgttctttttgcttaggattgctttggctattaggcttctttttggattaatatgaattttagaatagcttctcctaattctgttaaaaatgacattggtagtttgataggactccactgaacctgtaaattgctttgggcagtatggccatttaatgacatagattctctcaatccgttagcatggactgttttttcatttatttgtgccatttctgatttcttttgcagtgtttttgcagttctcgttgtagagatctttcaccttcttggttacatgcattgctaggtgtttcacaaaatgttagttttttaaatcaactactttgacaatctgttattcttacagttaaaaatgaagcagcctcagaacttccagatacagcagaaaatcttccagcaatgtacccgtcaattagcgacctaataattcaatttgatttaaacaaagtggtcggtaagtatagatttatgtttggatacagtagaacacaatctaagaattaaaatatttcaactgtatagttctgttaaaaaacaggaaattcaaagaaggagtagtctttctcaacttaagttcattctactcaatcaatctacatgtcaattaagtgtatctttaaatttcgtgtttttactccatcagacaacattaattttgtaatgtttcatatatttccctttacctactcatgaaacaaaatacatataggctttccactactgtgaattttcataagataaactagatgatatgtgaacagttccttgaggacatagttgtaatttcttataccatcttttgtataacaagatggaaagacaaatggaactagtaccatataggcaatatggctgccttgtgatgtgcttattattaaatttgcaatgtcaaatggtgacaaagatcatcagaatgtggaagaagctagaatatgtgtgaaaggtagtggtagtgtggttaagtgactattttctaataagataaaaccaaagtgttctgtggtagcttttgaatcactccttaaaggcatcaggcaaacacgaacaaaatggcaaactgaaaacatccaaactctcattccctgacagaaacgttgaaaaaagttagaataatctatcagaaccaactttgtgagagcttcagaaaatagtcacagatttatagaaaccaagagaatacctaattaggaaaagtctctcttcaaatggtaagaaagttttgtgaaactgtcaaaggagtgctccagcaaaagccagtatgaaaagaatatgaaaaactcctggcaatcacagcattactagtaggcccgccctgttaaaacttctaggctgggcgcagtggctcacgcctgtaatccaagcacttcgggaggctaggcaggtagatcacgaggtcaggaaatcaagaccatcctggccaacatggtgaaaccccgtctctacaaaaatacaaaaaattagacaggcatggtggtacacgcctatagtcccagctactcaggaggctgaggcaggggaatcactgaaaccgaagatgaggaggtttcagtgagccgagatcacgccactgcactccagcctggctacagagcaagacaccgtcaaacaaacaaaaaaacccagaattctccaggttaaaatgaaggaatgctagacagtaacttcaaccatatgaggaaataaagatctctggcaaagataagtccatgggcaaatataaaagccattattattataattttggtttgtaactctgctctttgtatstataatactcaaaagacaaatatataaaaataattacaaatttatgttatggacacacaatatataaagacatgatttgtgatgttaatgacagggataagttagagggtgctgcataagagtatactttttggatggattgaagttgagttggtgtcaattcaaattaaactgttataactttaagatgttatatattatttgcttggtaatcacaaagaaaatatctatggtgcatgcatgaagaaaagagaaaggaatcaaaayatgtgcctacaaaaagtcaactaaacacaaaaaagatggaattagaggaaatgaagagcaaaaaggtataacatacaaaaaacaggtatcaaaatggcagaaatgtctttccttatcagtaattattttaaatgcaaattgataaaactcttcacacaaaaggcagaaatttgcagaatgaattttttttaaaaaatkatcaactacatgctgcttacaaaagatgcactttagatgaacaaaaatgacaaaactttagctagattgactagagaaaaataataaagttgctaaaaatcaaaacagaaagtgggaacattacaaccaattttaaaagaataamaagcattgcaagagaacactgtgaacaactgtacaccaaaaaaactggataacctagaggaaatgaacaaattgttagaaatatacaatctaccagaactgacttatgaagaaatatctaaatagacccctaattaagatgaatactgaatcctaattaaaattttccaacaaagaaaaatccaggaccagacgactttatgggtgaatattaccaaatatttaaagaagaattaaaactaatccttctcaaattctttcaaaaaactgaagaggagggaatacttcctaactcattctatgaggacagcattatcttgatactaaagtcagaaatgctataagaaagcaaatgacagaccaatatcccttatgaataatgatgcaaaatcctcaacaaaatattagtaaataaaatttagtagcatacaaaaaattatacatcatgaatttatgagttttatttctcaaatgcaaggataattcaatagacaaaagtcaatcagtgtgatataccatgttagcataattaacaacaacaaaaaaccccactggatcctctcagttgatgcagacaaagcatttgaccaaattcaataccctttcacgtaaaaacagtaaacaagctaggaatagagcacttccacatcatgataaaaagccaaatacaaaaaatccacaactaacatcatattcaatggtaaaagattaaaaatgttttccttaagatcaggagcaatacaaggacacctgtttagataacttctagtcaaaatagtattcaaaatctatctggaccagttagaatagaagacaggtagatgatagatagttaacatccaaactggaaaggaagaaataaaattatctgccaagaggtgacattatcttatatgaagaaaaccctaatgattccacaaaacaactgttagatataataaacaaatttagcaaagttgcaggatacaaaatgaacacacaaaaattggttacattatctatgcactggtagtgagctatctgaaaagaattaagaaaacagttccatttacaatggcatcaaaagaacaaaatatttaggaataaatttaaccaagaaggcaaaaggcaaaagacttgtatactgaaaactaccatataatgctgaaaacaattaagaagacataaataaatggaaagacatctcatgttcatggattagaagataacttgttttttttttktttttttggtttttttttgagattgagtcttcctctgtcacccaggctgtgcagtggcgcaatctcagctcactgcaacctccgcctcccaggttcaaacaattctcctgactcagtctccctagtagctggaattacgggcacatgccaccatgctccgctaatttttgtatgtttagaagaaacggggtttcactatgttgtccagactggtctcaaactcctgacctcaagtgattcgtctgccttggcctcccaaagtgctgggattacaggcatgagccaccgtgcccggccagaagacaatattattaagatgacagtaatacccaaagtgatctacaccttcaatgcaatctgcagttcttatcaaattcccataatacttatgaggttattgttgcaaaatagaaaaccctatcttaaaaatcataggaatacaagggaccacacatatccaaaacmattttgaaaaaggagaataaatttggaagtctcacacttcctgatttcaaaacttactataaagctacagtaatcaaaagagtgatatactggcataaagcagacatacagaccaatggggatagaattgagagactggaattaaatccttgctatgtggtcaaataactttcagcaaagttgccaataccatttactggtaagaaggcagtctttccacaaacggtgctttcacaaaaagacagtcttttccacaaaccagatagtcacgtcaaaagaatgaagttgaatccttaccttacattatatacaaaaattaaaatggaccaaatacctacatataagacctaaaaccattaaaactctgagagaaaaacagggaaaagccttcatgacattgaagttagcaattattttttgggtatgactcccaaagcacagacaacaaaagaaaaaaataggtaagttggacttcatcaaaattaaaaacttttgtcatcaaaagacagtgtcagagagtgaaagcacaacccagagagtgggagaaaatatttgcaaattacatatctgataagggcttaatgtctagaatatacaaggaagttttataaattaacaaaaaactcaactccatttaaaaatgggcaagtgatttgaatagacatttttccagaggagatatacaagttgctaatttgccctaaaaaagatacttagcatcattggccattagagaaatgcaaaccaaaatcacaataagatatcacttcatagccattaagatgactctcattataaaaacagaaaataaggaatgttggcaaggatgtagacaaataggaacttttgtaaattgttcatgggaatgtaaaactrtcactgctgtggaaaacagtttggttgtttatcaaaaagttaaacatggagttctcatatgatctatttacttcaaggtgtaggtgtagacccaaaagaattgaaaacaggtacttgtgcaccagcatttataacagcattatttacattagccaaaagttgtaaacaacctaatctccatcagcaaatgaatgcagaaacaaaatatggtatatacatacaatgaaatattatttcactttaaaaatgaatcatgttctgaaacatgctacaaagtgaatgaatcttgaaatattatggtaagtgaaataaggcaaatacaaaagataaatattgtatcttattgtaccacttatatgaggtacctacaataagtagacagaaagtagatcaaaggttcccaaggcctggcaatagaggctaatagggagttattgcttaatgggtagagtttgagtttagaaaggtgaagactttctgaagatagatggtggtgatggttgcacaacaaagtgattgtggttaatacaattaatcatacatttaaaatggttaaaataataaattttatattatgtatatttaccacaataaaaatgaaggtattctgataaaaatacaaaaattacaaaagaaattttattttattttattttattttttaagttccagggtacatgtgcaggatgtgcagatttgttacataggtaaatgtgtgttatggtggtttgctgaacctatcaacccatcacccaggtattaagcctggcatgcattagctctttttcctaatgctgtascgcacaccccacggccctctgacagaccccagtgtgtgttgttcccctccctgtgtccatgtgttctcattggtcagctcccactcmcaagtgggaatatgcggtgtttggttttctgttcctgcgttagtttggtraggataatggcttccagcttcatccatgtccctacaaaggacatgatctcatttctttttataagccaaagttcttttttttgagacgaagtctcgctctgtcgccaggctggagtgcagtggcgcaatctcggctcactgcaaccttcgcctcccggattcaagcgattctcctgcctcagcctccagagtagctgggactacagacacgtgctgggcgccgtgactcgtgcctgtaatcccagcactttgggaggctgaggagagtagatctcccgaggtcaggagttcgagaccagcctggcccacatggtgaagccccatctctaccaaaagtacaaaatttagctgggcttggtggcacacgcgtgtggtcccagttactcaggaggctgaggcaagaggcttgcttgaacctgggaggcagaggttgcagtgagcagagattgcgccactgcactccagcctgggagagagagcaagactctgtcttaaaaagcaaaacaaaacaaaaaaaagaaattttcaaaatgtatgaagaactgtgcagaatttatggatctacaaaaattgaacatctctacactattttcatctctatcaaatattgcagaaaaaaactagtttatgaaggacataaatccttctgtgctagacatattaaacagatacttatagaacacttcactcaataaatggagtacacatgcaaaaattgactacatattaggccacacattaagtttcaatgaataccaaaaaatgatttccacaaatcacattttctatgatgcaataaaacagaactaaatgataaaaaagataaaaattcttctgcacaatttaaaatcctatttataagctgaagaaaacataatggacactaggatatatttgagactaaattaaatttaaaacactacacataagcacttacaagaggtccttaaataggtttttataaggaaatttaaaggttgcatatgatagaaaataaggaaaactaaaaagttaggattataagttcatagcaagaaggtagaaaaagaagatgataaaatctgaaaactaaaagtagaaaaaagattaaaataagaraattatttttttaaagtagaggacatagaaataatatcagtggaataaaaagttgatagtttacaaagacttatgcatggaaatataatatatttagcaaataaagtagaaggcattaattgggaggatttaggaaaggtggcatttgtagtggcatagttctaaattttcttcatctctctttatgagtcatagtttggtctcttaccataatcccatatttccccaagtttttgttcattcttttttattcttgtttctttatttttgtctgagttgtttcagggagctagtcttcgagctctgagattccttcctcagcttgatatatagtgctgttaatacytgtgattaacaagacattaaactttcaastcagccttatttctgggctcaatgcaagcctagctaagtgctgaagggagactcttaggatagaattaactgcaaatactgtgaaaggtgtttgatgtgtggggggagttcttttaatttaaaaagaaatgctgacattggaagaaatatctataaaaacagtaactgaacatgagctttaagtaacagatttcagtggtaacacacagaataaagtaaattttttgtaaaaatgatttgcgaatacctaaacaaatgtctgactgtagctttcagcaatcaaaaagagcaatacctggggaagggagaaaagataatctctagcatcaccccttttaatatccaaatgaacaactttcaatagaaaaaaattacagggcataataaaaagaagtaagtatggacaaatcaaaggagcaaaataaattgagagaaaccattcctgaggaagctcatacaatgtacttactagagagactttaaaaccactatataaggccagggtatggtggcttatgcctgtgatcctagcactttgggaggccaaggcgggtggatcaattgaggccaggagttcgagaccagcctggccaacatggcgaaacttcatctctactaaaaatacaaaaattagccgggcatggtaatgcacacctgtaatcccagctattagggaggctgaagcaggagaattgtttcaacccagggggcagagattacagtgagccaagatcatgctactgcattccagcctgggcaacagagtgagactccatcaaaacaaacaaacaaaaaaagaaaccaccyactatattaaatatcctcaaagagctaaaggaaaacatggacaaagaacaaaaggaaatcagaaaaactttgtaaaaaaagtgaaataaagatgataaaaaataaacaatatccttagttgaaaagtataatagttgaaataaataatttatagagagattcaacagcagatctgagcagacgaaagaagaatcagtgaatctgaacataggacaattgtgattattaagtctgagaagcaggaataaaaacgaaggaaagggaagggacctgtgggacaccatcgagtggatcagcaacacattatgtgggtatcagaaggagaaaagagaaaagagcagaaggaatttgtgaagaaatgatgggtaaaaaatatcccaaatttgatgaaagacatgcatctacacatttaaaactaaccaaactccaagtagrataaactcagagatccacaccgagacacattgtaattctgtcaaaaaattctgtcaaaatgcaaagacagccctatggaatgacatcagcaagatggcagaataagatttcctagtgcttttgcccttatagaaacatcagtttgaacagctatctacacatgaaaataccttyacaacagctaaagaaaccagatgagagattacagcacttgaatgtaacgcagatgtaagaaagatgcattgaataggggaggaaggacagttttacataatctgcatcactccctccttaacttcgggcagcacagtgtggagagagatatccttaatgtgaggaaagaaaggttaaatgagcactggacttccttggaccccaacattcagcccactggrgtaaaatccaatgccagccaggcccctacagccacaaactctaggccagtatctgcagacccagcctccaagcccaccccaatgccaggccagctcctgtggctctaggcttcttcaggccagctctgcaaatgcagtctccagttttgtcccaccgtcagaccagctctagcagtcccagctccaggctggccccagaggccccaggcttcaggctcgcccctattccaggacatctccacagactcaagcttcaggcctgcccctgaaggcctctccaggctgaccctacagatggagccttcaggcccattctggcaccagtccagctcccacagattcagcctctagtcttgctccacttccaggcaagctccagtgatcccagccttcaggcccacctcagcactaggctggaatttgcagccctagagtccaggccaccacctgcaaaccaacactgcctcaacactgagcttgccccatagactcagtcttctgggctgccccagcaccaagctggacccagagcttcacaccccagaccgatcccagagccaggtcagccccagtagctccaggccctaagctggcccctgaaaactcaggcttcacatgtacctgaggctccaagcctgccccattgtcaggtcagccctagcagctccaggcttcagactgccaccagcactataccagcctctgtgaccctatcctccagaccagtagcaatcaactaagctttattcctgagttcagaccccaggccatcaaatccagcctcagattccaggcctatttatgtgtatccaacctctaggcctgcctcagtaccaggccagtctgcagatactggtacaggcctgcccagtgtcaggtaattttctgtggccccagacttgcctctgcaaactcaggttcaaggtccaagtttgcttcagatttacccactgtcaggctggctctcacaactccaggctttaggccagcacccatggacccagcctctagctccaccctagtgccaggtcagcaccaacaaaccccagcaccaatccatctccatggagcaaagttccaggctcatccaagcacctagctgtccctacagactcaggctaaaggtccacccctataccaagtcattctccatggacccagacatcagaccagttcccacaaataacaagattcaggtctgcccctgtgggcccagtcaattggttcactccagtggaccctagctacagacctgattttgtggawatggcttacagaatcatagtggatcccagtgcaaagccagccaatgtggacccaggctctaggcccaacctggtagactcaggcaccagacccacctgccttctcatccagccactaggccagcctgcytgagaactccagcagcaagactactcatgaactaagccagatgaccaacccatagtctctggttgagctgaacggtaaagggctttttttttttttttttgccaaggccagtttgtaaagactggaataagtgcctacttcttcaaatgtgaaaataccaatgcatgggcacaagaattatgaacaatcaggaaacataacatcaccaaaggaacaaaaagagcactagtaattgaccctacataaatggagatttataaactgtctgacagaaagttcaaaataatcttaaggaaattcagtttactacaagagaaaacagacaactaagaaaaatcaggaaaataagcaaaatgaactcaataaagagatagaaatcatacmaaagaaccagacagaaaytctagagctaaagaactcaatgattgaactggaaaaytccatattgcatttcaatagcaaaatagatcaggcaaaagaaagaatcagtaaacttgaacacagatcatttgaaattacccagagaaaaaaagaaaataaaaaagtaaaaaaaaaaaaaaccctacaagaattatgggacactgctatagtttgaatatgtccacccaaaagcatgcattggaaacttaattcccaatgcagcagtgttcagaggtggagccttaatgtgtggtgattaggccatgaaggcagagtgaatagattaatgctattatcacagaggagtaggtttgttatcttaggagtgggtttattataaaaggggaaatttgattccatctgtctttcttttgccccctttgtgcttccaaaatacactggtgggacaagaatagaataggcattgccatcccaaagtgacaaaataggtaagataaaaggagataactggctccaagtaartccaaaatacaacaaggaaagcaacgttaaatcttaaaactagagaatacatttttttgacttcatgttccaccctctgagcacacttgggtgggggttgggccctcaaagtctcaggcagccccatctctatgcctttgctggcctcagcccagacagcaaccctcatgggttggagtcttgtgcctgcagctttcccagactggcattacaccttagtggtctacagttttgaaatctcatggccagccccactcccaaggctccactatgcctagtggtaactctgactccacggcccgctcagcattgttctattgggggctgtctgtggtggctcakcccctgtgacatgtttctgtccgggaccccagactgtccatgacattctctgaaatctaggtggaggaagacatgcccccacactcttgcattctgcatgcctgcggaactaacaccacataaacaccaccaaggccgactgcttgtgtcctctggagtgctagcccagactgcacctggggccattggcaccacagctggagcagccaaggagcaccttgccattcctgggtcctggctgctgtactcagccttgcagaacatgggctttattgtgttccgcccttccagggtccagagtcactactctgggttacctcctctctcaatgcccaagttgccactgtggtctgttggctctagaactcaaattgcagctgtgcccttctccctagggcctgagcctttggaatgcattytttctccacagctgtgtcagtgcttcattctgattcacagggtcagagttgcagccatattcctgtccctgagccaagctactgaagagtgcctcagagtcagagtcctcagttttgtggaagatttgcatccacctgtgcctcagagagtaaacctgatcccacatactggatacttcagtagttttgcaagacactaagcacaggaccccaattttacagccacttcaatcctgtgccctggaacatagtgctgctgatgctgcctgcaagtcatatcagacccaacaccaagagggatttctcagctaagtttcattactatgggaaaaatgagagcaggaggtactcctgaagcctttgtcactgagaaccctaacagctacacagctactatcactgccacaaatttctgctgcctaggccactgaggcacccacagtcatcattgacatggatcgcaggtaaggaagctgcacagagatcacaccactgtgcytacctggaaccgcagccaccacaacctacccaaaacactaccctctggtccatctgcaagtgagtctttttcaaaaaaaaaagccactctataagtttggaaaggagactgctctaacagtgtgcagacctcaacacaggtacataagaatcataaaaaagcaaggaaagacaccaccactaaaggaacacagtaactgacaccaaagaaacagaaatttcctgaaaaggaattcaaaatartgattttaaggtaactcactaagatataagaaaatacaaatagacagttcactgagatcaagaaaataattcatcatctgaatgataaagtcaataaagccaaagatattattttaaaaaggagataaacagaaatcttggagttgaactcagtgaatgaaataaaaactgcaattgagagctttgacagcagactagatcaagcagaagaaaaaaaatctgtgacctttcagayaggtcttttgaaatgactctatcagagaagaaaaaaagaatgaaaaagaatgaagaacactaaaggacttatgagacatcattaggttagcaaacattgacattacaggtattaaagaaggaaacagtggagaaagggatggaaagcttattcagtgaattaaatgatgaaaattatttcaagtctgaagggagacatggatgtctagatccatgaagctcaaagttctcaaacagattcagtccaaaaaagtcattttcaaggcacattataatcaaactgtcaaagtcaaaagaatttttaaaacagcaggagaaaagcatcaagtgacatcgaggacatttccatcagatttctttgtagaaatcttgcrggccagcagagaattgaatgatatgttcaaagtgctaaaagaaaaaaaaaattagtcaagaatactatacccatcaaagatgttctgagaaataaaggaaaaataatctttttacaaacaaaacgtgagggaatttattaccactatatttgtcttacaagaaatgctcaagggatttcttcaagtggaaataaaaggacaataaatactatcatgaatacatatggaagtataaactcatcatgggtagagataaacaaaaaaatccagaatactgtaatggtggtatgtagatcatatatatctctagaataaaggttaaaagtcaaaattgtcagaaataactaaagctacaataagttacataattcaaaaagatgtaaattgtgacatcaaaatcataaatgggggaagatacaaatctacagtttagatatgcgacaaaaataaagttgttatcagcttaaattacttgcttaaaacctagatgttggctgggcatggtggctcatgcctgtaatcctagcactttgggaggctgaggtggrcagatcacctgaggtcaggagttcaagaccaccctggccaacatggtgaaaccccatctctactaaaaatacaaaaattcgctgtgtgtggtggcatacgcttgtaactcarctgctcgggaggctgaggcaggagaatcacttgaacccaggaggcagaggtggcagtgagccgagatcacgccattgcactccagcctgggtgatggagcaagactctgtctcacctagatgttttatgtaagccacagggtaattatagcagatttacaaacaataaagagaaaagaatcaaagcttagaactacaaaaaatattaaatcacaaaggtaggcagcaaaagagaaggaaaagggcaaaagatctacaaaataaccaggaaacaaataacaaaatgataatagtaagttcttayctataaataaccttgaatgtaaatggaataaattcttcaatccaggacatagattggctgagtagatttttaaaaatacaccttcttcttattagggtgtattaatcytgaatactttcacttaggtgaaatttggtgttagtcatgcaattcagggaagactttagaatacaaaggatttactgacatgattctttactacttttatgtctggtagtagattacatatgtccattggaagattacrtaatcaagrctgaacaactaaaaggttattcccttcaagaataaaattttgagccatcttaactagggaagasccttaggtagccaagcagttggctgtgggaaagggaggacatggaattattggtggaaagaagtgaaaaatataaattgaagccttgtaatggattataaatccattactgtagtacctgtacatattttaatgtatatattagtcatgtttttttctccctttctgtctcttagtcttatgtgttttgatattagctttacaatttacttataaatcaaaaaacatctgaatgagatcagaaagacagaataacctttattagtaccacttttgctgtatcccatacatttggtatgttgcattcccattttcatttgtttcaagaaattttacatttccttaatttctttattcatacatttgttattcaagaaaatgttgtttaatttccatgtgttaatacaatttccaaggtttgtcatattattgattgtagtgcatttattacattgtgcttcaaaaaatgcttggtagaatttctttatttttgaatttatcgagactgttttgtggtataactatgatctattctggagaatattccatgtgctgacaaaaactgagtattctacagcagttgtgtgaaatagtttctaaatgtcagttaggcctgtttggtctagtatgtagtttaacttcaaagtttcctgtttttctacttttatattaggttcagggtatatgtggaggtttgttacatgggtaaattgcatattgctaaggcttggtgtatgaaagatctcatcaccaaggtggtgagcatagtactccataggtagccttcccacccatgtccctctcccactctcctccacatcaggcagtccccagtatctrttgttcccatccttgtgtccacattgcagtatttggttttctgtccctgcattgtcttaggatagtggcctctagttgcatctatgttgctgcaaaggacatgattttattcttttttatagttgcatcatttccgtggtgtattgtaccatattttctttatccagtccacagttgatgacaatcatggttgattccatgtctttgctattgtgaatagtgcagtaatgaacttttgagtgcatgtgtctttttggtagaatgatttattttcctttgtgtatataaccaacagtggcattgttaggacaaatggtagttctattttgagttctctgggaaatttccacactgctttccacagtggctgaactaagttayattcccaccagcattattatagaagtgtttccttttatttttcaacattgccagcatctgttgtttttytgacttcttaaaagtagctgttctgactagtgtgatatgttatctcatggctttgatttgtatctctctaatattagtgataatgagcaatttttcatatatattttcatatatttgttggtgcatgtatgtcttcttttgatacatgtcctttgcccatattttaatggggttatttgcttttgcttgctgatttatgttccttatagattatggatattagacttttgtcaaatgcatagtgagggtgaacagatcagactttccccagttccataggaaagtcagccctgttctctctaggtatggcagcctactcaggctagagacgtcccttccttaggagctgttcagggtctggaaagcatcctagtgcttggcaaccccatgtagggttcccagatttctccccatttagtcttggcatctggatcaatcaatattgaatagattcaatatttcagttgaatctatttggttttctctgactttcctatacctgaatatttatatctttctcagggtttggaaagttttctgttattcttaaaaataaactttgcattcctttttcttgctcagtttcctcttgaacagtaataattcttagatttggtcttttgaggtttttaaatattttgtaggcaatcttcgttccatgtcattctttgttcttccccccttcactctgtattttcaattaggttttcttcaggctcactggtttttcctctgcttgatctattctgctgttgagagcctctaaaaatttttcagttaagcaaatgtatttctcagcgccaagatttgtttgatttttaaaattatttcaatctctgttaaatttctgtgatagatttctgaattgcttttatttgtaatcttgtagactactgagtttccttaaaacttctattttgaatttttggtcggaaaactctcatcatctcattagcatcagtcattgtttttttgcttttccarttgaagaagtcatggttccttgtttgctgttatttattggggatgtattcctgtatctttgcatttaaggattaattatttatttgtcttctttgtctggcttgttttgggttttattagatacatttgcttagagattctttgcaatttccatattaaatttttttcactgccttatttttggcactaggtggagccttaaacccaggtttcccttggccttagtaaacaaagcaatgcccttctcaaagtgggggttcccaaaggtgtgggaagggtagctggaagtttgtgcccagaggacctgtggaatatacctcctacacaatagtgcttcttatatgttattaaattttctcttgctgcgtttggatcctatatttgttttgggcctttgagagccactcttagtagccactgatttgacatcccctttggccaagttacagagcagttttgagggctaaggatgataggcttacttctccctctgtctcctctgtcctcagggatatttctcacttcaggctctcttattcttcccagggattgaggcagggacaagtcgctgtctgctttgagtttttgttgcttctctgtggtcctaaaaattgtctcattctcataatgggttcttggatattgctggtcataatattgatgctgtatatttctttatggctttctgtgggggaaagggagtaaagccagattgcttctatgccaacattttaaaatcagaagctttcaatactcaattattgtttagtaatctcccaccaactgtcttaagtctgtgggttctcatttgctcacagataattctgctacaaacctcacatctgcctgcatttctggctgcaactatgtgcaaaggataatggcatatcttctatctcccaaatatagtatggatatctttttttggtaaattctatcttagaaaaatrcagagaaatggatttagcaatgtagtttcctaaactttctgtgcagagaatagatcttagaaacatggagcaatgatacttatttgccatgcccaaaatgcttctttcagtttctcaaatgttttatatttcactccatcagaggacctttgcacttgcttttcacactttatgagatatctatttcccagaattcagtatttggaattcctgaagaagaataaataaaatgtacaatatattataaggcataattgaagaattaattttacaataatggatgacccaaatttataagtcgaaaagacatcccaggacaaattrggaattaataacatataaaaataacctggtgaaatttactggccttttaaaattattttaaatatacagaattctaggggcatcasactttaccctctcctccaaaaattccacacaaaatttaaaagacaatctacttaagacgggggaagaaacaaggtgacctcagaattgttctaagaagtcattatatgaaaagatacttgcacacgcatgtttataagcagcataattcacaattgcaaaaatgtggaaccaacctaaatgcccatcaatcaacgagtggataaactgtggtatgtgtatgtatatatgtgtgtgtgtgwatatatatrygtatatatatacacacatatacacacacacatatatatgtgtatatatatgcgtatatatatgtgtgtatatatatgcgtatatatatacatatgtgtatatatacatatataatatatatcatggaatactactcagccacaaaaaggaatgaattgatggcattatcagtgacatgggtgacattggagtctattattctaagtgaagtaactcaggaatggaaaaccaagcattgtatgttctcactcataagtgggagctaagctacgaggatgcaaaggcataagaatgacacaatggactttggggactcaaaagcaaagggtagggagggagtaagggataaaaggctacaaattgggtgcagtgtayactgytcgtvtgatgggcscaccaaaatctcacaaatcaccactaaagaacttatataaccaayaccacctgttccccaatgattatggaaataaaaacatagtttaaaaaataaataaaaaataaaacaaaagggaaaaaatttgctagtgggtcattaggggtgatggtgagtggtgccacttccaccccttgattactggacccatgaatcctggctatgggggaacgagtaccacaaactgggtgttgattcagagcatatacagccttctggagaactttgccccagccctgtaaagtattgccacctaattggcattgtaattgtgacttcaaaaggccattccacctttctatcaatccagctgcttcaggatgatagggaacatggtaagaccagtgaattccatgagcatgagtctactgctgcacttctttatctataaagtgaataccttggtcagaggcaatactacgtggaataccatgatggtggataaagcattccatgagtccmtggatagtagttttggcagaatcattgtatgcatcataggcaaacgcataactggagtacgtgtctattctggtgaggacaaacctctgccctttccatgataacagaggtccaatataatcaacctgccaccaagtagctggctgatcaccccgaggaatggtgccatatagagggctcagtgttggtctttgctgctggcaaattggacacacagcagtggccgtagccagatcagccttggtgagtggaagtccacattgctgagcccatgcgtaacctccatccctgccaccatggccactttgttcatgggcccattgggcaatgacaggcgtggctgaggaaagaggctgagtggtgtccacagaacgggtcatcctctccacttgattattaaagtcctcctctgctgaggtcacccgttggtgagcactcacttgggatacaaatatcttcacagtttttgaccattcagagaggtccatccacatacctcttccccaaatgtctttgtcaccaatttttcactcatgcttcttccaagaccctgaccatccaggcaaactattggctacagcccatgaatcagcatataattgcacatctggccatttctccttccatgcagagtgcacaaccagrtgcactgctcaaagttctgcccactgggaaaatttctcttcactgctgtccttcagggatgtcctagaaaggggctgtagtgctgtagctgtccactgttgggtggtgcctgtgtatcatgcagaatcatctgtgaaccagaccctactattctcttcctctgtccactgatcatagggaactccccatggggccactggtgcaggctaggggagagaaggcagggtggcaggagtggggaccatgggcatttgagccacttcctcatgtaacttacttgtgcctttaggagctgctcgagcccgatcatgtatataccacttccatttgatgatggaatgctgctgcgtatcacctactttatggctagatgggtcagaaagcacccagttcatgataagcagttcaggttgcattgtgacttgatgacccatagtcaaatgtttagtttctaccaaagcccagtaacaggccaagagctgactctcaaaaggagaatgattatctgcagaagayrgcagggccttgctccaaaatccgagagggctccactgtgattcacctatgggggcctgccaatgtctccaaacagcatccctatctgccactgacacttcacgcaccattgggtatgctgggtcatatgacccaaatggcagagcagcttgcatagcaccctggacttattgcagagccttctcctgttctggaccccactaaaaattggcagccttttgggtccctggataaatgggccaaaataacacaccaaaatgaggaatgtgttgcctccaaaatccaaataggcycactaggtgttgtgactccttcttggttgtaggaggggccaaatgcagcaacttatccttcacctttctaaggtgatattctaaggaatatcttgacaggccccacaccactggatccctagaaattttactgaggtaaaaggtccctgaattttagttggatttatttcccatcctctggcatgcaaatgtctcaccaataagtccagtgtgtttgctacttctcactctctggatccaatcagcataatgtcatcaatataatggaccagtgtgatatcttgtggaagggaaaagcaaacaagatctctccaaacaagattatgacacaaagctggagagttgatatatccctgaggtagtacagtaaaggtatgttgctggccttgcccactraaggcaaattgcttctggtgggccttatggacaggaatggagcaaaaggcatttgccaagtcagtggccacataccaggtatcaggagatgtgttaatttgctcaagcaatgaaactacatctgatacagcagctgcagttggagtaaaccctttgttaagcttacrataatccactatcattctccaagatccacctgtcttctacacaggccaaatgggagagttgaacagggatgtggtgggaatcaccacccctgcatctttcaagaccttgatggtggcagtaatctctgcaatttttgtaaggatgcgatattattttgatgtatgatwtttctaggtagaggcagttctaatggcttccatttggcctttcccaccataacagccctcactttaccagtcagggagccaatgtggaggttctgccagctactaagtatgtctgtcccaattatgcattctggcactggggaaatgaccacagggtgagtccaaggacccactggagccactctatgttggatctgagctaaaactccattaattacctgacctccataagcccctaccttaactggaggatcacaataacatttttgagtcccccggaatcaatgtcagctcagagccagtgaccagtagtccctgaaagktctgattatttccctttcccctatgcacagttaccctagtaaaaggctggaggtctctttggggaaagatggaagaaagattaacagcataaactgttggtagtgtagtgggatccttcctcaaggggatccagcctttccttcaagtaaagtggttcaagtttacaaactgtaaactggttcaagtctggaaattggttgagggtccatgattctgtctttataattcaaatcagtcttttgtccacttgacatggaattttctgcttatataaattaagtaaaaatgcagtgggcttcctagcaatttcacttctagaaacaccgtgattaattagccaatgccagagctctacatgagtcagactattctgattgctactttgcctctgctgtccattgcagtaactatgcccaccttgcctttgatggttgagtgccaccrcttggcctctgccatcttgggatccaattattcccactgcatttaaattttatagctgaagtgactgtggttcccactgtaagatcggcatacagagaagagcaatcacagagctcttcaaggatgcaggtgctgcccacacaaatctatttctcgaagtattggtcaagattatgtcttctggaccctcccagctgggatgagtaggtctaaagtgactaatccactctagcatcctgatctcctaagactttggatctttttctctacattaaaccaagagagatcaggcatttccagctcgctcmcagtgggccatcttttaatccatatttcagctaacaaagccaataaactattagaatcttttttaactccccagtctgcaacattaaatgcagaatccctgcttagtgggcctaaatcaataaattaagcctgttccaactttgtgttccttccaccattatcctacacccttaatattcattctcatgcatgtgctccagatttctgcttaaataaattagaaaactcaagcagttcttttggagtgtagtgcacctccatgtgggttacactttgaacctcaactccaggggtctgccaggacttcagcctaattataggtctagaagcaaacaggggtgttgggagtgggtcctgaggaaaatcagcattgtcttgcctggcacctgccccaagggaggccatcactgttacctcaggcagtgcagggttaatttcctcagcaaatgtggaagggctgatggcagcgtgggtcatagattgggaaggggatgttgccaccacttggagtggggaggctgtttcctccgcccaaaaagtctcatcagaatttaggagctcagtgcctccagcctcatcagsgtcctcccacatgtccccattttaagttgcatggtcccattcttttccaatcaatgtcctcactttaatagtggatacctggtgaggttgtgcatgcatcttttgttgcaggtcagccaytcacaggataagagcttgtgtctgattttccacaatttcagctttttttctacagaagataagactctcacttagggcaaccttagaagatttgaggcttagtatgtgcttctagagccgggagatagaatccctgacttcattttcttttatcacattgtctagtgaacttaggagcaaccaaccaacttctttacattccgtagttcttcacatatggtcaaaggtattatgtatagagttactaaactccttgcatctcttgagcagtgaatcaggagtatcaaatgcatttattttgcataactctctaaacagttcacaccaagaactatcagtgttctccatactattagmagtagaatccttagcatttttgggtctaatcatattaagcaggcaactccagaaaccccaaaggcaactaaatactccatccttaaaattctgttcctctagaaccactcccagtaccaaaatctgtattagggttctcttgagggctggactaagaggatagatatatagacaaaagggagtttattaaggagtattgactcacacaatcaaaagrtgaggttcctcagyaggccatctgcaagctgaggagcaaggaatccagtcctatttccaaaacctcaaaagtagggaagctgacagtgcagcagaaggcctgagagcccctggaaaactactggtgtaggtccaagagtccaaaagctgaagaacttcgagtctggtgttgaagggcaggaagcatccagcacaggtgaaagatgtaggctaggagactaagccagtttagtctttcacattcttctgcctgcttttattctggccattctggcagctgattaggtggtgcccacccagattgagagtggatctgcctctcctagtccactgactcaaatgttaatttcctttggcaacaccctcacagacacacccaggaacaatactttgcatccttcaatccaatcacattgataccttgttttatttcatcataatttgagaagataactgatatgattttgactttttaatatttgtttagacttgtttgtggcctgatatgtgatcttccatgtgccaatgagaagcatgtgtattctgcacttgatcttagccaaaaggcgaagtgatgagaatgtgtattcagtagttgttggaggaaatgttctgtaaatrtctgttaggtccatttgatatatagcacagtttaagtttaatgtttctttgttgattttctgtctrgatgatatccagtgctgatagtgggatgctgaagtttccaactattattgtcttggggactctttctctccttagctctaataataattcctgtttagaactgggttctctagggttagctttttatatatttataattgttatatcctctctctggattgatttctatatcattatatactaatctttttgtctcttttttaaaatttaaagtctatttgtctgttgtaagtatagctatttcttaactcttactttccatttgtgtgcataatctttttcgattcattcactgtcagtctatgtgtgtctttacaggtaaaatgaatttcttgtaggcatcatatagttgcttcttggttttttgttatcaattctgtctgtctatatcttttaattcaggaatttaaaccacttacattcaagattgttattgatagataagaacttgttcttgtcattttgttgtcttctaattgttttgtatattttttatgttatttcttagctttgtaattggtggctttttatattcgtcttttcatttgtgtgtccctcktccagtatgtttttgatatggtttggatgtttgtcgcctccaccattgaaactaccatttaattgaacactttaaatgggtaaattatatagtatgatatacactcctaatcactactttctaatataaatttcccactaataactttcagatattttaacatttattcatgaatttaactatttctcaaaaaagaaaaagacatccatctattatgtctaggtaacaactggttttagtttccagtgtttacaggtttctagtaggcacatgtgctgctggaactagatttcactgacaaaactttagtcccagtagttgactttagttcatcaatcctaatcacccctttctaacataaattcctccttaataaatttcaggtatttttcctgttattaaacatggttagactactaaatccaacaaaagagtcaaattgtgtaaaaactccaatggaaaagtacccaattttactccttgtatttctgcaaatttaatcatatcctaagctacgaggtccacatggtaaagggacctaagagggcatgttttcctyaatctacaagatatcttattattttccatcgctggtgcttacttggtttaaagttaacctaaaaatcacattaaaatatttctggatgagtcaaagtatttctgcactataataatttcctgtgattatgaagatmattgttttcaagttgctaggtggaaaaaaagttatgtttcgtcttaccaggtatatccatgtggtatgaatgtgattcaatataaactttaaagtcatgttattatcataaattctgtaggatattttaattttgcgttacagataagcactgttcaaagtattgtggggcatcaggttgtgcaacaactttgttatcacctcgatatgtggtcttggtcgaatcactaaacatttctatgcctcaatacactaaggcttatatgattgctaacagaccttccactcctaatgtttagtgatttggcaattcagacattttgctrtaacttttattcattaataacaaaggctgattaatttaatacacacacacacacacacacccctcacattcctatgtaaggattacctygcaaagtatttttaaatccatctatttctatagagactgatatagaaagcttgagaggtgctttgggaagacgcttattaaatgatgaattcaagacacagtcaaagagtttccctggtaagaaaatatttttaagtctaatatttctcatttatttttctccttcaaagtttaagtgtgtatccttaatagcaatggtgcccatttgttattatgacatgggcacaggttctcatgaataccctcccatatttggttttactctagaacatatttactagaaatgtaaagctagctagatattattacttttaggactcatccatttagaaagtaatccataaaataatatagtatagtgagcttagaatatacttgggacaagtatgttcaaaattattttagtccctttctatttacagtttagatagaaagttactttaaatttgcaaaagcggaaaggctatctgatgagtgcaataagtaaaggaaaaagacagttgttttattcttacaaattccctctatactttaaaatgtcaggcatggtaataatctctcaactatggcagaatccttcagttgtgtaaaatagttcagatattatactactgcctttggtacaagagtagcagtgttaggcaaaacaycctttgatctctggtgtgatacaaaggaaggcagacaggttaatagagaattaagtaaaagacatactcaaagagggaccctctaaaaccactgtcatccagaggtggttgttacatgcccaaagctgttttattgtaggaacggcattagaggcttcacattgcaggatgtattgagccattcttgcattgctataaaggaatacctgagactgggtaatttataaagaaaagaggctgtacaagcatagtgccagcatctacttggcttctggggaggcctcagggcgcttttactcacggcagaaagtaaagcagaacaggcacattacatgacaagagcaggagcaagagaaagaagggggaaggtgctacatacttttgaacaactggatctcacaagaactcatatactattgtgagaacagcaccattccatggagaaggatctgcccttgtgacacaaacacgtcccacctccaacaatggggattacatttcaacatgagatttggacaggaaaaacatacaaaccatatcacaggggaaagagttttcrgtaaaataatcaagccaaatcactgaagaaataaataagcaaacaataataacatacccagaaagaagaggaaaagaatcaaaattaagattgctacattatatgtctaaaatgtccagttttcagcataaaagtatgagttattctaataaggaagaaagtatgacccatacacagaagaagagcaggcaaaaaaacagcttatgagaatcctagctgttagacttagcagacaatgactacaaagcagttagtataaatatattgaaagaactaaaggaaaccattctttaacaagaaaaggaagatattatgacaatgtttcatcaaatagaagatatctacaaagagataraaaatattttgcaaagggccacatggaaattacagtgttaaaaagtacaaaaattggaagtaaaaatttactagaggggttcaagtacatttgaactgtccaaagaaagaattaaaaaacttaaagtattaggaacactaaaaagaaaacagagagagaaaggagcagaaaaaayatggatgaaaactttttgaagaatatttaatgataaatgagtctacacatccaagctcaattaattctaagtagaataaacacaagggaatctataatcacactcatagtaacaatgttgaaagataaagagaaaagcttaaaagcagcaagagaaaaacaatgcatgatgtaaaagagaaccccactaagattaaaagctgactacttatcattaggaactattagggccagaaggcattgggacagcacattcaaaaagctaaatgaaggactgttaaccaaaaatcttatatccagcaaaactatttattgaacatgaaggtgaaatgaagatatttctaaatagacttttttaaattagaaaatttattcctatcagaactgctttccaagaaatatagagttcttcaggttgaaaaccattgacctctgacactaacttgaacccataaaacgaacataggttaaaggaattctgtaactctgaaagaccatataaatatacttcacttctttctactcttaattttaactcttaattgatataaaatgcaattgtataaaaaatatttacagaattttattgctgggactttaaaatatagacatgtagtatattccagaatgttagcacacaggcgatggttgagagaaatgatgtattgaagttaaaaaaaaatgacaagagagggggctccaagatgactgtcttaaagatatctggcactcttctcaacacatacaaaaaaacaaatttgggarttgataatcatatttcaaatagatcgtctaatcaggaacactagaattcagcagagaattaacaggaaacacctgaggcatagaaggaaagggaaaggaggcagctgacctaagtaggatcgataaagtccagagaggctccccagtgtgggaaaagggtgagaggtccctagaagtcaacattcccaccatagattcctccaatcctagccatgggagagccacccttacaggccctgaccagtggcattgctctagagagggagctcatgtgagtcacacacacacaccgtgagaaccaagcagatgcagcatagtgccktttttcctctgcctcctgggttcaagtgattcttctgtcttagcctcccaagtagctgggactacagrcatgcacyaccaygcccagctaatttttgtattttcagtagtgatggggtttttccatgttggccaggctggtgtggcccaacatccctacatcgtagagccccactgacatmcccctgcatctatgcagtgggctgcagacactgccactgagagcaactcaatcctacccagcggcaggaccaccacacagttggatgcaccctgagaacaggctctccctgacaactgccattgctgttaatgccacccaggcacaccacttggggtcctggggatttccccaccctgcctrccaaagcatgtgcccatgcataccattgggggatctgagaaccagccctctcagcctagagccgtgtttcagtgcccaaaaatgcctcccaggggccaggggattaccttgccccatcakttgccctgattaccaggggacctcacaataggcccagaaacctgtcagcagcaccaaagcatgacacccaaaggccgggggctcatcctgccccatttaccaccacaggcatctgtgcactcttcctgggtcctggaggatgaactcagctagccagttgtagccactactaacaccagtgcatgctacttgggagcctgtgggttgtttcaccactgtgacttttattgcccacatcatgtacactgtctggaggctcaaggacccayctacctgctggcaccatggccagcactcaagcaagccacctagaggcccaaggattagcctgcctggactcactaatcctgatgctcacatatatcacctaggggcccaaggataggcatgctcagccattgctatcactaatgaggccaaggactgattcacctggggtccctgtccccagcaaagcctcacggcagcatccactagcaactacagcctaagtcattgaagaaatgayggacatcactgacactgtttatagctgaaaaaaaaaattatacagaggccgtataccactgcatacacccagaatcaaagctaaaatgcccaacccagggtaggcatggtgactcatgcctataccccagcactttgggaggtgaaggtggcaggatcacttgagatcagacatttgaggccagccttggttcaagaccagtgagacactgtctctaccaaaaaactttttttaatttgaaaagtgccctatccaaccaacatcatagatagcatcttcaggaaaaagwtttgctctgtgaaagccaatccacaaattgagagaagtgagtgttacatgagatgacagacacataagtacacaagaaacatgaaaaagcgaggaaatgtgacacctcaaaaagaacacaataattcttcagcaacagattccagtgaaaaagaaattaatgaaacgcctgaaacagaattgaaaataatgatattaaagaagctcaatgaggtagaagagaacacagataaacaatacaaagaaatcagaaaaataattttgagaggaatgaaaaatttattaaagaggtagatatcattaagaaaagaaccaaacagaaatcccataattcaattcaattaataaaacaaaaaatacattcagtgggagaaaatttttgcmatctacccatctgacaaagggctaatatccagaatctacaaagaactcaaacaaatttgcaagaaaaaaacaaacagccccatcaaaaagtgggcaaaggatatgaacagacactttttaaaagaagacatttatgcagccaacagacacaagaaaaaatgctcatcatcactggtcatcagagaaatgcaaatcaaaaccacaatgagataccatctcacaccagttagaatggcaatcattaaaaagtcagaaaacaacagatgctggagaggatgtggagaaataggaacacttttacactgttagtgggactgtaaactagttcaaccattgtggaagtcagtgtggcaattcctcagggatctagaactagaaataccatttgacccagccatcccattacttggtatatacccaaaggattataaatcatgctactataaagacacatgcacgcatatgtttattgcgcactattcacaatagcaaaaactgggaacgaactcaaatgtctatcagtgatagactggattaagaaaatgtggcacatatacaccatggatgtggaaacacacaaatgaggaagaaaaagaactcaaatgttactatggcagaaaatcaccaaaccacaatgataaacaacacaagagaaagaaagaaacaaaggataaagaaaacaaccagaaaataagaaaacaataggaataagttctcacatatcaatattattcttgaatgtaaacagaaaatggctgaatggattttaaaaacatgagcaaactgtatactgcctataagaaactcacttcacctgtaaagaaacatatagactggtagtgaaggaatggaaaaaatattccatgcaaacagaaaacaaaagtgagcaggagtagctgtacttatttcagataaaacagactttaagtcaaaaacaataaaaagagataaggataattattatataatgataaaaggatcaattcagaaagaggatataccaattttaaacttatattcacccaacattgaagcatccagatatataaagcaaatattaaatctaaagggacagagacagtccaataaaataatagctagaaacttcaacacctcattctcagcattagacagattgtctagacagaaaatcaacgaagaaacattgagtttaaacatcagtttaaaccaaatggccctaacagataattacaaagtattttcttcagtaactgcagaacacacattcttctcgtcagcacatggaacattctccaggttagaccatatgttaggccacaaaagatgtcttaacaaatttttaaaaatcaaaatcatatcaagtattttttcagaccatgacagattaaaactagaaatcaaaaactagaggaactttgggaactgtgcaaacacatggaaattaagcaaagtgctcatgaatgatcactgaatcaatgaagagattaaaaaggaaatcaaaaaatgcttgaaacaaatgaaaatgaaaatgcaacatatcaaaacctatgggatataacaaaagcaatgctaaaaatggaagtttatagcaataaacacctccatcaaagagtagaaagatttcaaataaattaacaatgcacctcaagagactagaaaagcaaaaacaaaccaatcacaacaaaaattaatagaagaaaagcaaaaaggatcagagcagaactaagtgaaatagatacttaagcaaaggatcaaccaaatcaaaacttggtgttttaaaaagatgaaattaataaaccactaggtagactaacttaaaaaaagatagaagatacaaattaacaaaatcagaaatgaaaaaggagatagaactgataccacagaattacaaaagatcatcagaaaatattatgaacaactatacgctgataaactggaaaatctagaggaaattgatagatttctggacacatatagcctaccaagattgaattaagaagaaatagaaaatctggttaatgggtaytacaaacgtgctgttagataaaaagaataarttmtaaagttccgtagcagaggagattgattatagttaataacaatgtattttgtatttcagaatagctagagagaggtctagaaatgttcccaacacatgactagatggcctcactgccaattttttccaaacctttaaagaactaacaccaattcccctcaaactattccaaaaaattgaagaggacggaattctctgtaactcagtctacaaggccagcatttactctgataccaaaaccagacaaggacataaaaaaataaaagtacaagtcaatatctctgatgaacatcaacataaaaatccccaacaaaatgctagcaaaccaaattcaacaacatatcaggaagataatgcactgtgatcaagttggatctatcccacggatgtaagggtggtttaacatatacaaatcaataaacaaggtagatcaacagaaagaaggacaaaaccatataatcacctcagtagatgcagaaaaaacatttgataaaattcaacattccttcatgataaaattctcaacaacttaggcataaaaggaatgtacctcaaactaataaagtccatatatgacagacccacagctaacatcatactgaatgatgataaatcgctgaggtgatattctaaataatctgacttgatttttatgcacactatacatataaccaaatatcacatgtaccccataaataggcacaaatattatgtattaacaaaaaagaaaatgacaagatatgataatctgaaaccacaggaacaaattaatagaaccagaaattataaataagaaggttaatataatacaaattggaaatatatattttctttcttgcctcagcttttwaaaaaagcataaaattatataaagaaataattataacaacaactataaccatgtctttattatttacaaatgtgctatgtataacaatagcacaaaaatggggaacggaatacagctatatgggagttacttttctatatttcactggaatttagtataaatttaaagtactttttaaacttgactgtgatgatggtgacagacattactgaatgtattaaaatccatagaatttaagattttagatagcttatttaaaatactcagtgaacttcaagcagaaaaacatttttaaaagatttaaagcaaagggaggatattgtgaaggagaaagattgtaactcttagtaaattataagtgtctccagcayataccttttaatttctagtatttaacccaatatttcctcagatggtctcatttttttccctgattgkgtaaggatcatttgcttgctcatttcaaatgaacccrtccttctttgatatatcagttgaagaaagaacaaaggaagctaaaatacatctgccgatgtttccagttttgagtcgctatatctcttatattgttacttgattactgaaaacttgttctgctcaatcttatggatcactttttactttggtagtgaggcagtgctcagtatagaatgcagttgtggcatatttgagcagctggtgtcataatgcaaccatttacattattcatgtattcaccaattttcccaaaacagcaacaacaacaacaacaacaacaacaaaccgctctacaatacaatggaaggattatgacaagtgtccaaccatagttatatactctgctagagccaattctacccacagaatcttaagcccaatgttgaccttatgtcaccaatcctcattatccccttttcaatatgaatttctttttaataatttttatacgtttttatctcattgaacttagtagtttctaattccaggaaaatatcaaaccacataaaaacttaaatggaaacggatccaataacaattctgatagtgctgcaaatctgaccattacctccttgattcatgttcaagggacctcagagggcagtttttctcagttttacaaatatcttgtaatgtttttcataaccaatatctaaagaatttacaattacataacgtaaaaaggggaaagaaatattcctcaatgaatcaaataatttctgcctcatgagaagtttctgtgactaatgaggccatggtttgcagcttgacctatggaaaaaaatgttccacctcacatagtacatacctacaggttgggtatatttttagtgtaaacttgaaagatacattatcatcataatgtccctaggatgatttcaatttgcataagaaatagcattgtatagaacaattactggttaagaaattgtgcagcatcaggttgtgcatcagttttacctttccctggctatatgatatttcaattcattaaacatatctaagcctgaatatagtctggcttatataattgttaacatcctttcctttttaaggtttttgttattttccaatccagacatttcattttaattcttctataaatacaatttttattttcatttatttttttcttttttgcgacagagtctcgctgtgtcaccgggctggagtgcagtggcatgatctcagctcactgcaacctccractcctgggtttgagtgattcttctgcctcagcctcccaagtagctgggactacaggcatgcgccaccacacccagctaatttttgtatttttagtagagacggggtttcaccatgttggccaggatggtctcgatctcttgacctcatgatccacctgcactttggcctcccaaagtgctgggattacaggcgtgagccaccgtgcccagccacaaatattttaagttagtaacacacacacatatatgtacatgcactcacactgtcacatttgtgtataaatgattaccttacagtgttttgatacctgtttatttctatagggcctgatatagaacaattgacagatgcatttggaagagatatactaaaggatgaattcaagacacgatcaaagagtctccctggtaagaacaaaaactttacacatttagtatttctggttagtttatattctctggagtgtaactaagtgtgcatctttaaggagaacagtgcctatgaattattacataggcaaaagtctttatgaattcccctctataatatttcaactctagtttcaactagcaatgtaaaattagcttttcaaaagcagaagggctagatgatggatgtgataagaagatgaatataacagatagtaattttattggttaccagttgactctatrtggtaaaaatatcagtcaagtttgtaacatctcagctgcaataaagttatttagttatatttttcagagattacacaactgaatttagtcctggggttacagtgttagacacacttctctatgaccgttggtgtgataccaaaagaagacattttaacaaataaataatggaaagagacattcaaagagtgccctgctaaaaccactgtcatccgagggaaactgtttgcatgcccaaggagatgccctcaaaaagcaacataagagactttacactgtagaggaaagagactttaggaaaatacttctatcaaatcacacacatacacaaacaccccaccaccaacaacaamaacaagcagcaaacaaacaaaaacaacaagccccacaaaaaggaagagtcaatcaacatacagatttgctataatacattayctaaattgtccatattttagcaaaaaaatttaggacatgcacagaaacagtactctgtaacccaaacacaaggaaaaaggcaaggaaaactgcttgtgagagtcctacacgttagatttagcagacaatgattacaaagtagtctaataataataataatatcatcaaataattaaaacatttctcaaagaagaaaaagaaggtacaataacaatcttttatcaaatagatgtcaacattgtgatgtaaattaaatttttaaagaaccaaattaatatttggaattgaaaggtaaaataactacaagggaaaattcattacagggtcaagraaagatttgaaatgtcagaaggagtaagcaaacttaatataatgggaataccagaaggagagtcttccaagtagagagagaataagaaaaaatatttgaagaaaattggctgaatactttgaaaaatatttactaggtaatattaatctatacatctgagttctattaaatctaagtagaataaatacaaatcaatccatgaccagactaatcactgtaaaaatgttgaaaaagaaagagaaaatgtacaatgcatcaagaggaaaacaattcatcccgtagaagagaaccccagtgagattaacatctgactcagcattagaaacttttgaagtccagaaggctgtggtgttgtatattaaaagtgctgaaagagcggtggagccaagatggccaaataggaacagctccagtcyacagctcccagtgtgagcaacgcagaagatgggtgatttctgcatttccaactgaggtaccgggttcatctcacttgggagtgttggcaggacagtgggtgcagtgcaccaagtgtgagctgaagcagggtgaggcatcacctcacccgggaagtgcaagggatcagggaattccctttcctagtaaaagaaaggggtgacacatggcacctggaaaaccgggtcactcccaccctaatactgcacttttccaatggtcttagcaaatggcacaccaggagattatatcctgcgcatggctcggagggtcctgcgcccatggagcctcgctcattgctagcacagcagtctgagatcaaactgcaaggtggcagcgaggctggtggaggggtgcctgcgattgctgaggcttgagtaggtaaacaaagcagccaggaagctcaaactgggtggagcccaccgcagctcaaggaggcctgcctgcctctgtagactccamctctgggggcagggcattgccaaacaaaaggcagcagaaacctctgcagacttaaatgtccctgtctgacagctttgaagagagtagtggttctcctagcacgcagctggagatctgagaatggacagactgcctcctcaagtgggttcctgaccctcgagtagcctaactgggaggcaacccctagtaggggcagactgacamctcacatggccaggtactcctctgagacaaaacttccagaggaacgatcaggcagcaacatttgctgttcaccaatatccgctgttctgcagcctccgctgctgatacccaggcaaacagggtctggagtagacctccagcaaactccaacagacctgcagctgagggtcctgamtattagaaggaaaactaacaaacacaaaggacatccacaccmaaaccccatctatgcatcaccatcatcaaagaccaaaggtagataaaaccacaaagatggggaaaaaaaagagcagaaaaaacagaaactctaaaaatcagagtgcctctcctcctccaaaggaaagcagctcctcacaagcaacggaacaaagctggatggagaatgactttgatgagttgagagaagaaggcttcagatgatcagactactctgagctaaagcaggaagttcgaacccatggcgaagaagttaaaaaccttgaaaaaaaaattagacaaatggctaactagaataaccaatgcagagaagtccttaaaggacctgatggagctgaaaaccatggcacgagaagtacgcgacgtatgcacaagcctgagtagccgatttgatcaactggaagagggggtatcagtgatggaagatcaaatgaatgaaatgaagcaagaagagaagtttagagaaaaaagaataaaaagaaacaaacaaagccttcaagaaatatgggactacatgaaaagaccaaatctacgtctgattggtgtacccgaaagtgacagggagaatggaaccaagttggaaaacactctgtaggatattatccaggagaacttccccaatctagcaaggcaggccaacattcaaattcaggaaatacagagaaagccacaaagatactcctcgagaagagcaactccaagacacataattgtcagattcaccaaagttgaaatgaaggaaaaaatgttaagggcagccagagagaaaggtcaggttacccacaaagggaagcccatcagactaacagctgatctctcagcagaaactctacaagccagaagagagtgggggccaatattcaacattcttaaagaaaagaattttcaactcagaatttcatatccagccaaactaagcttcataagtgaaggagaaataaaatcctttacagacaagcaaatgttgagagattttgtcaccaccaggcctgccctaaaagagctactgaaggaagcactaaacatggaaaggaacaaccggtaccagccacggcaaaaacatgccaaatggtaaagactgtcaaggctaggaagaaactgcatcaactaacgagcaaaataaccagctaacatcataatgacakgatcaaatccacacataacaatattaaccttaaatgtaaataggctaaatgctctaattaaaagacacagactggcaaattggataaagagtcaagacccatcagtgtgctgtattcaggaaacccatctcatgtgcagagacacacataggctcaaaataaagggatggaggaagatctaccaagcaaatggaaaacaaaaaaaggcaagggttgcaatcctagtttctgataaaacagactttaaaccaatgaagatcaaaagagataaagaaggccattacataatggtaaagagatcaattcaacaagaagagctaactatcctaaatatatatgcacccaatacaggagcacccagatttataaagcaagtccttagagacctagaaagagacttagactcccacacaataataatgggagactttaacaccccactgtcaacattagacagatcaacgagacagaaagttaacaaggatatccaggaattgaactcagctctgcaccaagtggacctaatagacatctacagaactctccaccccaaatcaacagaatatacattcttttcagcaccacaccacacctattccaaaattgaccacatagttggaagtaaagcactcctcagcaaatgtaaaagcacagaaattataacaaactgtctctcagaccacagtgtaatcaaactaaaactcaggattaagtaactcaggattaacaacctgctcctgaatgactactgggtacataacgaaatgaaggcagaaataaagatgttctttgaaaccaatgagaacaaagacacaacataccagaatctctgggacacattcaaagcagtgtgtagagggaaatttatascactaatacccacaagagaaaaaaggaaagatctaaaattgacaccctaacgtcacaattaaaagaactagaaaagcaagagcaaacacattgaaaagctagcagaaggccagaaataactaagatcagagcagaactgaaggaaatagagacataaataacccttcaaaaaaatcaatgaatccaggagctggttttttgaaaagatcaacaaaattgatagaccactagcaagaccaataaagaagaaaggagagaagaatcaaatagacgcaataaaaaatgataaaggggatatcaccattgatcccacagaaatagaaactaccatcagagaatactataaacacctctacacaaataaactagaaaatctagaagaaatggatacattccttgacacaaacaccctcccaagacyaaaccaggaagaagttaaatctctgaatagaccaataacaggctctgaaattgaggcaataattaatagcttaccaaccaaaaaaagtccaggaccagatggattcatagctgaattctcccagaggtaaaaggtggagctgttatgattccttctgaarctattccaaccaatagaaaaagagggaatcctccstaactcattttatgaggtcagcatcatcctgataccaaagcctgacagagacacaacaaaaaaaagagaattttagaccaatatccctcatgaacatcgatgcaaaaatcctcaataaaatactgacaaactgaatccagcagcacatcaaaaagcttatccaccatgatcaaatgggcttcatccctgggatgcaaagctggttcaaaatatgcaaatcaataaacgtgatccmgcatataaacagaaccaatgacaaaaaccacatgattatctcaatagatgcagaaaaggcctttgacaaaattcaacaaccttcatgctaaaaactctcaataaattagttattgatgggacatatctcaaaataataagagctatctatgacaaacccacagccaatatcatactgaatgggcaaaaactggaagcattccctttgaaaactggcacaagacagggatgtcctctctcaccactcctattcaacatagtgttggaagttctgaccagggcaatcaggcaggagaaggaaataaagggtattcaattaggaaaagaggaagtcacattgtccgtgtttggagatgacatgattgtatatctagaaaaccccactgtctcagtccaaaatctccttaagctgakaggcaacttcagcaaagtctccagatacaaaatcaatgtgcaaaaatcacaagcattcttatacaccaataacagacagaragccaaatcatgagtgaactcccattcacaattgcttcaaagagaataaaatacctaggaatccaacttacaagggacaggaaggacctcttcaaggagcactacaaactactgctcagtgaaataaaagaggatacaaacaaatggaagaacattccatgctcatgggtaggaagaatcaatagaattgtgaaaatggccatactgcccaaggtaatttacagattcaatgccatccccattaagctaccaatgactttcttcacagaattggaaaaaactactttaaagttcatatggaaccaaaaaagagcccacattgccaagtcaatcctaagccaaaagaacaaagctggaggcatcacgctacctgacttccaactatactacaaggctacagtaaccaaaagagcatggtactggtaccaaaacagagatatagaccaatggaacaggacatagccctcagaaataatgctgcatatctacaactatctgatctttgacaaacttgacaaaaacaagaaatggggaaaggattccctatttaataaatggtgctgagaaaactggctagccatatgtagaaagctgaaactagatagcttccttacaccttatacaaaaattaattcaagatggattaaagacttaaatgttagacctaaaaccataaaaaccctagaagaaaacctaggcaataccattcaggacataggcatgggyaaggacttcatgtctaaaacaccaaaagcaatggcaacaaaagcctaaattgacaaatgggatmtaattaaactraagagcttctgcacagcaaaggaaactaccatcagagtgaacaggcaacctacagaatgggagaaaatttttacaatctacccatctgacaaagggctaatatccagaatctacaatgaactcaaacaaatttacaagaaaaaacaaccccatcaaaaagtgggcgaaggatatgaacagacacttctcaaaagaagacatttatgcagccaayggacacatgaaaaaatgctcaccatcactggccaccagagaaatgcaaatcaaaaccacaatgagataccatctcacaccagttagaatggcgatcattaaaaagtcaggaaacaacaggtgctggagaggatgtggagaaataggaacacttttacactgttggtgggactgtaaactagttcaaccattgtggaagtcagtgtggcgattcttcagggatctagaactagaartaccatttgacccagccaycccattactkggtatatacccaaaggattataaaacatgctgctataaatacacatgcacgcgtatgtttattgcggcactattcacaatagcaaagacttggaaccaacccaaatgtccaacaatgatagactggattaagaaaagtgacacatatacaccatggaatactatgcaaccataaaaaaggatgagctcatgtcctttgtagggacatggatgaagctggaaatcatcattctcagcaaactatcgcaaggccaaaaaaccaaacaccacatgttctctctcataggtgggaattgaacaatgagaacacttggacacaggaaggggaacatcacacactggggcctgttgtggggtgggggtagggggagggatagcattaggagatatacctaatgttaaatgatgagttaatgggtgcagcacaccaacatggcacatgtatacatatgtaacaaacctgcacgttgtgcacatgtaccctaaaacttaaagtataacaaaaaaaraaaaacaaacaaaacaataaataaaagtgctgaaaaaaaaaaatctaccaaccaataattttattgctagcaaaactgcttttcagaaaaggtgaaatatgaaattactaaataaaaattgagagatttcatttctagcagaactgttttccaagaaattctaaagaaatttcttcaggctaaagctgacctctgacagtaatttgaagccccctaaaaaaggtatgagttaaatgttataattgcaaaagagagtatgtacaaatatatattccaccttctttcttttcttaatttatctaaaagacaactgtataaaaaatttatataattgtatcattgggcatataacatatcaacatgtaatatattcatgatagcatcacaaaggtgattggagggagaagtgatgtaacactgtaagaaaataacactggatgataaatacagagcaagaataaaaataaccaaaaaatgtaaataagtgtgttcaygtaacaaatmctataaacatgtacttgatcttctttcttttctcagtttatttaaaaggcataaagttatacaaagaaataattataacaataattattacattgtccttaatatttacaggtataatatgtataacagtagcacaaaaactggggaaagagaataaaggtatatataaaggagtaatgtttctgtatctcagtagaatgtaattagtgtaaatgtgaaaaagattataaagttgactgaggtaatacacatttctgtaataagcattgaattggacactttaaatggaaaaatagtatggtttaaaaatatacacatttttaaaagctcaggaactctaagcaggataagattttgtaaaatttaaagcaacaggataataatgtaagggaggaaaattgtgacttttactagttgatraatttctccagcacataactttgtattcgtagtgtttaactctaaaatgctctactcattgactccctgcttatctaaaaatcctctgatttcttagttcaaatgaatcagcctttcttacttatatctgtaagagaaagacaaaagagctgaaatacatctgttaatgttcctcagttttctgttgcatatagctattacttttacaaaatgttgttattgaattattgaaaactcgttttgtccaatatgatgcttttttttttttgagatggtgtcttgctctgttgcccaggctggagtacagtgatgcaatcttggctcaccacaacctccgcctcccaggttcaagcaattatcctgcctcagcctcctaagtagctgggactaaggcgcacgccaccacgccctgctaatttttgtgtttttagtagagacaaggtttcactatgttggccaggctggtctcgaacttgggacctcgagatctgcccacctcggcctcccaaagtgctgggattacaggcatgagccactgcacctggccaatataatgcatttttacaatgatgtgtaatctggtttctgcctctatttgaattatattggtggtatatttgggctgccatgataatagtgcaaattttaacattaataatgggctcagccaattttccaaagcaagacttccactctgtcgttcaggatcattacaggtgtccaactaccattacatgctctgctaaaaccaactttgacacaaaaaacttcaggtttaataaaccaggtttaccagttctaattatctgtttttcaatatgaaattctytttagtagattttttagtttttccatcattatacctagatactagtttctaaatccaacaaaatgtataaatcacataaaactcaaatgaaaaggaatacaatcctaaggctagtaccactacaaatattcccgttttcttcttcccagctgtaaagtccgcctgctaaaagaaccagagagaagagacttttttcacattacatgcgttatttattattcttttttatcactgatgmctatttgaattatagttacaccacctaaaatagactattaaaatatttctggatgagtcaaggaacttctgttttattrtattttgtgagttgtgatgaccattgtgtgcagataggtcaactatgaaaaaaaattgatgttccacctcaccagatatacccctacaacatatatatgttcttaatatatacttgaaagttatgttattaccacaaactatctagtgtgatttaaatttgcatatgagattgcattatatggaaaaaatagttaagaaataaggtagcataagtcygtgcctcagttttgttattacttgctatatggtcttggtcaaatcactaaatataactaagcctcaatataatgaggcttatatrattgttaattgttaattttcctttcaatttgaattcctatgttgctgcaatctggacactttattataattctactccaatgaagaatattaattatgatagtattagacacatgcacacacacatgttaatatttacattaaaaaagtgttttgaaatctgtttacttttttatagagrctgatgaacgattgcatagtacaactgagagaggtacaataaatgatgcaattaagacgcagttaaagagaaagagttaccctggtaagaataagaatttttaaaatctacttatggtttcctatcttctctggagtttaagtatgtatctctaatgacaacagtacctatatgtaattatcacktgagaaaaagtcttcatgaatttcctcctataattagttgaactctagtattattctcaatagaaaattagctttagggctcatttatttaaaaagttatccataaaagtctaatgctatagtgaccttagaatatgcttgcagatgtatttcaaatgctgttcaatttgctatttatggctaattaggaaagttgctttgtatttgcaaaagcagaattgctagcttatgaacatgataacaagatgaatataactgataatgatttcatcggttacccatkccctctcatatcgttatgttatcaggcaaattgacaatgtttcagccactttagttttgttataaagttcaaaaattatactactgcatttttagtggtgaaacartgacacayttctccttaatttttcgtgttatacccatagaggcagagagcttaacagagacataaggggaagaaacagataaagagagccctgttaaaacaactctcatccaaaagtgattgtgtgttatgatggttaatactgtcaatttgattggattgaaggattcgaagtattgatcctggtgtgtctgtgagagtgttgccaaaagagattaacatttgagtcagtggctgggaaaggcagacacatccttaatctgggtgggcaccatctaatcagcygccagcatggctagaatataaagcagacagaaaaacgtgaaaagactagactggcctagcctcccagcctacatctttctcctgtgctggatgcttcctgccctcgtgtgagttaatacttaataaactcccatctatatcatctgtatctatctatatatctatatctatatcttctattacttctttccctctagagaaccctaactgatacagattttggtaccaggagtggttctagaggaacagaatattaaggatggagttcttttgttggttttggggtttctggagttggctgcttaatgtgattaaacacaaaaatgttaaggactctacttctaatagtgtggagaacaccgataaagagctgaaattgtggaaaaacatacacaagctcttatcatgcaagtggctgacctgcaatgaaaggtgcatgcacagcctcgccaggtgtctactgttaaagtgagggcattgattgaaaaagaatgggaccctgcaacttggaatggggatgtgtgggaggacctgatgaagctggagacactgaatttgtaaactctgatgaatcttttttaccagaagaaacagcttccccatccccagtagtgacaacatcctttccccaacccatgctgccacaagcctttgcatctttgtctgaggagataaactctgtgctgcctgaggcaacagtgatggccttccctgaggcagttgccaggcaagataatgtttattctcctcaggaaccacctccaacatccctgtttgcttctagacctataactagactaaagtcccagcagtcccctagaagtgaggttcaaagtgtaacccacatggaagtgcactatactccaagaaaactgagttttctaayttatatgagcagaaatttgaagaacttggagtccaatatgcaagggcaggaagcatccagcacaggaaaaagatgccctccttttgagagacacctcttgtcctattactgggctttggtagaaactgaacatttgactatgggtcatcaagtcaccatgtgacctgaactgcctatcatgaactgggtgctttctgacccatctagccatagagtggggcatgcacagcagtattccatcatcaaatggaagtggtatgtacatgattgggcttgagcaggtcctgaaggcacaagcaagttacatgaggaagtggctcaaatgcccgtggtccccactcctgccaccctgccttctctccccaagcctgcaccaatggcctcatggggagttccctatgatcagtggacagaggaagagaagaataaggcctggttcccagatggttctgcatgttatgcaggcaccactsgaaagtggacagctgcagcactacagcccatttctaggacatccctgaaacacagcggtgaagggaaatcttctcagtggacagaacttcgagtggtgcacctggttgtgcactcttcatggaaggagaaatggccagatgtgtgattatatatttgattcgtgggttggagccaatagtttgtctggatggtcagggacttgaaagaagcatgattgaaaaattggtgacaaagacatttggggaagaggtatgtgggtggacctctctgaatggtcaaaaactgtgaagatatttgtatcccatgtgagtgctcaccaatgggtgacctcagcagaggaggattttaataatcaagtggataggatgacccrttctgtggacaccactcagcctytttccccagccacgcctgtcattgcccaatgggcccatgaacaaagtggccatggtggcagggatggaggttatacatgggctcagcaatgtggacttccactcaccaaggctgatctggctatggccactgctgagtgcctaatttgccagcagcagagactaacactgagccctctatatggcaccattcctcggtacctggtggcaggtggcaggttgattatatgggaccttttccatcatgggaagggcagaggtttgtcctcactggaatagacacttactccggatatgggtttgcctatcttgcatgcaatgcttctgccaagactaccatccgtggactcacagaatgccttatacaccatcatggcattrtctctgaccaaggcactcaatttacggctaaagaagtgcggcagtagcgtgttctcactcatagatgggagttgaacaatgagaacacatggacaccgggtggggaacatcacacaccagggcctgtctgggggtggggggctgggggaggtatagcgttgggagaaatacctaaggtaaatgacgagttaatgggtgcagcaaaccagcatggcacatgtatacctatgtaacaaacctgcacgttgtgcacatgtaccttggaacttaaagtataataaaaataaataactaaaaaccatgttttaaaatggccctgcaaagccatattttttgtgggagaaatttctatctatagagaatctccattaatgcagccacgaaatccctttccaggcatttcccagatataggatagattaactaagtgcttgccatcttttaagtcctgaaaagagacatttatcatctattctctctaaaggctgctacctgtgaggcttcatctatgtaacaaagaccttggcatccacaatcccccttgtcttgactaaagcatttctttccactgacttcaagtctttagacaaagcttaactctttcaaccaattgccaaaatcagaaaatctttgaatctacctccaacctggaagcccaagcccctttaagatgccctgcctttttttatctgaaccaaagtataccttccatgtattgatttatgtctttgcttataactcctgtctccctaaaatgtataaaaccaaactgtaattcaattaccttgtgcatactttctcaagaactcttgagactgttccctgggccatggtcattcatattggctcagaataaatttgtttaaatagtttaaaaaagaagaagaaggagaaggagaaggagaagaagaagaaggaaggaaggagaagaagaagaagaagaagaagaggaagaggaagaggaagrgaagaagaagaagaagaagaagaagaagaagaagaagaagaagaagaagaagaagaagaagaagaagaagaagaaagaagaagaagaagagcagcagtggactcatgctcttggaattcactggtcttaccatgttccccatcatcctgaagcagctggaatggccttttgaagtcacaattacaatgccaactaggtgacaatactttgcagggctgggacaaaattctccagaaggccatgtattctctgaatcagcatccaatatatgttactgtttctcccatagccaggattcacaggtccaggaatcatggggtggaagtgggaagtggcaccactcaccatcacccctagtgatccactagcaaaacttttgtttcttgttcctgtgacattactttctgctcacctagaggtcttagttccagagggaggaacgctgccaccaggagacacaacaacaattcaattaaactggaagttaagagtgccacatggacactttgggctcctcctacctttaaatcaacaggctaagaagggggctacattgttgacttgggtgattgaccyggactatcaagatgaattcagtctactactccacagtggagatcaggaagagtatgcatggaatacaggagattcattagggcatctcttagtattaccatgccctgtgattaaggtcaatgggaaactacaacagcccaatccaggcaggactacaaatagcacagacccttcaggaatgaaggtttgggtcactccaccgggaaaaaatttcatagcctgctgaggtgcttgctgaaggcaaagggaatacagaatgcataagtagaagaaggcagtcaccaatgccagctacaacaatgtgaccagctgcagaaatgaggactgtaattgtcatgagtatttcctccttcttttgttaaaaacacatttgtgcatgtatacacttgtactaagaacatatcttcattttatttcctttttcctttatcatgtgatgtaagatttattgacttcatatcagcatttaagtattgttaactttaggtaacagtatttgggttggggatttgtgcgtttctggttatatgaaggatagttgtatcacgttaggcataattatgactttattattgcctttatttgaagattatgtatgatctcaggagatgtgtacgggttcaaattgacaagggatggacttatgatggttaatactgagtgttaacttgattggagtgaaggatgcaaagtattgattatgggtgtgtctgtgagggtgttgccaaaggggattaacatttgagtcagtagactggaaaggcagacccacccttaatctgggtgggcaccatctaatcagctgccagtgtggctagaatataaagcaggcagaaaaacgtgaaaatactagactggcctggcctcccagcctacatctttatcctgtgctggatgcttcctgccctcaaacattggactccaggttcttcagttttgggacttgactggctctccttgttcctcagcttgcaggagctgacctattgtgggaccttgtgatcatgtgagttaatacttaataaatatatatatcctattagttcttatatatataaggatatatatatatatatatatatcctattagttctttccctctagagaaccctaatacatgtgtatatacatctgtgcccacagaggaataacattagaagcttcatgttgcaggagaagacttcagtaaaatagaaaatagtccacccaaatagctaaataaagaaacatgtacacaacaagattccaaaaggtaaacaagaaatccatatggaggtttgctatctaaaaagcccaattttagcaaaatatgatagacatgcaaaaaagaaaaaaaaacaggaagatgtgtcccatacataggaaaaaagcaacagaaactttttatgaggatgccaaatgtttggtatagcagggagcaactacaaaataattcttataaatatttaaaagaattcgtaaaatctatgcttaagcatgaaaggaagatatgatgagaatgtctcaccgaatagagaatattaacaaaaagattaaaagtattttgatttacgattgaacgtatttatgggatacaaygtgatgttttagtgcatgtaaaaaggaaattctagcgttgatagtacaataactgaagaaaaattcactagaggggctcaagagtagttttaacagaagaaataatctgtaaatttaaagtaataggattactaggagggaaagaacaaaataatttaaagaaattatggctgaaattttgaaaaatgtttgatgtaaaatactagtccaccaatctaagctcaattaaatctaattatataaacacaataaaattcacaaccagatccaacatagtaaaaacattgagagacaaagtgaaaaccttgaagtagcaagagaacaactacagtcatgtgttgcctaatgatggaaatgtgtcctgacaaatgcatcgttgggtgacttcatcatcatgcaaaaatcatagagtatacttacacaaacctaggtggtatagctttctacatatctaggctatattgtatagcctattgctcctaggctacagacttgtacagcatgttactggactgaattttgcaggcaatggtaacacaagagtaagcaattctgtatctaaacatagaaaagatacagtaaaaataccagataaaagataaaaagtggtacacctgtgtagagcacttaccatgagtagagcttgcaagactgaatgttgctctgggtgcatcagtgagtgagcagtgagtgaatgcaaaggtctaggacattattgtacactacagtagactttataaaacactgtatgtacacttaggctacatgaaatttatttttaaaaatctttccttaaaaataaccttagcttactgtaactttttaactataaacttttatttttttaatttttggactcttataataacatttaacttaaaacacacattgtacagttgtacaaaaatattttctttttctatatccttattcaataagctgctttctatttaatttttttattacctttaaaacatttttgttaaaaactgagacacaaacatacacattagcctagacctacacagaatcaagatcatcagtatcatcactgtcttccacctccacgtcttgccccagtggaaagtcttcagggaaagtaacacacgtgaagctttcatctcctatgataacgatgccttcttctggaatacgtcctgagggacctgtctgaggctgttctacagttaatgttttttgtaagtagaagtatgcatactcaaataaaaataaaaatgtatagcaaatatataaaacagtaacatagctttttattattatcatcaagtgttatgtactgtacataattctatgtgctatacttttatatatctggcagcagagtaggtttgtttacaccagcatcatcacaggtttgtgaataattcattacattaagatgttacaatggttacaacatcactacatgatagaaatttccagctcctttacaatcttacggaatcaccatcttatatgtagtctaaacatcatgtttgtatggttacatgagtgtaaccatacaaaagttaattctagtaagattaataggtgacatarcatcagaaactatggaggccaaggccaggtgcagtggctcatgcttgtaatcccagcactttgggaggccaaggygggggtggatcacttgaggtcagtggttcaagaccagtctggccaacctggtgaagccctgtctctactaaaatacaaaaattagctgggcatggtggtgcgggcctgtaatcccagttactcatgaggctgaggcaggagaatcgcttgaacccgggaggtggagtttgcagtgagccaagatgacagagaaagactccatcttgggggaaaaaaaacccaaaaattatggaggccagaaggcagtaggatggcattttcaaagggctgcaagaaaaaaatatcaaccaataattttatgtttggcaaaattatttttaaaagtgaaactcaaacaaaaagaatctgaaataaataaaaatttacaggattagttggtatcaggccgtgttattaaaaaaaacttaagaaagttcctcaggctgaaaacaagtttcctcacatcataattttttcaacaaaagcattagtgaaataattctattacataatattatataaatgcatattttgttcttttcttctcttaattgatttaaaatgtaattgtgtggtaccatatatagatatataaatttgatatgtaactgtattttggggcctatcacataatagatatgtaataggcatgcaatatatttgacaatagcagcacaaaggaaatggctgggagcaatagtatgctggagtaagaaaatgacaatagatggtaactcaaatccacaggaaataataaaaagaaccagaaactataaacaagaatgttcatataacaaacattataaatatgtacttgttcttctttcttttctcagttctttaaaaggyataaagttatatagagaaataattataacaatggttttaatatttataggtgtaacaacagtacaaatgtcaggaagagggaatagaaaatatagcagtaatccttgtatagtttactggaaattaattagaataaatctgaagtagattctaaaaatgactgtgatgatggtttaacaactgtgaatatattaaaaatatttgaattagatgctttacaagggcaaattgtatgatatattaccctttttttwtaaaaaaaaaaagaaagctcaataaaatccatgtgtaacagtttcaaaaagagatgtaaagtactgggaggatgttacgaagaaggaaaattgtgaatcttactaaattatatttctctagcacataattttgtattcttagtgcttaaacctatctgtcctcaaatactcattactgatctaagaaacttttgcttatctaacgcaaatgaattagtactccttgcttataccagttagggaaataactaaagaggttaaaatatgtctgctaatgttccccaggtttttgttgttgttgttgttgctgtaggtcatcattttcacgaaatattttaatcaaattaataacttattctgtcaatctgatgcatcttttcattttggagataatgccctaaattgttcctatttctatacagattgtaatggtggtacatatgggatgtaccaatgggtcatttgcagctttaaaatttattcatggactcaaccatttctccagagcaaaacttctactctatgatgtctgggtcactgcagttttcacactacagtcacatgctctgctaagacccaatttcacccacaaaacttgaggcccggtagatggcaaagcttcataaatccagattatttgatttttaatatgaattccctttattaattttgatttcatttttctgtcattgaccctagcagttgtttcaaaagcaagcaaaagttcaaatcatatcaaaactcaaagggaaagggatccaaactcagtgctgataggaatgcaaaattacccatttcttcctcaccatctacaaagtctacattctaaatggacctgagagggcacgttctaccagtccacaataatcactgctgtcacataatttgtagttacataacataaaaaggggctaaaatattcttagaagaatcagagaatttctccctgatggttaactttctgtgactataaagaccatagttcacaagttgacttgtgaataaaattatattccacctcaccaggtatatccatacctggtgtatggatatgcttgtatgaagtatgaatgtgtttaaaaattatattcttatcataaactctctaggataatttcagtttggraaasaggcagcattgtatggaaraaagcactggttaaggagtaacaaacatctatttctgtataagttttatasttaackgtatatctgaktttgttcaaatcrctaaacttctctaggcttatatgattgctaagaatgcttccaattctaaggctttgtaattctgcagtccagkgcttttttttttttactaattcatcttctttaatgactgatgctaattaagttattactattcatacatacaaatatactatcacatacacacagcacggacatatgttacaatttacctttcaaagcgttttgaaaacctgttttatttttatagagactgtcttaaaacacttgaaaggtgttaayggaaaagatataataaagcatctaatcaacatacagtcaaagagtcatgsaggtaagaacaagaatttttcaagtctcctgttaatggcttatttagctctgaagttaaatatggatctttgatgacaactgtagctgtaagttattacatgygaaaatatcttcatgaatttcctcctgtaatttgtggaactctartatttgctatcaatggaacattagttagatatgattagttttagaactcatttactggtaaagtaatccataaaaatgcaaggctgttgtgacctaaatatgtgcttgatgctattatttcaaatgctatactttaattcaatgctgagttcaggtcctgaatatctctgataaaattttctgtctcaattatctgtctaaaagtctcccactattattgtgttggagcctaagtctctttgaaggtctctaagaacttgctttatgaatctgtgtgctcatgtgttagatgcttatatttaggatagttagatcttctggttgaattgaacctttacccttatgtaatgcagcactattcacaatagcaaagacatgaaatcaacccaaatgcccatcagtaatagactagataaagaaaagttggtacatatacaccatagaatacaatgcagacataaaaaagaaacaagatcatgtcctttgcagggacatggatggagctggaggctattatccttagcaaactaacacaggaatagtaaaccaaatactgcatgtcctcacctataaatgggagctaaatgatgagagcatatggacayatggaggggaacaacgaacactggggccttttgcagagtggaggatgaaagagggacaggatcaggaaaaataactaatgggtactaggcttaatacttgggtgatgaaataatctgtacaacaaacccccatgacacaagtttacctatgtaacaaacttacacttgtaccccgaacttaaaataaaagttgaaaaaaatgaaaacaaatgcagtacttatcattttatatttctggcttagagaggaaagttgccttaaatttgtaaaagcatacagactaacttgtgaatgtgataagaagaggagtataacagtcattttattggctacccattctctctatttgataaaaatgtcaggtaaatttacaatatctcagctacagtaaagttattcagttgtgttccacaattcagtgattacacaactaaatttagttctggaataacagtgttaggcatctttttccttgatctttggtgagatactgaaagaggcagggagcttaacagagaaatacgggaaagaggccattaaagagagccccctgaaaccactgtcattcaaaagtggcagtgtgcataccaaaagcagtgctcccagaggaacaatattagaatcttcttgttgtggagaaagataatgtagtaaaatagtcaaaagaaatcactaaaaagcaaacagcaagttttaaaatatgatgagtaaatcaatatctagatttttctacaatatcatccaaaatatccaaaatatccagtttttattctaaaattctagttctagatccttgaggaatcaccacactgacttccacaatggttgaactagtttacggtcccaccagcagtgtaaaagtgttcctatttctccacatcctctccagcacctgttgtttcctgacttttcaatgattaccattctaactggtgtgagatggtatctcattgtggttttgatttgcatttctctaatggccagtgatgatgagcattttttcatgtgtcttttggctgcataaatgtcttcttttgagaagtgtctgttcatatccttcatccactttttgatggggttgtttttttcttgtaaatttgtttgagttcattgtatgttggttgtctgtttactctgttagacttggcaragactacaaagcagttattataaataggttcagatatttaacaaatggtgctgggaaaactggctagccatatgtagaaagctgaaactggatcccttccttacaccttatacaaaaattaattcaagatggattaaagacttacatggtagacctaaaaccataaaaaccctagaagaaaacctaggcaataccattcaggacataggcatgggtaaggacttcatgtctaaaacaccaaaagcaatggcaacaaaagccaaaattgacaaacgggatctaattaaactaaagagcttctgcacagcaaaagaaactactatcagagtgaacaggcaacctacagaatggaagaaaatttttgcaatctactcatctgacgaagggctaatgtccagaatctacaaagaacgcaaacaaatttacaagaaaaaaacaaacagccccatcgaaaagtgggcgaaggatgtgaacagacacttctcaaaagaagacatttatgcagccaaaagacacatgaaaaaatgctcatcatcactggccatcagagaaatgcaaatcaaaaccacaatgagataccatctcacaccagttagaatggygatcattaaaaagtcaggaaacaacaggtactggagaggatgtggagaaataggaacacttttacactgctggtgggaccgtaaactagttcaaccattgtggaagacagtgtggtgattcctcagggatctagaactagaaataccatttgacccagccatcccattactgggtatatacccaaaggattataaaacaagctgctataaagacacatgcacaygtatgtttattgcggcactattcacaatagcaaagacttggaaccatcccaaatgtccaacaatgatagactggattaagaaaatgtggcacatatacaccatggaataccatgcagccataaaaaatgatgagctaatgtcctttgtagggacatggatgaagctggaaaccatcattctcagcaaactatcacaaggacaaagtaccaaacaccgcatgttctcactcataggtgggaattgaacaatgagaacacatggacacaggaaggggaacatcacacaccrgggcttgttgtggggtcgggggaggggggagggatagcattaggacatatacctaatgtaaatgatgagttaatgggtgcagcacaccaacatggcrcatgtatacatatgtaacaaacttgcaygttgtgcacatgtaccttagaacttaaaatataatacaaatatgcatataaaaataataaaaataaataggttcagagaattcaaggaaaccataattaaagcataaagggggtatagtgacaatgtctgtattcactgcccagattgccagaacaaaatactgcactgggtgccttaaacatcagaaatttattttctcacagttctgaacactaaaacttcaaaatcaaagtgctgccaaggttgatttctggtgatgcctctcttcctggctcaaggacacacttagagaaatgctaagtgcactgggaagtctccataatagaaccgaacagcagaagaaagaacttcagagctcgatgacaagggttttgaattaatccatcaaacacaaagaaacaagaattttcaaaaatgaacaaagactccaagaagtttgggactatgttaaatgttcaaacctgagaataattggagttcctgagaagaagagaaatctaaaagtttggaaaacatatttgtgagaataatcaagaaaaacttctccaaccttgctagagatatagacatccaaacacaagaagctcaaagaacacctgggaaattcatcacaaaaagatcatcatgtaggcctatagtaatcaggttatctaaagtcaagataaagtaaagaatcttaagagctgcgaggcaaaagcataaggtaacctataaaggaaaacctgtcagattaacagcaggcttctcagcagaagccctacatgttagaaggaattggggtcctatttttagcctccttaaataaaacaattatcagccaaaaattttgtatccagtgaaattgagcttcataaatgaaggaaagatacagtcttttccagacaagcaaatgctgacataatttgccactacctagccagtactataagaactgctaaaaggagctctaaatcttgaaacaaaccctcaaaatacaccaaaatagaacctccttaaaacataaatctcacaggacccatataacattaacacagtggggagaaaaaaaggtattcaggctacaaatggtaagatgaatggaatagtacctcacatctcaatactaacattgaatgtaaatgacctaaatgctgcacttaaaagatacagaatggcagaatagataagaatagatacagaactgcagaatasataagaaaaacctagtttctgctgtcttcagkagactcagcacataaagactcacataaacttaaggtaaaggtgtggaaaaagatgtcctgtgcaaatggacatcaaaagcaagcagaagtagctgttcttacattagacaaaacaaaccttaaaccaacagcggttaaaaatgacaaagagggacattatagaatgataaaagggctagtccagcaggaaaatatcacaattctaaatgtatatgcacctaacactggaaatgccaagcttataaaacaattactactagacctaagaaatgagatgacacaataatagtgggggactttaatactccactgacagcactagacaaatcatcaaggcagaaagtcaacaaagaaacaatgaacttgaactctaccctacaacaaatggacttaacagatatctacagaacattctactcaacaactgcagaatatacattctattcatcagcacatggaacattctccaagatagaccatatgacaggccacaaaacaagtctcagtaaatttaagaaaatcgaaattatatcaagtactctctcagaccacagtggaataaaattggaaatcaactccaaaaggaaccctaaaaatcatgcaaatatatggaaattaaataacctgctccagaatgatcattgggtcaacartgaaatcaagatggaaatttaaaaattctttgaactgaacaataatagtgacacaacctatcaaaacctctgggatacagcaaaagcattgytaagaggaactgttcatagcattaaatgcctaaatcaaaaagtctgaaagagcacaaatagacaatctaagatcacacctcacggaactggagaaacaagaacaatccaaacccaaacccagcagaagaaaagaaataacaaagatcagagcagatctaaacaagaatgaaacaaaaaaatgcaaaagataaatgaaacaaaaagctggttatttgaaaagataaataaaattgatagaccattagcaagattaaccaaggaaagaagagagaagatccaaataagctcaattagaaatgaaacaggagttattacaacttataccacagaaatataaaacattattcaaggctactctgaacacatttacccatataaactagaaaacctagaggagatgaataaattcctggaaatatacaatccccctagattaaaccaggaaggtatagaatctctgaacagaccaataacaagcagcaagattgaaatggtaatttaaaaattgccaacaacaaaaaaagttcaggaccaaatgggattcacggctgtactatctgacattcaaagaagaattggtaccaatcctactgaggtgattccaaaagatacagaaagagggaatcctccctaaatcattctatgaagccagtatcaccctaataccaaaaccagggaaggacataacaaaaaaagaaaactacagaccaatatccctgatgaacatagatgaaaaaatcctcaacaaaatactacyaaaccaaatccaagagcatatcaaaaagataatccaccatgatctagtgggtttcataacaggtatgcagggatggtttaacatatgcaagtcagtaaatgtgatacaccacataaacagaattaaaracaacaatcacatgatatctcaatagatgcagaagaagcacttgacagaatccagcatcgctttatgattaaaaccctcggcaaaatcggcataaaaggaacataacataaggtaataaaagctatctaygacaaaccaacagccaacattacactgaacgggttttgaaagcattccccctgaaaactggaacaagacaaggatgcctactctcaccacttctattcaacatagtactggaagtcctagccagagcaatcagacaaggaaaagaaataaagggcatccaaattggtaaagaggaaatcaaactgtaactgtttgctgatgatatgatcatatacctaggaagcactaaagactcatccaaaaagctcccagaactcgtaaatgaattcagcaaagtttcaggatacaaacttaatatacacaaatcagtagtgctgctgtacaccaacagtgaccaagctgagaatcaaatcaagaactcaactcctttcacaatagctgccaaaacaaacaaacaaaaaacaaaaaaaggtaggaatatacttaaccaaggacgtgaaagacctctacaaggaaaactacaaaacactgctgaaggaaatcctagacgacacaaacaaatgaccatattgccaaaagcaatctacaaattcaatgcaattcccatcaaaataccaacatcattcttcacagaactagaaaaaacaatcctaaaattcatatggaaccaaaaaaagcccacatagccaaagcaagactaagcaaaaagaataaatctgaagggatcacattaccaacttcaaactataaggccatagtcaccaaaacagcatggtactggtataaaaatacacacatagaccaatggaacagaataaagaacccagaaataaagccaaatacttacagccgacagatcttcgacaaaacaaacaaaaacacgaagtggggaaaggacaccgtattcaacgaatgttgctggagtaattgtcaagccacatgtagaagaatgaaactggatcctcatctctctatgcaaaaatcaactcaagatggatcaaagataaatctaagwcttgaaatcataagcttctagaagataacattggaaaaacccttctagacattagcttaagcaaagacttcatgacaaagaacccaaaagcaaatgcaacaaaaacaaagataaatagatgggacttaattaaattaaaaagcttctgcacagcaaaagaaattatcagcagarttaacagacaaccctcagagtrgcagaaaatcttcacaatctatatatccgacaaaagactaatatccagaatctacaaagaactcaaatcagcaagaaaaaaaaaatcccatcaaaaagtgggctaaggacatgaatagacaattctcaaaagaagatatacaaatggccaacaagcatatggaaaaatgctcaacatcactcattatcagggatatgcaaataaaaaccataatgcaataccatctcattcctgcaagaatggccatcatcaaaaaataaaaaaataacagatgttggcatggatgcagcgaaaaggaaacatttttacactgttggtgggaatgtaaactagtacaaccactgtggaaaacagtgtggaaagtccttaaagaactaaaagtagatctaccctttgatccagcaatcccacttctaggtatctacccagaggaaaggaaatcattatacaaaaatatacttgcacacatatgttyatagcagtactatttgccattgcaaaaatatggaatcagcccaaatgcccatcaatcaatgaatggataaagaaaatgtggtgtgtatatactatggaatactactcagccataaaaaggaacaaaataatggcatttgcagcaacctgaatggaattggagactattattataagtgaactaactcaggaatggaaaaccaaacgttgtatgttctcactcatgtgggagctaagctatgaggatgcaaaggcataagaatggtatgttggactttggggacttggggaaagagtagggggggcaagggacaaaagactatgcattgggtacagtgtacactgctcaggtgatgggtgccccaaaatctcacaaatcaccactaaagaacttaatcatgaaaccaaacaccacctgttccccaaaaamctattgaaataaaaaaataaatttttttaaaaaatttaaaaaataaaataacactggacggtaactcaaatccaccggaacaaatgcaaaaaaatatataaataagaaggttagtatagtaaacactaaaaatatgtacttgctcttctttcttagcttaattaaaaggcacagtattatataaataattaatcataacaacaattataacaatgtcttttatatatagtagtaatacacataatagtagtgcaaaaatgttgaagaaggaataatgstatatgggagtaatatttctgtacttcactggaatttgattagtataaactcaagtagaatctaaaattgactgtggtcagagctacacaaatatgtgaacatctwaaaaaacattgaatcgaacactttacataggcatatagcatggtatgttatttattttgtaaaaatacctcagtgaattccaggcaggatcatatttaaaaagaattaaagcaatgagaggatactgtgagggaggaaacatgaaygttactagattgtaaattactttagcacatagattctcttcctaaatgcttaaccttatctcccctaaaatgctcttcttgtygcctctctgcttatctaagaatctttgcatactcacttgaaatgaaccattccttcttatgtgtgctagttggagtaataatcggagaggctatatgactgctcatattccctatttttatgtttctatagatgtgcttatgttcacaaaatatagctgtgtacttatggaaaatatattcttatgtgtctcggttcattttggtaatgatgcctcagctggtccatactttggtttagatttcactggtggtatatttgggcttcaaatgttacactgtaatacttaacatttattcaagagctcagacatttcttcagagcaaaacttccattctatggtatctgggtcattataggtttccaactttagttatatagtctgctataaacaactttctctcacaaaatattaggttcaccagttgacccawgtcacccattctaattgtccctgttcaatatgaactctcctttcataactttcatgtatttttcctgttatatgacctagtcagtaattttcaaatctagcaaaaaattcaaatcacataaaaactccagtggaaaggaatgcaatctcaatgcttatgctactacaagtttacttacttcgtcctccccaagtacaaagtctacaaactcaagaagatatgaaagtcacattttcatattccacaaaatatctaattatttttctacattattgatayatacttgatttatagttacaaatcttagaaatgacatgaagtctttatgaacaaatcaaagtactttgccccacataactctctgtgactgtggagaccatggtttgcaaattgacctatttttaaaaatgttatgttttatctcaccaggtacatcccacagtagatagtgctcttggtgtaaatttaaggttatattatcatcataaactttctaggataattttaatttgcataagagatgcattatatggtaaagtcagtggttaaggaattataaagtgtcagtttgtacatcaattttgtcattatcttgatgtggtcttgttcaaatcatgaagcatctctgaacttcaatataataggcttatatgagttctaatagcccttcaaattctgttttgtgatgcttactgcaataagacatgttgtgactcttctactataataataaaaactcacatgtgcactacacatgcacacacacacataaaatgtttaccttataaaatatattgaaatctgctttatttctatagagactaataaggaactcttagcagatgctattggaagaggtataataaaggggtcaattaaaacacaatttaaatgtcaccaaggtaaaaaaaawttttttcaagactaatatttatggtttattcatattcccggagttaaattaagtatgaacctttaatgacaatagtaccaatatgttagtattatataggtgaaattctaaatgaatatcctcctataattaaacacatacacatactcagatttggtaatgtttacctttcaaaatatattgatatctgttttatttatatagagactgataaggaacacttagcagatgatactggaagaggtataataaagggatcaatcaatgcacaactaaagggtcaccaaagtaagaaaaagaatttttcacatctaatatttatggctgattgatattccctgagttaaattaagtatagacctttaataacaaaactacctatattatagtgttacataagtaaaattattcatgaatatcctcctataattaaacacaaaaacacacacaagtatggtaatgataatcttacaaaatatactgaaatctgttttatttctatagagactgataagaacttctttgcctatgctactggaagaggtctaatgaaggagtcaaccacgacacaattaaaaagtcacccaggtaagagaaaacaatttcaagactaatatttatggtttatttatattcctggagttaaattaagtgtggacatttaatggcaatagtacctatatgttggtattacacaggtaaaattcttcatgaatacccttccataattacacacacacacacacacacacacacacatacacacacacacagatacacacagaggtatggtaatgtttaccttataaaatatattgaaatctgttttatttcaatagagactgataaggaattcttggcagatgctattggaagaggtataataatagggccaatcactacacaactgaagagtcaccgaggtaagagaaagaatttttcaagtctaatatttaggcttatttatattccctgagttaaattgaagtatagacctttaatgacaacagtacctgtatcatagtactttccatagcaaaagatgctattggaagacatataataaagggactatcaatgcacaattaaagagtcaccagggtaagaaaaagaatttttgagtctaatatttgtgacctatttatgttccctgagttaagtatagacctttaatgacaacagtgtctacatgttattattacataggtacctatatcatagtgttacattggtgaaattcttcatgaatatccttctataattagttaaacacacacgtatacacatgtatggtaatgtttaccttataaagwattttgaaatctgtttaattctatagagactgataaagaactcttaaaagatgctattggaagagatataataaagggaccaatcagtgcacaattaaagagtcaccagggtaagaaaaataatttttgagtctaatatttgtgacctatttatgttccctgagttaaattaagtatagacatttaatgacaatagtgcctacatgttagtgttacataggtaaaattcatcatgaatatcctttaattaagctctagcatttactatcagtggaacattagcatattattggttttaaaactcatccatttgaaaagtaatgcataaaaattcagtgttacagttaccttagagtagtctcaatgtaggcatttccaaagctattctacttacttttgtttctgaaaagtgatatttaattagcaaaagcagaaaggcaaaagcacaaaggctagctgaagactgcgatgacaagaggagtataacacataattatttcactggttatccattccttctatttgataaaaatgtcaggcaaatttataaaatctcacctgcaatacagtactttatttgtgttacataattcagagattacattactggctttcatcttggtgtaagggtgttatgtagttatacaattttctttatctctggtgtgatacaaraagaggcagacagcttaacagagaaataaggtaaagagacacattcgaagccggccctctaaaaccaatgttatccaaggtactggatgcatgttcaaggctctgccccttggagagcagcagtagcacttcacactacaggcaagagactttagtacaatagcccagtcacatcgctatgcaaataaataaggagagaacaatgacaagccccagatagaggaggaggaaatcagtacctggagatgctacaatatactacggaaactgtcaaaacttgagcaaaaattattaacatgcaaagaaacagtgaagtgtgacctacaccaaggaaaagggcatgccacaataactgtttgtgagagttccaggtgttggacctagccaacgaaacctcaaagcacttattataagtgtgttcttagagttaaaggaaattattcttaaggaagaaaaggaaggtaacagagatatcagcaaataatatagaaatttcaaaagacaacacagcaaaaccctatctctacaaaaaatacaaaaattagccaggcatggtggtgcacacctgtagtcccagctacttggagaggccaaggcgggggaccacttgagcccaggargttgaaactgcagtcagccatgttcacacctctgcactccagcctgagtgacagaacaagatcctgtctctaaaaaaaaaaaggaaaagaaaagaaaaagaaatttcaaaagaaaaaagaactaaaatacatgtgtaacataaatggttaccttaaaaagtgttttgaaatgtgttttatgtctatagagactgatgtagaacccttgacaaatgccattggttcaagtaaaacaattggtgagataaagacacaactaaggactcactatggtaagaataataattttaagtctaatatttacagtttatcttctctggggtttaagtatgaatctttaatgataacagtacctatatgttaatatttcatgggcaaatgtcttcatgaattttctcatataattagttaaactctcgtattatcaatgggaaattagctagaaagttttaaaacctctagacaatgattttaaaaaatatgaggtttataattctctgtttaaataaatgttttctacartaatccatgttacttttatagcaatagaatttatgaaaaataaatctaataaacattggttcaattggggcaggggggatccagtagcttatacatagacttctgacctccaaaactatctttctaagtgtatccttttaaatgtagactatggatcaattatagaaatgaacatttggtcaaagtaaaataaagctgggataaaggttgaaattaaggaagatactgtcacagaatgcagaacaaagacaagaaakagaaaatgatgagagactacacagaaatttaagtaataaacaagtggccatttaataaaatgtgggaagaaaaattaccaaggcagaaataaagacaaatacgtggagatgggattagtgtgtgaatagtcaagagtattcatgcactttttcttttaaaattktattttagatgtgaacttatttaaaaacaaagataygtccgtacaacgtcaagaaggtatctttactaggagcattacaccaagtaaattcccaacaaaagtgatcaatttatcaccctttgaaaataaaggtaaagaattatgtatgtagatatgaattcagtatctaattacctagaatagttttaaagtatgctttttcatttactctttttgcatcttacttttttttcagaaatatcttaggaaaattcttacaagcgtaaaaataaaatggttttaattcatcctttttattggcagcatgatacttcatagtaagaacactttattcaatcattctactaaagagcattgactttttaggcttgagatttcttattaaattatacatggatttttatcattaaatgatatttccagattgctttcctaaagagctattaaaattaacattttcatcagcaatctttagggaaaattctcttctgtgtgtaagtatctgcaatatggattgctgggttttgktttttttttttcatttatacccatccgaaagttactaaattatatctcactcttattttaatttttattttcatatttgttagtgttttactactccatatctaccctaaaacttaaaaaagcataaaacagtaaccacttaggtaactgatgattgycttggctgggctaacttatgcatttctggtcaaattatcaattcacccatatgtatggcggttggctggctgttgtttgagacaatggtgtagagtgggcccattcagtaaatagaaactttactggttgttcaaaaagaaagcaagagggcccggcgcggtggctcacacatgtaatcccagcactttgggaggccgaggcaggcagatcacgaggtcaagagatmgagaccatcctggccaacatggtgaaaccctgtctctactaaaaatacaaaaattagctgggcatggtggcacgtgcctgtagtcccagctacttgggaggctgaggcaggagaatcgcttgaatccaggaggtggaggttgcagtgagccgagatcacgccactgcactccagcatggcgaaagagcaagactccgtctcaaaaaaaaaaaaaaaaaagaaaagaaaaatagaaagcaagagtgtaaaaagtagatgactaagtataaagttgttaacttggtaactgaaagtattaaaagaagtctaaggttacatggaggaagcaattacagaaagaaattgccatacgcagaactgaaggagacctctgcatagggtatagattggatgatgctagtgtccctgattctgcaggggggaacttggatccctacttctgaaggcggggggcactggccatctactgctagtttctaagtggggaggaataataaaactggttcttcaaatggtggaaaaaaatgcaaactctttgttgccatgggaggaattgctacttttgggataaggaaacaataccaggatgttcttcacagaaactgaaaagagacaggaagctctcaaagcccaccaggaacaaaatgagaagaacaagtctgtcctttttcctccaaatttgcagatttcctctatctagcctatcttgcacggcctaccttggagctactttgcaaagcaaaaatgtggtctgcagaatccccagatccagtatcatgaagcagagtgtagaagggtggtttggtggctaaacttaataactggcccaggaggtgacttggctgcatgtttctcatcatccagccaactagctaggagtcttcaagttctaagagcagcatgcgggcaagcctcaatgtatgagcagttttgaagtctctgctcacattcatttacttttgtcatattcaccaaagtcatataactaagaccagagttagtatggaagaacatcaatacaagtaggcaagaacacagagaccgtcactgaaatcaatccaccacagtgttcctgctgattgagaatattcatggccctcccacatgcaaaatagaatcagctcttcccaggaccccacaaattcttatccaattttggcatcagtgccaaagaccacgatattgtgatatataatcattttcagaggcagcttctatgatatgacttcttttgattcagagatttttttygaaatgtcacttgtctctgacaacacacacacacacacacacacacacacacacacasagacatgcaatgtaacagtggtgagacagggacagaccacagaagacackcccattaacaaacagcagggagaaacgaaggcaaatatggcagtcaataatccatacagtaaggtcacctatttcacccttcaatagcattataattttctcagtaaaaacatacatgaaaaaataaatgaaccaggatattggaggataccagaatggaatgcaggctggggcaaatggaattgatcgtttctagtctctgtgttctttatttctgctttgatctttatttttttttcttctggtagatttatgcttagttctgcttttactacttctgtgaagtgtaattttaggttgtttatttgattcttcttttatgatgtagacatttaatgctataaactttcctcttaggactacttttgccgcatcccattaagtttttgtatgttacgtttttattttcttttgtctgtagatatatttaaatttccctttttaatttccttcttgacacagtagttcytcaggagcatattgtttaatgtttcaaagatttattaagtttctttttattctcctgttactgatatctagttgatatttgatgtaattttgatcttacattgttaagacctcttttgtggcctawcataygatctgttctggagaatgttctttgtgcacttgagaagaatgtgtatcctgttactgttggatagaacattgtgtaattgtctgataaatatgctttatcttatgtgtagttcaattccagtgtttatttattttctatctggatgacctgtctcttgttcaataataggggatattgaaattttgttgcagtctatgtatcctttcagtttttttaaatgtttgctttatatatttagatgctttgatgttgtgtgcatatatactgtgtgagtattaaaaataattacaaatgtcatctattgtatggctaacatattttccaaatttttctagaggaaacttatgagtactcttcaccctatgtgactgcaccttcaaaagcaatttatagaacatatagggctggtccaagcttttctaaagacatccaccttcctttactgaatcaactcccttcaggtaatttttaatatttttagtgtacagtgtgatttttaaaataaagctataactaaatgtaaataaccaagttgtaatagctttagtcatataacagtttggcaaaatataaatgaaagtaaattgtgagttaagtgcacctaacatttgttcattcttagcaatgagtagttgtccctggcatttctcttcctcttctccattatgactaaattggagctccatttctgttctccaccttcttgtcttgttgactactgcagattttgtggatgactgagataaactcattttataacctctttcttatatttatgtatccctcttttatgcaaccccagggagagcatacaatagaaagacaacataaggataggtgagaagaaaaataaatcatatgtttagtttttcccttcccttcattatcatctacctaggcttttaactccattaatatctaagaactaagattcgattcttatctgtcactccagaggcatcattatataattatcaccctggtacattttctacagttaattgagtttgaattttttttatttttttataaacggagtcttgctctgtcgcccaggctggagtgcagtggcatgatcttggctcactgcaacctccaccttctgggttctcctgccttagcctcctgagagtttgaamcttttaaaaaatgtaaatcatttttctttgatttattctgtgctctaaaataaatatccatggcactttctatccataaaggttctaagtaaaaaatcaataggaaatgcagaaagttgactattacttttacttatttttttactacatgcaatataaaaggaaaaagaaaacagtaaaaagatatttgggcttgcttctggaaaagcaaatgaatgtaagcaaagaaagtgaaatccatgttctttcccagtgagctagaagaaaaaatggttagaaattatatatgayaaaagaggaaagtttaaaataataagcaaaatcctgggcttcagtggatacaaaataaagttgacaagataggctaggactcaaaaggagggttttgttggttggaactcctagctttttatagcttctcaagctgggttagtcattgttcattatattttagataaatgtaattgatttggggttcacwtgttacttcatatcacctacaacactgcttttcattaatgtagctcctggtttttcctataatttgggtttttttttctaagcccaagacttttatttgaagaatatactaattataagcagtaataataatgcttaaagaaaacaaagaggagaataaaattaataaatggtctaaatagtctaatatctatactcttgctttatgattacagaggaataataatggtcttctcttatggattgaatgaaaactataatagcataaaatattttaaaatttttcacgaaagcatttggcctttgaatctaaaaataatggcagatatacatttttcaagcaaacacttgccttaaggaatggaagaattgaatgtttcatttctgtgcaaaaaatatactgaggaaagtcaacatattaatgtaaaattttactaactttgagaaagtaccattcaaatgtttcaccttctgcttttaatgtcagcatttttcctccaaataagcaggtgttgaaactagttttaattatatagttttgtttttagcagtgttcaaaatatgtatctttacaattgcatttctagtatctcctccttaattatagcactagatttctcattgtgggactataaacttctttttaaataaaatgatacaatgttttatatagagatgaaaactttatctaaaaatttgcwttttaattattcacattttttactgtcctgcaaaaaggctcattctctgacatttttatctatgacctttctagtcttcatttgttttcatattttttacttttatttcagattcatggggtatatatgcaggtttgttacatgggtatactgcatgacattgaggtttgggatatgactggtcccatcacccaggcagtgagcacagtgcccaataggcagtttttcagcccatgaccctctctctctcctcactagggatctccactttattgttcccatatttatgtccatgctttcccaaggtttaactccttcttgtaagtaagaacatgtggtatttggttttctgatcctatgttaatttgctttagtctttctytttcttgatttgtactcttataatgcactcttataaatatcaaataccaggcaagaaaaaaatcagagagaaaatatttgtgtcaggtaagctgctttatctaaattactgaaaaaaagttgtaaggaaactgtgttttagaatactaagatttattttaacattttaaaagttgaaattacttaatttaccacataatttaataacactgttctcatttttttagggcattcgaaagttgttaccttaagccaaaaaactattgaatttactctgcctactgtgaccaatacarttggaaaacctacctataaaggtaaaagaatcactacaatacagacatatgaaataaaactttatgctatattctcatcgtctctatttaccaacctcaaacctctgggcttccttcttcaaacaaccaaccttatgggtgaggcatggtttcccaaacctttcttcaaacaagtaaaaatatatatgtaaacagtggtttgtggttctgaataaccacaggcttatatgcttatatcctcctcacttttgacccaggtaaattgatagaaatttctttcatctgtcacatttttaagctactgcatgatattctatgatgtgaatgcatcctaatttattcaacgattcctctacagaataacattttatcatcgttttttgccactacaagcaatggtgcaataaataccattgttcatatatatttatgtcacagtgattgcatttctataaaaaagaacatgtaagtgaggttggtgcattaaaggtatatatcattttaattttaatagatattagcaaacgtttcaaattactatggctaatagctctgctagtaaatgcatgaaatgcctatttccaagcacctaagccagaactagacttttcatgcattggaaatattaagaatattaaataatattgttaagatatcagtaccactcaaagtgatctaaggattcagtgcaatctctattgaaatcccaaatactttttttacagaaaaatgtaagttttttttttttttaattcatacagaatcttaaggcagcagtcctcaacctttttgacagcagggaccggtttcgtggaagacaatttttccatggaatggtggtgggggaatgattttaggatgattcaggcgcattacatttattgtgcactatatttctattattattacactgtaatatataatgaaataattatacaattcaccataatgtaggatcagtggtagccctaagcttgttttcctgaaactaggtggtcccatctgggggtgatgggagacagtgatagattatcaggcattagattctcataaggagcacacaacctagatccctctcatgygcagttcacaatagggtttgtgctcctatgagaatctaatgctgccactgatctgacaggaggcagagctcaagtggtaatgccagcaatgaggaacagctgtaaacacagatgaagcttcccttgctcacccactgctcacctcctgctgtgtggcccagttcctaataggccacagaccaggagttggagaccctgcccctataagggacccgatagtcaaaataatcttgacaaagaacaaaattgaaagacttacacttcataatttcgaagcttactgcaaaactacaataaccaaaacagtatggtactggcctaaagacaaacacatagtctgatggaataggatagagagctgagaaataaaccctcacatatatggtcaaatgattttttacaagagtgctaagactaatcggtmtggaaaaaatagtctttacaacatatgatgctgagaaaactagatatccacatgcaaaataatgacrttgtgccctttatcttacacakacaaaaattaactcaaagtagaccgaaaacctaaaactaagagctgtactttaaaactcttagaagaaaacataggagaaaaccatatattggatttggcaatgacttcttggatgataccaaacacactgtccaaaaaaatagacatgttagaatttatcaaaattaaaaactttcagtcatcaatggaaaatatcaagagtaaaaaggcaaaccacagaatgggagaaaatatttttaaatcacatatctgataaggtattaataatccagaatatatagagacctcctacaactcaaccacaacaacagaactcaattttaaaatgggcataggccagcctcctagagaaacactartctgatctgatcaccctrccctctggactgaacaygcacagcaccctgcytccctggattgggaaagccctctacagcytgagttgctgaggtgccccacctccctaggagtgaagccaacattgcactgctgcacaccccccagggccaaagccacagatgtgcccccatcattcctggaccttgctgtcactgcacctgacctcacagagcctgcgccactgctgtgtcccattactccagggcttagagttcttggtgcatgaattgccactgtgtcctattggttctgtagcctgaattgcaattgtaccctgctcattggggcctaaacctctggaaaacctcttccttcccagagccatgccattgctgcaccctaacacccaggatgagtcagcaacatgcctgatcctgggcctgagatactgggaagtgcctcagaatcacagtacttggccttgtgggagagctgcatcacccatacctaaaagaataaacctggacctacaccacaggtgtcctggcagttcaacaagacactgagccccagaccccagctccacagccactctgagcacctgttccctgtaacacagcactgcttggctgcctctggcctgtgtcaggctcaacaccaagagagatgccctcaggtaaatctactactatggggtaactagaacagaaggatctttaaagtcctttacactgagaaatggactccactactgtgcctacccagaatgagagccactgcactttgcccaactaatacctgcagacaatatctgcaggtgacagtctycccaaggaagccactataaaaacaaaaattagcaaatagaacttaattaaactaaagaccttcagcactttccatccaacagcagcagaacatacatttttttctagtgcatatggaacattcttaaggatagaccatatattaggccataaaacaagtcttaacaaattcaagaagattaagaatatacctaatactatttctgaaaacaatggtatgaaattagaaattaaaaacaaaaggaatcttgaaaatgtacaaatatgtagaagttttaaaacatgctcctgaacaaccaaccagtaggtgaaagaagaaatcaaaagcaatacttaaaaatatattgacaaatgacaatagaatcacaacgtatcaaaatctatgggaagcagcaaaagtaattctaagagggaagcttatagcaataaatgaccacattataaaagaagaaagattccaaataaatagcctaatgttatgcctcaaggagttggaaaaagaaaaacaagccaaagtttgcagaaggaaagaaataataaagattagaccagaattaaatcgaatagagaatagaaaaactatagaaaaaaaaatcaataaaaccaagagttgctttttttgaaaaaaataaaataaaatagacaaaatccttgctaggcaaactaagaaaagaagagaaaaactcaaataaaatcagaaatgaaaatgaagacattatagtagataccaaagaaattaaaaggatcataagagactagtatgaaaaactatatgccaacaaattggataaaataaaggaaatgaataaattcctcaaaaaatataagctaccaagattgaatcaggaagaaatagaaagcttagacaaaccaataccaaataaaaaggttgaagaagtaattaaaagcgtttcaacaaaaaaggtcagaacatttcgaggtggcttcacagcttcacaccttcacatttgaatactacgaaacattcacagaagaattatcagtgcttcttaaactcttccaaaaaaatcgcactagaaggagtattttcaaacacgttttatgaggccagcatcacctcaagacgtaagccaaagaaagacaccataggagaagaaaactacagagcaatatctctgatgaacattgatgcaaaaatgctcaattaaacattatcaaactgaattcaacaacaacaattaaacattatcaaacttaattgaaaacaacaacaaaattgaacatcatgagcaagtgggatctattgctgacatgtagggctggttgatcatgggtaaattagtcaatgtgatacttcatattcacagcataatctcagatgatcccccatgatggtctcagttgacaaagaaaaagcgtttgacaaagttcagcattctttctttattgaaagttttaatagtataggtatagaaggaaagttcctcaacataacagargccatttatgaaaaatctacagctgatggaggaatattttccaagcaaatggaaagcaaaaaaaaaccagggattgcaatcttagtctctgataaaacagactttaaaccaacaaagatcaaaagagacaagggcattacataatggtaaaaggatcaaagcaacaaaaagagctaactatcctaaatatatgtgcatccaatacaggagcacccagtttcataaaaaaagttcttagagacctacaaagagacttagactcccacacaataatagtgggagactttaacaaccccgtgtcaatattagacagatcaataagacagaaaattgacaaggatatccaggacttgaactcagctctggaccaagcagacctaatagacatctacagaactctccaccccaaatcaacaaaacatacacttttctcagcaccacaatgcacttattctaaaactgaccacttaattggaagtaaagcactccttagcaaatgcagaataagggaaatcataacaaatagtctctcagaccacagtgcaatcaaattagaactcaggattaagaaactcactcaaaaccacacaactacatggaaactgaacaacctgctcctgaatgactactgggtaaataacgaaatgaaggcagagataaagatgttctttgaaaccaatgagaacaaagacagagcatatcagaacctctgggacacatttaaagcastgtgtagaaggaaatttatagcactaaatgcccacaagagaaggcagagaagatctaaaatcgacacactaacatcacaattaaaagaactagagaagcaagagcgaacaaatccaaaagctagcagaagacaagaaataactaagatcagagcagaactgaaggagagacacraaaaacccttcaaaaaatcagtgaatccagagttggttttcttgaaaagatcaacaaaataaataggccactagccagactaataaaaaagaaaagagaagaatcaaatagatgcaataaaaaatgataaagggaatatcaccaccgatcccacagaaatacaaactaccatcagagaatactataaacrcctctacgcaaatwaactagaaaatctagaagaaatggataaattcctgtacacatacaccctcccaagactaaaccaggaagaggtcgaatccctgaataggccaataacaagttctgaaattgaggcagcaattaatagcctattaaccaaaaaaagtccaggaccagacggattcacagccaaattctaccagaggtacgaagaggagctggtaccattccttctgaaactattccaaacaatagaaaaagagagaatcctccctaacttattttatgaggccagcatcatcctgataccaaaacctggcagagacaatagaaaaaaagaaaatttcaggccaatatcactgatgaacatcgatgtaaaaatcctcgataaaatactggcaaaccgaatccagcagcgcatcaaaaagcttatccaccacgattaagccggcttcatccctgggatgcaaggctggttcagcatacacaaatgaataaacataatccatcacacaaacagaaccaatgacaaaagccacatgattatttcaatagatgccgaaaaggcctttgacaaaatttaacagcccttcatgctaaaaactcttaataaactaggcattgatggaatgtatgtcaaaataataagagctatttatgacaaagctacagccagtatcacactgaatgggcaaaaactggaagcattcccttttaaaaccggcacaagacaaggatgccctctctcaccactcctattcaacatagtgttggaagttctggccagggcaatcaggcaagagaaagaaataaagcgtattcacttaggaaaagaggaagtcaaattgtctctgtttgcagatgacatgattgtatatttagaaaaccccatcatctaggcyccaaatctccttaagctgataagcaacttcagcaaagtctcaggataaaaaagcaatgtgcaaaaatcacaagcattcctatacaccaataacaaacagagagccaaatcatgagtgaactcccattcacaattgctacaaagagaatcaaatacctaggaatccaacttacaagggatgtgaaggacctcttcaaggagaactacaaaccactgctcaaggaaataagagagaacataaataaatggaaaaacattccatggtcatggataggaagaatcaatatcgtgaaaatggccatactgcccaaagtaatttataggttcaatgctgtcccaatcaagctaccattgactttcttcacagaattgtaaaaaactactttaaatttcatttggaaccaaaaaagagcctgcatagccaagacaatcataagcaaaaaaaaaaaaaaaaraaagaaagcygaaggcatcatgctacctgacttcaaactatactacaaggccacagtaaccaaaacagcatggtactggtaccaaaacagatatatagaccaatggaacagaacaaaggcctcagaaataatgccacacatgtagaaccatctgawttttgacgaacctgacaaaaacaagcaatggggaaaggattccctatttaataaatggtgttgggaaaactggctwgtcatatgcagaaaactgaaactggacccctcccttacaccttatataaaaattaactaaagatggattaaagacttaaacgtaagacctaaaaccataaaaaccctagaagaaaacctaggcaataccattcaggacataggcatgggtaaagacttcatgactaaaacaccaaaagcaattgcaataaaagccaaaattgacaaatgagatctaattaaactagagcttctgcacagcaaaagaaactatcatcatagtgaacaggcaacctacagaatgggagaaaatttttgcaatctatccatctgacaaagggctamcatccagaatctmccaagaacttaamcaaatttmcaagaaaaaaaaatcccatcaaaaagtagrcaaaggakatgaacagacwcttctcaaaataagatgtttatgcagccaacaaacatatgaaaaaaagatcatcatcactggtcattagagaaatgcaaatcaaaaccacaatgagataacatctcatgccagttagaatggcgatcattaaaaagtcaggaaacaacagatgctggaggggatgtggagaaacaggaacacttttacactgctggtgggactgtaaattagttcaaacattgtggaagacactgtggtgattcctcaagaatctagaactataaataccatttgacccagcaatcccactactggatatataccccaaggattataaatcattctgctataaagacacatgcacatgtatgtttattgcagcactatttacaatagcaaagacttggaaccaacccaaatgcccatcagtgatagactggatgaagaaaatgtggcacatatacaccatggcatactatgcagccataaaaaagaatgagttcacgtcctttgcagggacatggatgatgctggaaaccatcattcacagcaaactaacacaagaacagaaaaccaaacactgcatgttctcacttataagtgggagttgaacagtgagaacacatggacacagggaggggaacatcacacactggggcttgtcgggggttggggggctaggggagggatagcattaggacaaatacctaatgtagatgatgggttgatgggtgcagcaaaccacatgtatacctatgtaacaaacctgcacgttctgcacatgtaccccagaacttaagrtataataataaaaaaaaaacccacagctaacatcataatcaacagagaacaccttaaaacttctccactaagatcagctacaaggcagggatgtccactctcaccagttctatttgttcaacacagtactagaagtamtatcaaggacaatcaaacaaatttggattgcaaccaaatcagaaagaaaaatactctgtttgaagacaacatgatcttatatataggaaaccctaaagactacattacttaagtgctaactttgcaggatacaaaatcaacatacaaaaatcagatacatttctataaacaaataatgacctaactgaaaaagaaactttaaaagaaataatttcatttatgatagcataaaaaagctaagcattaatttaaccaaggaggtgaaagatttgcacactgacaactagaaaacattgatggaagaaattgaagaagtcacaaataaatggcaaaatattcagtgttcatggatgggaataattaacattgttatgttcatagtactcaaagcaataatacagacttaacaaaataccaatcaaaattccaatggtattattcacataaatagaaaacaatcctaaaatttgtatgaaaccacaaaaaaaaccatgaatagacaaagcagttacagataaaaggtaaaaacaattggaggcatcacatgtcctgatttaaaattatatttcaaagctatagtaatcaaactcatatggtaatggcacaaaaacagaaacacagaccaatggaacagagaaaccagaaatccaaatgtttatggtagactatttttttgttgttgagacagagacctactttgtcacttgggctagaatgcagtggcatgatcatagctcactgtcacctttaactcctgggttcaaacaatcctcctgccccagcctttcaaattgctaagactacaggtgcacaccaccacattcagctatttttttaattttttgtagagacaggatcttgctacattgccaaggctggtcttgaactcccaccacaccaggcccaatgatcaattaatttttgacaaggactccaggactccaggtgtatgcaatggggaaagaatagtctcttcaataaatggtgctgggaaaactggatttctatatgcaaaaaatataattgaacttttatcttacaccatacacaaaaatcaactcaaaatggataggagacctacatgtaagamctgaaactataaaactcctagaagagaacataggagaaaagatctttgatgctgactttggcagggatttttttgtatattataccaaaagctcaggctaaaaaacaaaataaataaataaataaataaataaataaggctgtgtcaagaaaaaacctcccacactgcaaagaaaacaattaacaaaatgaaaaggcaacctactgactggtaaaaaaaaaaaaaaaatttgcaaaccgtataactgataaggggctaatatcctaattttataaggaatacttacaactcaacagcacaaaaacaaataacttgattttaaaatgggcaaaaaatctaaacagacgtttctctgaagaagacacaaaaatggcatcagtaatccttagggaaatgcaaatcaaaactacaatgagataccacttcatagtcattaggatggccattattagaagaaaaaaggagagggttggggagaggagagaaagaaagagaataacaactgttggtaaggatgtggagaaattcaaatcctttttcaaaaccgtaaaaattataaaatatttagaaagaaatataacaagaagggacaatgcctttttcaaaaaaaattgtaattataattgtyggctacttataacaagacctgaaaaaagtattgagacacagcaatatcatttactatattaaaatatcaaattccaaagtatatttatatatatatacacacacatatatattacataatgcaattaaaatcagaaattttcakagctaaatacatttatatttaataaataaattctaaagattaaagatgaagtgttcaagaactaaaatgaaaagaaactgaactcctgttgtacaatatatacaaaactctggattaaagagttaaggccaaaaaatacaatttaaattagaagaataattaggaaaatatgtttaaccrtaatgatagaaagaaacataggaaatcctgaagcttaaaacttaaaagaaaaacatgtcagactactcattcttatagatgtcaatgggaaaagaggtaaaaaatgatatcaaaagagaagtaaagaagggaatgcacttgcagtaacggcagagtagttcacatacagcacgacttccacagctttgtgtgtaaccaccaaataaaccttgaattctatctcaaatcatgcacagaaatcaagatgaatcatgtacctaaatcttaaatcccaaagtataaagcaccttaaagcacacataggagaataagtttgcgaccttactgatgggaaataaattagtaaccattaaagtaagctcgataattagacttgatcaaaattaaaaacttcacacataaaaagacagcattaagcaaacaagcacgctatgaatggagaaaaagtgtttataatacatatagcttataatagacttctctgcagaatatgtaaagaacttttatgttaatattaaaatgacactcaaaaattgagtatattttttctaaaagcagatacacaaaaagaaggtatacaaaggacacacaaatgatgaaaatgcatgtaaacagtattcaccattagtcatcagtgaatagcaagttaaagccacagtgaggtactcctattatacacacacacacacacacacacacacgagaatggctaaagttataaagtgacaataccaaatgttgatgagaatgtgcagtaactcttattgctggtaagggtgtaaaatggtacaactactttgaaaaattgtttagcagttttttactataaggagtgtgtactaatagaacttgattagaaaggagtatgaggaaacgttcttagagtgatggcaatgttctgttacataatcaaattgtgggttacacagctgtaggcattgtcaaaactcacctgttataataactaagattcattcctccatgtaaattcaactcccagaatgagaactacaaataaatattgagctctagtcatatgtttggttttcatcactgtatggcttggtgatcctttttgtgcattttaagttcaagcaaacaagcaaacacattaagggtaacagccaccatgttttcccattattggaaaaggtaagtttaaatatggagagaggaatgagtagattaaccctgtagtatattgaattagagttgaaaatatctgcrtgaacccacaggtttatacaaacrcacacatcctttagctgttcctgctcagagaacctaaaagcaatgacacatcgataggaatgagcacacctagcacccaaatctacatttctaaatattattctccattaaaatgaatcagggattctttaaaaagagaattattcaatggctgacataaatagaaaatgcaaaatcatacaacttctagatgacaaatctaggtgtccttgggtgtgtcaatgactgtttagatatgacaccaaaggcacaatcatgaaagaaataawtgataagctagacttcattaaaatgaaaaatgtctgctctgtaaaaacattaaaagagaataagccmcagagaagatctttacaaaagacatatctgataaagaactgttattcaatatatacaaagtgttcttaaaacttaattatttgagaaaatgaacaaatcaatttaaaaatagttgagggtactctgtttttttaatgtgaacaatttattaaaaaagacaaaacaggctgtgaaaatgtagataaaaggagattaaagagattagccatcgaagtaattaatagtaccaatggattataaatagttgaacaaaataaaatctatgagctctgctcatatgaaattaaragaaggaagaaaaggaggtggtggtgaggaaaggagagaaaaagggagaaggaagcagagggaggaaaaaggaaaagctatttctttcaatagaatggcagctgataaaggtaaaaagaatgatcatgttagaaaattgcaatagatttttaaaaaaattaatgggtgagtttatgggaactaagtatctgccccaaattacctattacttataaaagtaaaaaaagtactttacagtagagaaacataatagacaccattacaatctaatgatcaaaattkccatcacaatattttgaaaaaatataacccattgagaaggacacaacattacatctgggatactcctcccgaagatgtataacctgaaagtaaccatgagaaaacttcagataaaaccaaattgaaaaatattctacagactggtgttaaaaatatgtaggtcaagacacaaaaagaaatataaattaactattccagattaagagagactaaaaaaacccacaaatttagtgcatggtcctagattcaatcttagtccaaaaaaatctataaaggacattattatgacaaatgcaacttgaatatgggttatgaattagatgrtaagttgagtcaatgttaaatttcctatttttggtaattgtgttgtgatgatatattatcatttcttaagaaatactaaagttttaygggtaaagagacattatgtttccaagttacccctctatagttcagaaaaaataatagtttatgtattaaatatttatcatgtttataaatatatgtacataatgtttataacacatacatctacatatgaacatagagaacattataaagcaaaaaggacagaataaaactgaataaattctagaagggattggaatcccttctagaattctttcagtttctctgtaaacttgaattgatagaaaaatcaaaagatttttaaaaccctattatacaaaaagcttctatgaaacaaaaaaggcaactaacgggaaaatgggcaaagaatataagtaggcaattcacagaagaaattaaaatagaaataatagtaagtctattgttactaaatagaaataattctcattaaagataaaactgtttatattgtttatttttaaaattattttaaaaattttagtaaacatacattacataaagtttgccattttaaccatttttaagtgtacagtttagtcgcattaaatacattcacactgctatgcaactatcactaccatctacctccagaacgttttttatcttgcaaaactgaaactctccccattaaacattaattccttatctcctacccccagttcctggcaaccatcattctactttttgtctctataaatttagctactataagtaccttatgtgggtgtaatcatacctatttatttctttgtggctggcttatttcacttagcataatgtcttcaagattcatccatgttgtagtatgtgttggaatttccttcctttatttaactgaatcatattacattgtatgtatataccacattttgcttaattattcatccatcagctgacacktgggcttcctctaccttttggctattttgacaaatgctgctataaaaacgggtgtacaaatatttgttcctgttctactcttttgggtatataaatgaaagtggaattactggatcatgtggtaattctattgttaattttttgagaactcaccatactgtttaccacagaggctgtgccattttcctctgtatctactcatctgtttctttagttttaggggcactggtttgctctgtgacctcaattctcatatggatctaagtttggtcagcttttttcttactatgtgaatggaagagatgacttccaagctctttatgtgccagacaagaagttgtagtgtagtgttttcaagattcatctatgttttagcatttatcagcacattattctttttttttaatactttaagttctaaggtacatgtgcacaacgtgcaggttagttacatatgtatccatgtgccatgttggtgtgctgcacccattaactcatcatttaacattaggtatatctcctaatgctatccatcccccctccccccaccccacaaaaggccctggcgtgtgatgttccccttcctgtgtccacgtgttctcactgttcaattcccacctatgagtgagaacatgtggtgtttggttttttgtccttccgatactttgctgagaatgatggtttccagcttcatccatgtccctacaaaggacatgaattcattcttttttatggctgcatagtattccatggtgtatatgtgccacattttcttaatccagtctatcattgttggacatttgggttggttcaaagtctttgctattgtgaatagtgccacaataaacatacgcgtgcatgtgtctttatagcagcatgatttataatcctttgggtatatacccagtaatgggattgctgggtcaaatggtatttctagttctagatccctgaggaattgccacactgacttccacaatggttgaactagtttacactcccaccagcagtgtaaaagtgttcttatttctccacatcctctccagcacctgttgtttcctgacttttcaatgatcgccattctaactggtgtgagatggtatctcattgtggttttgacttgcatttctctgatggccagtgataatgagcattttttcatgtgtctgttggctgcataaatgtcttcttttgagaagtgtctgttcatatccttcacccactttttgatggggttgtttttttcttgtaaatttgtttgagttcattgtagattctggatattagccctttgtcacatgagtagattgcaaaaattttctcccattttgtaggttgcctgttcactctgatggtagtttcttttctgtgcagaagctctttcgtttaatcggatcctatttgtcaattttggcttttgttgccattgcttttggtgttttagacatgaagtccttgcccatgtctatgtcctgaatggtattgcctaggtttccttctagggtttttatgggtttaggtctaacatttaggtctttaatccatcttgaattaatttttgtataaggtgtaaggaagggatccagtttcagctttctacatatagctagccagcaccatttattaaatagggaatcgtttccccatttcccagcaccatttattaaatagggaatcctttccccatttcttgtttttgtcaggtttgtcaaagatcagatggttgtagatatgyagcattatttctgagggctctgttctgttccattggtctatatctctgttttggtaccagtaccatgctctttgcttactgtagccttgtagtatagttggaagtcaggtagcgtgatgcctccagctttgttcttttggcttaggattgacttggcaatghgggctcttttttggtgccatatgaactttaaagtagttttttccaattctgtgaagaaagtcattggtagcttaatggggatggcattgaatctgtaaattaccttgggcagtatggccattttcacgattctattgattcttcctacccatgagcatggaatgttcttccatttgtttgtgtcctcttttatttcactgagcagtggtttgtagttctccttgaagaggtccttcacatcccttataagttggattcctaggtattttattctctttgaagcaattgtgaatgggagttcactcatgatttggctctgtttgtctgttattggtgtataagaatgcttatgatttttgyacattgattttgtatcctgagactttactgaagttgcctatcagcttaaggagattttgggctgagatgatggggttttctagatatacaatcatgtcatctccaaacacggacaatttgacttcctcttttcctaattgaataccctttatttccttctcctgcctgattgccctggccagaacttccaacactatgttgaataggagtgatgagagagggcatccctgtcttgtgccagttttcaaagggaatgcttccagtttttgcccattcagtatgatattggctgtgggtttgtcatagatagctctgattattttgagatacatcccatcaatacctaatttattgagtttttagcatgacgagttgttgaattttgtcaaaggctttttcygcatctattgagattatcatatggtttttgtcttttgttctgtttatatgctggattacatttactgatttgcgtatgttgaaccagccttgcatcccagggatgaagcccacttgatcatggtggataagctttttgatgtgctgytggattcggtttgccagtattttattgaggatttttgcatgaatgttcatcagggatattggtctaaaattctctttttttgttttgttgtgtctctgccaggctttggtatcaggatgatgctggcctcataaaatgagttacggaggattctctctttttctattgattggagtagtttcagaaggaatggtaccagttcctccttgtacctctggtagaattcggctgtgaatccatcgggtcctggactttttttggttggtaagctattaattattgcctcaatttcagagcctgttattggtctattcagagattcaacttcttcctggtttagtcttgggaggatgtatgtgttgaggaatttatccatttcttctagattttctagtttatttgcgtagaggtgtttatagtattctctgatggtagtttgtatttctgtgggatcagtggtgatatcccctttatcattttttattgcgtctatttgattcttctcttttttcttctttattagtcttgctagcggtctgtcaattttgttgatcatttcaaaaaaccagctcctggattcattgattttttgaagggttttttgtgtctctatttccttcarttctgctctgatcttagttgtttcttgccttctgctagcttttgaatgtgtttgctcttgcttctctcgttcttttaattgtgatgttagggtgtccattttagatctttcctgctttctcttgtgggcatttagtgctataaatttccctctacacactgctttgaatatgtcccagagattctggtatgttgtrtctttgttctcattggtttcaaagaacatctttatttctgccttcatttcattatgtacccagtagtcattcaggagcaggttgttcagtttccatgtccttgagcggttttgagtgagttccttaatcctgagttctagtttgattgcactgtggtctgagagacagtttgytataatttctgtgcttttacattagctgaggagtgctttacttccaaatatgtggtcaattttggaataggtgtggtgtggtgtggtgctggaaagattgtatattctgttgatttggggtggagagttctgtagatgtctattagttccgcttggtgcagagctgagttgaagacctggatatccttgttaactttctgtctcgttgatctgtctaatgttgacagtggggtgttaaagtctcccattgttattgtgtgggagtctaagtctctttttaggtctctaaggacttgcttcctgttgaattgatccctttaccattatgtaatggccttctttgtctcttttgatctttgttggtttatcagagactaggattgcaacccctgcctttttttgttttccatttgcttsgtagatcttcctccatccctttattttgagcctatgtgtgtctctgcacgtgagatgggtttcctgaatacagcacactgatgggtcttgactctttatccaatttgccagtctgtgtcttttaattggagcattttgcctatttacatttaaggttaatattgttatgtgtgaatttgatcctgtcattatgatgttagctggttattttgctcgttagttgatgcagtttcttcctagcatcgatggtctttacaatttggcatgtttttgcagtggctggtaccggttgttcctttccatgtttagtgcttccttcaggagctcttttagggcaggcctggtggtgacaaaatctctcagcatttgcttgtctgtaaaggattttatttctccttcacttatgaagcttagtttggctggatatgaaattctgagttgaaaattcttctctttaagaatgttgaatattggcccccactctcttctggcttatagagtttctgctgagagatcggctgttagtctgatgggcttccctttgtgggtaaccggtgtttctctctggctgcccttaacattttttccttcatttcaactttggtgaatctgacaattatgtgtcttggatttgctcttctcgaggagtatctttttggctttctctgtatttcctgaatttgaatgttggcctgccttgctagattagggaagttctcctggataatatcctgctgagtgttttccaacttggttccattctccctgtcactttcaggtacaccaatcagacatagatttggtcttttcacatagtcccatatttcttggagtctttgttcatttctttttattcttttttctctaaactcttctcgcttctttttattcatttgatcttccatcattgataccctttcttccagttgatcgaattggctactgaggcttgtgcattcatcacatagttctcgtgccatggttttcagctccatcaggtcctttaaggacttctctgcattrgttattctagttagccattcatctaattttttttcaaggtttttaacttctttgccgtgggttcgaacttcctcctttagcttgcagtagtttgatcgtctgaagccttcttctctcaactcgtcaaagtcattctctgtccagctttgttccattccttattcttttcttttaatggaatagtctgtaccacattttgtttatccgctcaccagttggtggacatttggattgttttcacttttagactattttgaatgatgctgctatgaacattcatgtgacattctttttgtggatatatattttcatttatcttggatatatacctattagtggaattgccgggttgtgtaggaaatttatgtttaatttttaggaagctgccacactactttttaaagtggctgtaccattttaccatcccaccagcactgtgtgaatgttctcatttatctatgtccttgccatcatttgttattgtctgtctgtcttatgatagtcattgtagcaggtatgaattattgatattttaaaatgagaaataatgcatatatatatggttaaaatgcaaatgatatagaaaagtatacaattaataattaaaatcacttttccttcaccaaatcctgtctcaaaaagtaactagtctcaagcattttgtataacataaagagaaaacctgtttagagtaatatgcatcctatgctgaaagtcatatatatatatttttatatgtacatatataattatattcaattataaagatatataaatatattaacataaatgtgtatataatttaatataaaatgtatatttattattatttattaaaagaaatcacacatcttttctgcaactaaactctttttttacttcaatagctttgtgggggtacaagtggtcttttgtcccctggctgaattgtatggtggtgaaatctaggattttagtgcacccatcacctgagttgtgtgcattatacccaataggtagtttttcatccctcacccacctgtcatcctctccccttctgagcctccagtgtccattataccactctgtatgcctttgtgtgcacatagcttagctgccacttataagtgagaacatgtggtatttggtttccgattygaattacttcacttagaataatggcctccagttccatccaagttgctgcaaaagacattatttcattactttttatggctgagtagtattccatgcatgtgtgtatgtatatatatatatacatacacacacacacatacacacatatgtatgtgcatatataaataaaacttttatatatatacacacacaccaacatatcwacacacacacacacacacacacacacacacacatatatacacacatatatatactcaccacattttctttatccactcatcattgcttttggggtcttagtcataaattctttgcctaggccaatgcccagaagaattttatgtaggttttcttctagaatttttatggtttcaggtcttagatttaagtctttaattcatcttgagtcaatttttgtacattgtgagagatagggatccagtttcattctctacatgtggctatcaaattttcccagcatcatttaatgaattggatgtcattttcccaatttatgtttttgtatgyttcatcaaagatcatttggctgaagtatttggctttatttttgggttctctattctgttccattagtctatgtatttacttttataccagtaccatgcttttggcatcttcgtcatgaaatctttgcctgatcctatgtccagaatggcattgcctaggttgtcttccagggtttttatactttgggattttacatttaagtctttaatccatcttgagttaatttttgtataaggtttaaggaaggggtccagtttcaatcttctgcatatggctagccagttatcccagcaccatttattgaacagggagtcttttccctattgcttgtttttgtcaggtttgtcaaagatcagatggttgtagatgtgcagccttatttctgggccctctgttctgtttcattggtcggtgtgtctgtttttgtaccagtaccatgctgttttggttactgtagccttgtatcatatcttgaaagtctttccgtatcagcacatccaaatcaatcaaattatttttaagtcctttatatttagatctatcatagcttatgagcctctgttaaataggccctttggttgtttcccgttttttctatgtaacaaacaatgttgcaacaaagattattgaaatcaagagatattttatgactccatcttagtttccattagcttaaagatgagtcttctgcctaaaatggacttgctgttatttcctccatgatactaagttaattttgttgtggtttacaaattggcctctcatttaaaactgactgattttttgaagaaccatrggcatattaagtatatacattttttttgtatgccaaaatacaaaattccagtgaactggaactttttgaatgtctccattaagacttcttaaagtgtggtctctgggctagcagcatgggcatcgcctgggaacttctaagaaatgcagtttcttaggccscaaccccagaactactgaatcagaagctctgggttcaggtccagaaatctgttttagtaagttgtctgagcgattctgttgctagctaaagttggagaaccattatctatatttatactsctctaagttgagaatgtcacagcatcattctataaaaacaataggtaggtagatttatatactattttccattttcattgtttatattattcatacattctgttttccatgatatcatatacaataaaaattatatcaactrgagtaaaattaaactttttttcaattaacacataacttttctttaaagtgttacatgctgctgcccgaaaatctgtaccacacccatacttttgagaatgaaggaaattctgagcaagataagcaacatgacaaattcagaaatgcaggaaaggaaattgcaagtatagaagccttttgaaaataatactgactcrtgtggatggtgcttattgaaaaacagctggaaatacagtggatcaacagggtaggcccagatcacagaaggcctgaccaggcagtggtgagtttgaaagtttcaaattactttattacttttcttttcaattttaaagaagttatgcaattatcttttaaatcacaaataataaaaatattcaccctattcaaaatattaattttttgaacaatgcataaccaacttagaaaaaggaaaagatgtaaaaaatatatgacaataacctgatatgtgttaagcataytctgtagaatttgtaatggcacaaaatacaactgctaataattttaaagatgtgattcttaccaatcaaatgttttataacactgaaatagtatttgtaactgcgtttttactgtcccctgaagagcataaatattattggctataaaattgtcctaaacccaatctgggttatcactgacataaatatttagacttgcagaatattcttttatgccttaaattttcctatttttccccagcaagaatcagaggaatgagcagtaatattaatctaaatattctggagttatgtttctgccaaaaaataataaagaaaattggatttctactcaaacaaaataaagtgaaataaaatgactgaaatagtttccatcctttataatctcccattgtaaasatattatttacattttatatagtaatgaaaaatgaacaatttatatggttagaaaaactcatgaattcagcataatgaaactgtcaagagaaaataaatggagaaattattccctagtgatcaattattctctaaaactgtgaaagatcccaaaggtaacataaatgtgaactatattaataactctggtgagggttttggagagaatatatgcagaaatgaatagcagaattgttattgcaagttgccgataattgggttgtgaataaagtggattttatgtttctttctataattatttttatagttttagtgtagtatggaagactacctgcaatggrtggtgattgttagggttatctaaactagatccaatccagcttctcagtttgcccctatgaactacctggataacaatgccagctctatcttaattcccattagttaagtctgggattcagcaggcttttctataaaacatggaggaagttttattttcactgaagctctgcctttatagaatacttatttgattaaatgaggtaatgcattttctaaatcagtacttttcaagcctaaatacaaaatagaactcacctggggcttttaaagcctaccagttttctgccttgcatccccagaccaattaaaccagattctctgtgtgattctaataygcagccagagttgagaaccatggagcttattgyttgaagaggatacaagggaaataaactaatgcccaagcccatatgcaaatggttgcagttgatttttttttttttaatccaggtcctgtagctactggcagaggagacccagttaatagattcaagctatcttggcttcatttaaatggtcctcctcctagaccatctttttcatggcaattatgactcctcagcacttttcagtagaatgttttgtgatataaaaatattccacacctgtgccctacagtatgggaggtatgactcatatgtggctcttgggctctttatatgtgggtagtgtgactgggaatctagatttttaattttacatacatttgattagtttaaacatgaataatcctatgtggcttgtggctcccatattgaactgtgcaactccagaattaccaatgatccaatagccaccaggacctgggaaggcagtgagctattcagagggatatacagaaaatatttctgcttgaatatgaaccagtcattagactggttcaactaaaaatagctccttggagaagtaggaccaggaatagtctttcaactgagctttggggtaaaatgtaatactttttcaggatagcaggataacccttaatattgagcaggggatgccagttttaaccaatgactctaattagctcaaattaggccagaatcagggcaaatgtgaatagggtctagggtctttgaaagactttggctgccatcaaaggtaaggctactcccagattatgaggtagtcagatctaagaatgaatactcagtgaaccctggaaattcaaaaattcctttggttctattgtgagaaactcaatagctgacaacttgctggagatcatatgaatgctttaaataaactgaatgacaacagggagtatttctctagtcttttgaatgtgtttttcttttgattgatctaatgatggtgctgctaaagacaaatctgaactgctgaagccaaatataaatgggaagtctgttttggtatataaattaggatattcatcaacaaatgctgtccagaaagaaagcagtggaagaataatattttattcataaaatgtatggggccattcatgctgttcaggccattcaaattggcaaggggccttctagtacaccattctttacttgtcactatctctaatttttttttwatttaagttctgagatacatgtgtaggatgtacaggtttgttacatagttaaacgtgtgccatcgtggtttgctgcacccatcaaccttatcttcatccttatccttttttaaaaaaattttgattatcatctaagtttaatataaatatatatgtttgaaagagtaataaaaaaggaagaactgaattgcatccatagcaggacaagtttcctcatacgttaaagaggtgttcagaaaattccatacagtatctgctaaataaacatgtttcgcagcttagcaaagattatatgatagcagcatccatgatttgaagtaaaacagcatttgctttcttctgctggaggtcgttgctcggggcgatgtgcatgttcttagacctacagccttaaggaagggcttgggggtggctcagtgcatggccccagtgcagacacttccaaaccccaaacaatgaatcaaccaaccaaacacacaaacatcaaacaattgtctcctttgagttcctcttgaccgaatggaggctcagcaaggactgctgtagaaggtacattaacagattttggaatgaggaaaataccttaatacctaggtattaagcctcgcatgcattagctatttttcctgatgctctccctcccccmacccacaataggccccactgtgtgttgttcccctccctgtgtccatgcrttctcattgttcagctctcacttataagtgagaacctgtggtgattggttttctgttcctgcattagtttgctgagtataatgacttccagctccaaccatgtccctgcaaacgacatgatctcattcctttttatggctacatagtattccatggtgtatatgtacattttctttatccagtctaccactgatgggcatttgggttgattccatgtctttgctattataaataatgctgaaatgaacatacatttgcatatatatttataatagaatgatttacattcctttgggtatatacccagtaatgggattgctgggtcaaatggtatttctggttctagatctttgaggaatggccacactgtcttccacaatggttgaactagtttacactcccaccagcagtgtaaaagtgttcctatttctccatagcatcgccagcatctgttgtttcttgactttttaataatcgccattctgactggtgtgagatggtatctcattgtggctttgatttgcatttctctaatgattagtgatgtggagcttttcttcatgtgtttcttggccacataaatgtcttctttcgagaagtgtctgttcatgtcttttgcctgctttttaatggggttttttctttaaatttgtttaagttccttgtagattctttatgttagacctttgtcagatggatagatggcaaaaattttctcccattctgtaggttgtccgttcactctgataatagtttcttttgctgtgcagaagctccttagtttaattagatcccatttgtcaatttttsttttgttgcaattgcttttgacattttcatcatgaaatctttgcccatgcctatatcctgaatggtattacctagattttcttctaggatttgtatagttttgggttttacatctaagtctttaatccatcttgagttaatttttgtataaggtgcaaggaaggagtccagcttctgcatatggctagccagttatcacagcaccatttattagacagggcatcctttccctattgcttgtttttgtcaggtttgttgaagatcagatggctgtagatgtgtggtcttagttctgagctctctattctgttccattggtctatgtgtctgtttttgtaccaataccaactgttttggttaaggctacactatctgtaatttaaatcaaattgttagtgtcctaaacattcaggagatcagatatcaacagaagtgactagtaagatagtgttaccatttgatgccacagtacttttttagaggcaaaaatcccattttctttttcaagaagaacatgtgattacttttggggagggtttgaggaacttcttttctcccttcataagttggtggctaacattttgcacaggggccatgattccaggtgcagagacaaaaggtatgttcactggggagttcctaggtaccagttgattatagagttattgttatgatgcaggggcaactgcctacttctgattttaaaaatggttctcagtgtgttgtgttcttatctatgtcaatgagcactggggtggcaaataaaattaaattttaataggttgtgggcattaattataacttawaggatataggatatgaattttcaacaaaattattgagccattgggccaaggaataagtggtgttgatcactaaaattcagggaactcataacttttaactgagtgagatcttggtgcatgaagcctgaaactttcatttatcattgtttaaatctaaaggcaggaactcccactcagagtttcactgagacaaagactgaagtctctgaattcacagattcaaactcagaaaaggccttttgattgctgtcttttcctaacccttttatcaccttcctagccagccagtcatgtacccaaattgcagatggtaagcttacaggctgggtgctcatggtcaacatttctttacccgccccccacaccccacaattacaggcatactttgcttgcaaagagcacagaattctcaaacccttcagtttgggcagaggtcacagtggtaaaatgtatgtgtggatacartctcgcctgtgagatctcatcttctcatagttaagtctatcagttcagagcacacattcatcatcgaggatcacgacacaagttcatctaacttgcttaaggacataaagctcataagcaacagataaagggtgggtaactagatgattggactctacagacaatgagtttaacctctagyatatactccatcacaaggacaaagtccataagagccagtctcataatgctaaagaaaaatttttgacacttgataaacatggtaaggaagactttattaaagaccattgcaatagaagagggagattcaactccaagtacagcaaggaaagctaagaatttatagacaaagagcagagtgaaggggtcagcagatggaaaattgttaagaggagatatcaagtgtagagggattcttgcttaaccggcctaacaagattcttcttagaggcagattaaggacttagacattaacggcgargggtgagaaacttggttagatatcaagcatgagagattctcgctaaactgacttagtaggatttttgcttaaggcaggccaaggatgaggcctagttgagaagrgggcgtagagaagcctagctaaagtttgaacacggagggagtcattgtcaatgttcagctaaaaagaatattttaggattgaaagatcattgatttttgaaaagagctctagataatattttgaaaaatgcctttcaattagtggaagatacgcctcaacatcaacacatgcacaagactgaacatttcagaaaggtttgtatgtgtgtatattagaagttgaattaaataaaaaaattataattacttgttgatttattttcagaatgtgtctttaccatatggaacaattttgaacttctaagatcaagcctttttgttgctgagggtaagaaaggagctctgtgatgaggttccagcttacttctattcgccagtgtccctgtaatgctttctggtgtgatgtaaaatcaattaaacaaaacttgtgctctgcatgttttgaaaatgtatggttctttaagtgtcgtattatttgcaagtctattctgtatgatcctctaatagagaaaagtcacctccatacatttcttacacttccagttaaaggaatttaatttaaaaaagagagtatcttgctttaccttttttcatrttaaaactagaaatgtgtggaagagatcagaacaaagtatttatttatataacatttattaaacctagtgaggctacaaagcgatttaccagatttaggtgaactatgaaagatattgtttataaactcaaagaacttatgctgtgtgggaatgttttcctgaaaattaagtttaattgatactagttaaaatgataattacttcactgacactagttaagaggaacattgaaaagtattatgtgaaaaatttcttgtaaatattaaatgttaggaatccagtatcttcatattrtcttattttctcttttggccctgagactgatgaattttcattatagtcaccatcatctctaatcatatgcctctttttatgtgacaatttgtcttactttttggaatttgtatcagcttctaatatttctgaatagcattaacattttggtttcttatttacttgataacccaaatgaatacgacaaaatgaaagaatagtattatatatttatattagatcttattcagaatccaaaaattatcacaccatttcaaagcctgcttatattggtaggctactgcttcagtgaaaaaaaaatcagtargtatttcagtttttgtgtttaatagtttaactgtttcacatgttattagaggagctcagtatattagaggagctcagacagtagttgtggatcccacagatagattcgaattgggttctttgtcatatccgtggtgcctctcagtagtacacagacacattttaaagaaaaacagatatattctccatcaggatagtaagttagtcttgaaaaatgacaggctttaatttgagacttaagtaaaggataacagtttatcccatttcacccacctctgttctgtatatttctttaagcaactctagagctcagagtttacattataacaaatcatatatgatgtgtaattttctacttcctgtaggattcttgtcacaacttaatatttgaaagatgatcattcagcctctacttaattatatatctggttacagagatcttactctctcaattgtaggaagtctctcactgttagaaatggttcataacattggggttaattctgccatcgtataagttatacccattgatgaagctagaatgaaactttaaaaatattttaaaggagattaaatgagataataaaagtgtagcctggcaccaaaaacattatctgtttattttcaacagatccattgaaaatgctttatgagaatgatctctatggctgtgaagattaaatagtatatttgaaagtggtgttgctgagtgggatcattaaggaaagttctactcagactcaaagacagaatagggatacrttatatcttattccattatagaatatattcctaatattatatcaatactctgcttaattaagaataatcctcaaatgttttaacaacataatattgactgcaaaactgaaatcacatgagaaactaatattcaagacaaaaaccctctatgtaaacactgaattctagtaattaaatttgtttcttgtaggagtacaggttaacaattctgaaaacactttatgtatatactgaggctgaattaataagtaaaggtatgatgaagagtgggagctgggttttacatgtttggagtgtgaaataggtatagataagcaagatggaaagcctggattgagccccaaagtaataggcatatggaaagtctttgaactattttagcaacttgtctgtaaatttaaactaatcgaccacagagcatttgcagagcaaaatgagaagatgaataagaagccctaaattttagatgtggacagaagaacagcttctgttttgaggctatatgttggattttataatttaaccattgtactgccaggttaggttttctatttccaaagtgggtaraacatactgtatttgtctcctcggggaaggaaaattaagcttaaaggtcttggaaaaagcattattataaccaccagttaraagatcaattggagagtaattgtaaaagtgccatgaagatatgaggcatgtaagaagcaacataaaaagggtggccaaacagcagttttaaaacaaaactgaatttactgcttactggcaaaggaagaatgcaccacacagatgtaagttcagaaagttgttcaaagcagaaattaaaggggttaaaagatatayagagaaaaacmccaaatagggcacggtcctgattaatggatgtggattatgagctgggttgtaaactyttatttgtatctggttacctttagagttagcatcactagtatggagaaacaaggtttcaaataggtctggaaagaagagagaaaattttcagagagcctagggtcatgcttgtatacccttgstcaaagatttccaagattttaacttaacaggtgtcattatcatgtacagtcttacttagaagcaagaaataaagctaaggaatttatagaggtaccttccattgataagatttaagggaaaactggtagtatttgataataaacacttcatacacagttacaagatttacattagttttgaggaatgacataaaaaagatggacgactaggaagcttcagcccttgttcctaatggaaacgttaaatatatacataggaaattttatggcattttcacttgctcttgccccaccagtgaggcatgaggcagttaggagtaagcagcccaattcccagttttctccctcaaaccagaagaagcagaatagagaatatttgccacattcaaagctatttgtgggcacccagagggactggtttctgtcttgccagactcaaggctcagtgtggatcttaagctgtagaaacagtggaaggcagtggtaggcaccatgccacatggaaactgcagggggaaagcagatatatgtatgtctaggcacagaaattatgrgcagaaggatataatagaacatgtgaggcccaaaaagcagctggggtgagactctttggaaaattaagacatctaagcagccgtctatatgagagaaattggggaggaaaaggcacactaaggccctggaaggacacattcccagaaaatacccatgaagacaagctgatcctaaaacycaagggcctgctgattagtgaagatcttttacaccgatctgcaaagactgagagaggtgtttgttttctcacatgcccagttttcaaatgaataccacaaaggattaaaaacacaaaacaaaacaaaaacaaacaaacaaaaaaactatgatcccttcaaaggaatgaagtaaatccctactggctttcagcatttggctcactagatgaagacattagaggaactatctgaaatatgctcaaagacctaaagtaaaacacaaagaactgacaaaaattgggaaaatgacatatgaacaaaatgcatcatcaatgagacagaaattatttaaaagaatgaaataaagattctgtgaagatggagaagtaggaaataccagaaatccatctctccacctacacagcaattgtactggaagaaagtatctgatgttactgtttttaactttggagtcgattagaaggctttcaatttctaggggtctacttgaggggggagggtgggaggagggagaggggcagaaaaaataactatcggstactaagattaatacctgggtgatgaaacaaacccacatgttacctgtttacctatgtcacaaaacttcacctgtacccccaaacctaaaataaacattaaaaaaaaaatctcttcactgggcgcggtggctcacggctgtaatcctagcactttgggaagccaagacaggtggattgcctaagctcaggagttcgaggccagcctggccaacatggtgaaaccccgtctctactaaaatacaaaaaattagctggctgtggcggcatgtgcctgtaatcccagctacttgggacgttgaggcaggagaattgcttgaacccgggaggcagaagttgcagtgagccgagatcacgccactgcactccagcctaggcaacagagcgagactccatctccaaaaaaaaaaaaaaaaaaaaaaaaatcttctctctaaacattcctttcactttatcccccmaataaatctccctttgcataacatttttcaacaaatactcaggccaaaaactggcactttaacttacgacttagaactgttgggaataaaactccagaaaaaagttgctattgagtactgaatgtctttattgataaactaaatatatatttaaagcataatacgataattatgtagaggataaaatataaattgttcacttaggagattaatacataaatcatatttacagaccwttgacttgagaaatacagttcgatgacatttcaatttgagcaaaagatgaggtgctcaagtatggcattctgtctcattaagacagaattcaaactttctgcaaagaaaaagtccctcatttcttggtgtgctccaggacctccatattctttagatttggaggcaccgcccattgaggagctggctgcagtgtcagcgtgagaaggaggaggaactccaggccaggggcggggtactccagatccactggcctcaaggacccctcagatggagtcagtgtgggagcacagagcctggcagctcgggaggcctgggtggaggggaaaagaacagtgctgctctaagacccagccccctcgtgggggagagagcagcagggcttggctctcagctgcatggcaggtgtggaaaagctccttgtgacggggtggctctcatggcctctcccagggcctccagcgttgttagcatctctaccagctcctcttgttgcctggagagtctggaggatgtctcttctttcagttcttgaacgagggtggtaaatttctccatcagcatctcgttggtgctattcaccttcttgtaggcatctacaaagccgggggtgttgaaagactttttctgtaccctgacatcttttaaagatgcctcagtctctacaatctgttttcttgccaatgagctgggatttctccttcacctgtgaatgcagtgtttctgcaagctgcctttcacctcttacacagagttggttcctaacagacaaagtcaataaaagtaagagacccagcagtaagcccatgaagtgtggacacaccactgtcttcccatcgaggctgtggaaagtgacttgaggactcgcgtcatggggtggcagccccaccatctcctcatccagcttccctggagtcagctcagggtccagctccacagaagatcgcagcccctccatggcaccacagccaccacagggctccgcccagtaaccgtggatcccacagccacaacagacaccagagaacaccctgacattccgcctggcatccaaccagcagcgggcaccctgaactggtcaactgtatgatcagctagagggagaaatttrtaaataaagtatacrtttctctattattgtttaacagtaatacttttctgtttwcttattcttttatattaacaaaaacttaaaatatagtgaagtgtgcagatrttaactgcatgatttcagaaattttaaaattttatatttctttcagtagccagcagccctctcaatgtatggctcatgtccattaacacagaaaatctgtcctgtaacttttcaaataacatcgtccacccctccacacgcagcccctgttttgattcctattaacatacatcagtttggccagttcttcaacttcgtaacagagagatcacaatgtacactttcatgtctgccttctttgctggaaggtgcctccctattc

SEQ ID NO: 1614 - DNA, 18054 bp, Homo sapiens
  misc_feature (1)...(18054): n = A,T,C or G, or insertion/deletion polymorphism (see Tables 1-2)
taattacgacccagccctgacgtttcatgggaagagccagaagtgtggttgcagacaaagaggaattgcacagattctgaaaaacacagacccacagatccagccaaatttcagaacggtctacaaactgaacactaaatgcacatctgagcattaagaaagagaaggacattgtgtgggttcaccaagagtaagcacatcctgccaggcacagtggctcatgttgggaagaggcccccaaaatctggccataaacaaaatctctgcagcactgtgacatgtttgtgatagccacgacacccacactggaagtttgtgggtttaccggaatgagggcaaggaaaacctggcccacccagggcggaaaaccgcttaaaggcgttcttaaaccacaaacaatagcatgagcgatctgtgatttaaggacatgctcctgctgcagmtaaccaaccagagcccatccctttgtttcccataaggaatacttttagttaatctataatctrtagaaacaatgcttatcactggcttgctgtcaataaatatgtgggtaaatctgttcgaggctgtcagytctgaaggctgtgatacccctgatttcccactccacacctctatatttatgtgtgtttgtctttaattcctttagcaccgctgggttcaggtctcccygaccaagctctcggcaggctcacrcctgtaatcccagcactttgagaggccgaggctggtgggtcacctgaggccaggagttcgagaccagcctggccaacatggtgaaaccccgtctctacttaaaatacaaaaattagctgggcacagtggcgggcacctgtaatcccagctactcagggggtgagcaggagaactgcttgaacccaggaggcggaggttgcagtgagccgagatygtgccattgaactccagccttggggacaagagcaagactccatstcaaaaaaacaaacaaacaaaaagagtaagcaatcctttgtgcatatttccaactacggacatgggatgtctccagcaactgtgctaggaccagccaccagggctcaggggacagctgtctgcacaacgaccctccagcccaggargcacgtaaatgttggacttgcctaaagatgtcactgtggaggtaaactttcaggactatgtcctgagtcccaatagttcaaacaaaattcacagctggagagaatgagcatgctctgtgacagatgcaggatcccagggacatccccaggcaaggggaaaaggtgaaatgtcagggggagaatcagcatttctggatcagaaatgaagaagaacaaggtgggggactctggcttgaccacggttgatgtaaaaactatccagaaatcaggccgggcgtggtggctcacgcctgtaatcccagcactttgggaggccgaggcaggtggatcatgaggtcaggagatggagaccatcctggctaacaccgtgaaaccccgtctccactaaaaatacaaaaaaaaaaaaaaattagctgggcgtggtggcaggcgcctgtagtaccagctactccggaggctgaggcaggagaatggcgtgaacctgagaggcagagcttgcagtgagctgatatctgccactgcactccagcgtgggtgacagagtgaaactccgtctcaaaaataaaacaaaaaaaactatccagaaatcataagcaatcctgaattcaccatgagcaagagtgtgctgtgttggcccacaaagatgaaagctgcctcaggacatattaatagaggctgggcacagacaaggggaggtgatattccagcttggctcttgctattagaacctccctgagcatgtgcgcagctctgggtgtcacactaccaacctggagagtacccagaggcaggaccaggatgggagggcctggacacctcatgggaactgctgctgcccagagctcggggtcctgtcacccacaggcctggaggccttaagaaagtgactcaacctcactgagcctcagtcttctcctctgaaatggggatcacaggacttcctaccaggcaggggatatgtgaagactgaacataatgattcaggaaaagatgtascccagtgcctggggsacaccgarcacaggctgagccttcasccacctgggaaggggaaagggaaacacgggtggccmcctggggctgatggaggaacaagggacccgytgggaggatcctgggtaaactcacctctgggcatctgccctgaacttgggctggcgtcacaaggaagttggtcaccaagaagaacacgttctctccctaggaggcaagtctcaaggttggcctggctgggctcgtgttgactggaaaggccggaagccggcagcctggtttatgagggaagggatgttggccccatcaagtcattaaccctgtmccccygtaaggcagactgaascagagatgggaggctggcagtggttctggccatttttgagaccaggaagccttgtgcccatgtccatctcttgagacaagtctcttgtctcaaccaaaatttgtgtgtgtgtgtgcatgtgtatgtgtgtatttagagacaggattacacttcgtcacccaggctggagtgtagtgttgtgatcagtgctcactgcaacctctaactcctggactcaagaggtcctcctgcctcagcctcccaagtagctgggactacaggctccagctaccatgcctggctccaaccagaatattccaacagcctgctgcttctagtactgaagatccaagggagagctgggcccagcacctgctcaggatggagacgaggtgagtctcccatctcacacacagcagcactggcatggcaggggccaagggagaagagggaaagctgtgtctgtggtcaacgggtggccgaggacattggaaagaaaggctgaccctccagtgctgctcgtgagagcactgtgaatttggggaatgtatgcccaggaagggaaggtgagggctggccagatggtgctgggagtggcagccattaggattgggaggaaagtgtggacaccgtcatgggcagggttgggggaattcctgagggtagaascaggcgctgcaggctctcatgatgcctggtgtgaaagttcascttggctgctgcgtggtgtgcaccgagcaktaagggaggaggcgagaggggcatctagggaccctctaggaggccatagtctcatgcatggcatggcatgggtagtggtgaaaaatcttggaagggacaggaaggggtccagggtgagtcacgggtctggctgaggcactagtggatgtcacagccaccatgactagtgggcgtcacagaggccatgccagkagaggaaaataattgatctttggacatgtgggtgtgcacctagaagacagctgtgctctgggcaggtgatcactgggaatacaccctgggcatcagaggagcagaagtggcagttgaggctggggatgagctgggtggagggaggaggaaaacgcagccgagaagaggggaggagcagcacctgaccgtagtgccccaggtcagggagcagggctacagggaagttccatgccccagcacctcacaccactctcaagctcaagccattagtcctggacactcccttcttttctgttggcagtctttggaaatgcagtttctctggcctggctttttttttttttttttgagacagagtctcgctttgccacccaggctggagtgcagtggtgcaatctcggctcactgcaagctccacctcccgggttcatgccattctcctgccccagcctcccgagtagctgsgactacaggcgcccaccaccatgcccggctaattttttgtatttttaatagagatggggtttcaccgtgttagccaggatactctcaatctcgtgatccacctgcctyggcctcccaaagtgctgggattacaggcgtgagccagcacgtccaaccctggcctggcttcttgagtggcccctttttccaccccaaaacctcctacacatccctgaaagtcctgtccaggtgccactcctctgtgaagcccttcctgagaacccgcagccgtctctggcatcacatgcttctctctcgcacacactggctgcatggcgggtgttcaggctgtcagtggggaaaggacttgcgcccccgtcagcaacatcagggcccccacctgaggtggcttcacgaagtcggccacatcccacagccggtttccaagctccttgatctgagtgacggaaacccctttgagtttggtgatgatggaaaactggggttccaggtcccgctcctggtagccttttttggcsaggagmgcccacctggggaggagaagtcgggcagtgtggtgtgtccccagcgtgtagtgacaggggcggagctgagccctacatgctcagttctccccccacaccctacaggctcccggcccaacatcgaaggccccacctcctctctggccccacttcccactccagaccccctgaatgagacagaagctccagccatgcatcagagagccaatgcyctcagacaatcaccttcactagccagcacccacccccagcctgactagatccagcttcccccttacagactctcctgacccgagatacagctggtggtctctctgggggcctagtgctccagctctcacagatgttaaggactatgtcatgtgccccctgggtggggcctgggtgggggcctgggaaggaggcaagtggacacacaggacaaacacacagcttgttcttgctctcctgtcttgtatcgcctagctctccccaaccccgtcccaatctgcccccttccactccagcccctaaacagcccaaccctcaacttcaacccagcaggaccaagccccayccccsacctcttcccttgcccctccagcctggccaaaagctcttctctcttaccctaccacatagaccacgatcccaaactgcagcagcctctgcagggcgcccmcccrccagttcctggtcatcacatacttctccgtyttataatccagaagcccccagcctgtcgtagcccctggggagcccatgctgccagctcctgctagctgcgggcacatgagtcagcayggcagctgcagccgcagctgaacaggaggcaaagcagggcccgagccaggccaggccagttgctgttaaagggacacttccactaaagcaggatccagatccagcctccaacacccagccctcaacccctaatcccagctgccctgcacctcccacyctccctacattccctttgctgggccctggcacacagagaacagcagcagctctgtccctgccctctggcctcacttcctggggtgggagtggaggtggtgggagggtggagacggacagctgttatcagtgctgtgagaggagggcctgagggcagcagcagcagggcggggagggtgttgaggaaagcttccggaagaagtgacctctaagctgacccttgcagatttctgaagttcgacaagcagacaaagatggggawggaggttcctggtgcagggagcagcgtatgcaaagaccagagcatgcaagataactaagaggyacagagtgagagggtgacctggctctgcgaagttccccaggccctcctgaaaagctgcccccgccaccttccccagtgcagtgaggacaacacaagtcctggagtcaggcgtgtttcccagtccacgaaaggggggcgatgctggaaccccctaggaaggcagggaggatgcccacaaggcgcccagcccagtgcatagcccgtggcgcgtgcagtttatcctctcaggcgaggagcctcagcgcaggagagccacggtttctacggcaacctacagcactgggttgccggggcgaccgccgcgggggagcgcgtcgctaattgccgtggcagacgccagtcgatggacgccacactcgattggtcagcgcagccgcagactccgcccacatccccgggtcgcgctctaagtgaggcgccaagcggtctccgcctcagkgtctgaggctgcgaaaggggcgtaacgatgagcggttcctgccagaggtctggggaggataaaaagcaggaggaagaggcgacggcggcctgtggacgtcttgcaggggtccccgaagccaagcagggtcccaaggccgattcagactccgacctagagacggaaggtgctcggggcaggggccaggcccgtctcctccccttgggggcttctcccgcaggggttgtgggaggtgggctggcgccgccgaggaggcaggagacctctgtccagcagggcacgtagccctctgcggggcgtctccagccccctgccctctcctcggcgctcctggcggcatcaggaactttaccatgagaaggcgcttctagaaggaggttaaaatggaaaatcccgccagacagtgcaccaaaggctgtcccgccctgaaatgcaatcagagctgggttttcccaatccacaggtaaaactaatataatggatgtatagaatttagaactacttccrgttttttccctggggaaaatattcacaaaacatttgtggtctgcaatcaggttaaaagacatagtgtgccatttgtcatcagacaggtagaggcctgactctggcaggattagctaccactagctgtgagactttatgtattcatttattagagccagggtcttgctctgtcacccagctttcagtgcagtggcaggatcatagctcactgcatccttgaactctgcactctggtgagcctcctgcctcagcctcctgagtcgctgagactacagggggctaccacatctggctaatttaaataattttttatstcgctrtgttgcccaggttgtccagctttcttttgacagctgtatgactttaaggaaaagatttgcgttgccttagcctcgatgttcttatctgtcatatgcgggcagtggtcctaaggagcrtaggaagcagtgcttctagaggcaaaaaataggccaggtagtgatgcagggcaggggaggaggcaggtggctatagccatgcaggggttcacattcatccccctgtctcctaccaggcacccatgsacttggagaactggtcggggacaccctgtacctgaggtcttgctggatccatagcattgtgcccatcttctgctttctgtgccaagggagtgccccagagctgaacctgctgcacggtggcctggggccscaggtaccactggaaggacactgggtccaggcttacagggagaggccccrggagacaacagccatgggagtgcccctgagtctgtcccctgtactccccagcttctgcctgtgccaggcatgccctaccctcgacatctgagagacagatgggattgatgctatgacagatggcatgaagggttggggagccttcaggcttctaacccgctgggggctctgggagaggtgggggtgggggacacctaggtggggcctaaaaggagaagcatgtgtcccttaagcaggtggaaaggggggtactttccaggtgggggacgtggagcgggctgagccctggagcatgagccaggatagtggccagtgtgtttgctctgtctgtcccagggcgccggtctctggcttcctcattgagctccaatccatatgtcaagyggctgracttttgggacagtgggctctatggggcaggtacagaggccctggcaggtgccctgagcaaaagcagcarcatctgcggtaggtgctgggtctggggcaggtgggcaggcgtgastcctccctttcctcagggatgtgcctccacccctgaaagctgggccatgtcacctgggtcctgctggtgttgctggtggatagaggaggggcctcatcacaggasggggtatgtggggtggagttagaccctctgctgtgcagchgatgctggatacaagtcccttcctcatccaccctaccccaccactctccttccttgttggctggcacccattctcctgccctgccctgcacatgggagactccccagtgcctgaatgcagagtggaaagtcctgcaacacagagagttgggggyggggaagttcaagaaaggggtgggcaaggtgggagttcattgaagctgaatccaaatgctgtctctgccactgagaaaacggggtgacctatgaaagcagctcagtttccaatctgtgaaatggcccycamaagacctcataggcttggggctgtggtgagcatgaagtgaaatgcactcctgaagtgatcagcagagtgtgtgacccatgtaagtgctccatgcacagtcacctgggctattattgccaatcctggcaatggggcagtgaggrcttctgaagtgggtggtgatatcactgccagacataatcatygatggggtggctgccccccaccacagcagtctctacagtaccaggaggtaggcrgttttaaccgcttgacacagaagctggtgggcacacagggagggggaggtcaggggcagaggggacccagccattgggagccagagccaccatgcaaccccaggacagttaacctgtaagtccttttcctctgcctcagacctggaggtttgggggatggcagaagaggggggaggggggtggtacctggctttgcatcccactggcygaggagtggctccgwcccccagatgtggacctgtyggagaaccagctgggagtggcaggagcccaggccctctgtgccgccctcacagtgaaccaggccatgcggaagatgcagctgtcagggaatggcctggaggagcaggcggcccagcaccttgmygaactcctgctggcccacacagacctgaagtccctggacctgagctacaaccagctgaatgaccaagcaggtaacgcctgcgcagggcaccatggccatgaaagctcagcttcctggggcagggatgggtgggggttggcaggaccgcgctgcacatcgccagggagcatgtgctctggttcctgctccccacaccccaccttgccccactcctcttccactccagccacacggaactcttcattccttccacaaatatctcattgcgcgctgctgtatgtgctgggcactgacttagccaccagggatccaccttgaacaaaaccaagttcctgacctcaagggacaatgttaacaayatcattctgagtaattattggcactgcaaaagaaacaaatagtttatgmttctagagaagaayrgggaccccctrctttaaagaggtggctggggaggcctctgtgaggtgayatttaagctgaaatgtgcagggtgggaaggagtcagccatggcaagatcagagggasagcatttcaagcagaggaacagtgagcatgcgggcctgtttcccagactggcagrcagcagtgtgcctaggctagggagccagggaagcgtggccaggctgtggggtggagagggcagagggctgcagggctgtaggccgtggcaaaaagggtatagattttgttccaggtgaggtagaagacatggttgggattccttggtctcatcactctcatgcccctgagtgtttgctttgccaggaatttgcacttctacctgcctctcctcaaatggtccaataatagtaacaatcacctgtgaccctgggtgaggcatgcagatgttgaccctggacctgctgaaccawactcttaggggaatgccrgtgaatctgcattttaatggatgccccaggagagctcttttctgcagcatttcagaagctctcatctggctcaagcagcttagagggagtggggtggcaccagacttggcctttgagaattggccctggagtgtaactgccagagaagcagtttgtcttctaaaaaaattactactgggagtcagtgaaattaaaagacaggcttatttcagacttygacaaactgaacataggtgtctctttggacccgcacagtaaaagggcaagtgccagagaggcagccgggatggagggcctggaagctaaggtgctatgaaggtttcacaaacagacacatgtacatgagggaggtgggtggggactggaaatcgacaggcccagcaaggccatttttttcctccaagagatctgtgggagggcccmactcccttgagaggtgaaggagcttggatctgtgcgtccccacttgatccatggcaatggtagcacctaccgcataggatggctgcaagggtcacacagaacaagtattggcagttgcaggggtgtgtggaagaaagaatcttccygcccytgagctgttcagcaaaaacagggcctccccacaaagtgggggattactgtctgaccctgccagccctagaagtgtctgagtaaagaggaaagcacatgtatttgagtacctgtattatcaaatccagtgctgggcgctgagtctagttctcaggtagagagggggcaatgccctgagtccttgcttctgtgcagggagctctccatggtgctaaacaagagtgtctgtagccacgggtgccagtccagcaggctggctgagcgctctggttagtccatccgtttttcttctgtgtatttcttcaaaccagccttnctagacctctgcaacgtcttactgtgaagtrtgcgtggtgatttgtgcatagatctgtattgtctgcttttctctgcttcaaagtgtgatgcgtgttcattatggatggtctgaatccgtatcaactctcagaggcaaagagaagtggccccggcttggtggaggttggtggtgtggctcccacrggcattggcttacgttgtctgrtttctctcrggcagatctgtgcatgggactgcagggcttcctcatcttccacagctttgggggcggcactggctctgggttcgtgtctctgctcatgaagcggctctcggtggactacgggaagaagtccaagctggagtttgccatttgcccagccccccaggtctccatggccatgacggagccctacarctccatcctgaccacctacacgaccctggaacattctgactgtgccttcatagtcracagcaaagccacctatgacatgtcagcacaacctggacatcgagtgtcccaygtacaccaacctcagtcgtctgggcagatcgtgtcctccatcacggcctccctgtgattygatggggccctgaatgtgtacttgacagaattccaaaccaacttggtgccrtacccccacatccacctccccctggccacctacgycctggtcatctcagccaagaaggcctaccatgagcagctgtccgtggccaagatcgccagtgcccrcttcgagccagccaatcagatggtcwagtgtgaccctcaccatggcaagtacatggsctgctgcatgttgtacagaggggatgtggtcctgaaagatgtcagtgcggctgtcgccaccatcaagagcaagcacaccaaccagtttgtggactggtgtccgattggatttaaggtaggactgggtgatgtggagtccttgtgccatcaggaagcaggagacctgcagaataatgctgcccctgaaggcccgcatcctttatggagacaaccccttttcacgtcagctaggttgcaaggataataattttagtaatttatttcctaccgccttatactttaccaaatactttatgttccctcataccttaaccrctaccctttaaarttcatkgggcaatattaccagtatcttacactttagaaaacagaggctgaggctgggcacggtggctcatgcctgtaatcccagcactttgggaggccaaggcaggcagatcacgaggtcaggagattgagacsrtcctggctaacacggtgaaaccccggctctactaaaaaatacaaaaaattagccgggtgtggtggcagacacctgtggtcccagctattcgggaggctgaggcaggaggatggcgtgaacccgggaggcagagcttgcagtgagtcgagattgcaccactgcactccagcctgggcaacagagcgagactacmtctcaaaaaaaaaaaaaagaaagaaaaagaaaaaagaaaagaaaacmaaggckgagatagctttaggtgtctggagcctcacaggcagcaagtgatgcagagagaaatcagagattatctgactgcaggtcctggtctgtcctccacattactccactgctcactttagtaatttgtcaggttctatgttatcattttttgtgttataaatagtggtttttacactttacatcatcttggtcacctgttgtcactgaattttgggcaacactaatatttctgtaaagattwtwaaatatattgtgcagtgtttactgtgaagaccaaaggcaggtctttgccctttctccaaaccaagcagagacctctgcctcacacacaatcagactgatgatttggtgctcctttagctatgcttayagtcagttgtctaccaaaagaaaagtaccatgtatttggaagccaaataacagaatgtcaggctcgaagatmtgttgtgatgactaggctaaatgcctcaccacacctgtgttggtcaactttgtgccctatggttagttaagagcccctgtctacagtggtttcccacattaggcaaagctatagatcccacatttataagtctcaatgagttctgaaggtgtttgaggagttgcmagttccaggatcattccagattgaaatgatatgagaaagtcacaggtatgtgtcttctttttcccatgtggaatggccataacttgcctctgaacrcacacaacttcttgaatctgtctggccctytytcagccactttacaacaccttgacacagatcatctctctttttcatctcacgttgatgcaaaccatctttaagttgacagatttaaagtgattcatagaacagggtaaaatcggccaggctcagtgacacatgcctgtaatcccagcactttgagaagcccaggtgagaagattgcttgaacccaggagttcaagaccagcctgggcaacatagtgcraccctgtctctacaaaagatataaaaattatccaggtatggttgtgcatgcctgcagtcatagctaatggggaggtggaggtgggaggatcgcttgagacagggaggcagagattgcagtgagccaagatcaccactgtactccaacctgggcaacagagcgtgactgtctcaaaaaaaaaaaaaaaaaaaaaaaaagaggaaaaagaagggtwaaatctacaacagttacaccaacctggaatgttcattacatgttacataggaggattacagaccttagwtrtwagatgttacaggtaggaggtgaaaccctccattctgtgtctaattattaagcctctcaacttgagtagaggaatttttctttcaattagtgttacatttggaaggtgaagacatccttagctggcaggcactgtgggagatgctatgctgtgcagaggtttcctattgtaactaagtmttgtgagacagtagggaggctagtctgtggggagataaagtcacagcctctcctccccccagaagatagtccagccttagatggaccttgttgaattaattctctttgctcttaagttcctttytgtcagtcttagtgtgatttaccatacattcttgtttgtttgtttgttttgagacggagtttcactcttgtcactcaggctggagtgcagtgatgtgatctcggctcactgcagcctctgcctccccggttcaagcaattctcctgactcagcctcctgagtagctgggattacaggcgcccgccaccaygcctggctatttttttttttttttttgagacagagtcttgctctgtcgcccaggctggagtgcagtggcacratctcagctcactgcaagctccgcctccggggttcatgccattctcctgcttcagcctcccgagtagctgggactacaggtgcccgccatcgcgcctggctaacgttttttttttwtttttttwwawtttttagtagagccggggtttcaccgtgttagccaggatggtcttgatctcctgacctagtgatccgcccgcctcggcctcccaaagtgctgggattacaggcatgarccaccacgcctgaccaattttttgtatttttagtagagatgaggtttcaccgtgttgggcaggctggtcttgaactcctgacctcagktgatccayccgccttggcctcccaaaatgctgggattacaggtgtgagccaccgcacccasccaaccatacattctttaacaaccatttgctttttttttgtttgtttgtttgagatggagtctcgccctgtcacccaggctggagtacaatggaacacactgcaacctccgcctcccaggttcaagcaattctcctgtctcagcctctcaagcagctggaattacaggcatgcgccaccaagcctggctaatttttgtatttttggtagacacagggtttcaccatgttggctaagctggtctcgagctcctgamctcaagtgatccaaccgccttggcctcccgaagtgctggaatcacaggcgtgagtcactgcacccagcttcggatatgctattttcgaagagtcttttccatgcttaaaaacatttgggggctggaccgagtggctcatgcctgtaatcccaacactttgggaggctgaggtcggtggatcacctgagcttaggagttcgagaccagcctaggcaacatggtgaaacctcwtctctaccaaaaatacaaaaaattagccgggcatgatgccacgcacttatagctacttggaaggctgaggtgggaggatcacttgagcctaggaggyggaggttgcagtgagccaagattgcaccactgcactccaggctgggtgaccaagtgagaccctctctcaccaaaaaaaaaaaaaaaagcttgagtccaggagttcaggatccattgggggaacatggtgaaaccccatctctacacaaaatacaaaaaattagccgggtgtgatggcacacacctatagttccagytacttgggaggctgaggtaggaggatcacctgagactgggaggcagatgttgcagtgagccatgactgcgccactgcactccagcctgggtgacagaacaagacccttagaaaaaaaaatacgaacatttgggttttttattataaaagtacttatgttggccaggcacagtgtctcacacctgtaatccattgggtggatggcttgagcccaggactttgagaccagcctgggcaacgtggcaaaacctgtctctacaaaaaataaaaaattagctgggcatggtggcacatttcctgtagtgctagctactcaggaggctgagacaggaggactgcttaagcccgggaggttgaggctgcagtgagccaagatggcaccattgtacttcactctaacctgggcgacagagcaaaacccatctcaaaaaaaaaaaaaaaaaaaaagctgggtgcggtcagtggctcacgcctataatcycagcattctgggaggccaaggtaggcrgatcaccggaggtcaggagttcaagaccagcctggccaacatggtgaaaccctatctctactaaaamtacaaaaattagtcaggcatggtggcggttgcctgtaattccagctactctggaggctgaggcaggagaattgcttgaacccaggaggtggaggttgcagtgagccgagattgtgccaytgcaytccagcctgaatgacagagcaagactccwtytcaaaaaaaaaaaaaaaaaaaaaaaaaaaaaaaaaacttgatatgggccgggcgcggtggctcacacctgtaatcccaatactttgggaggctgatgcaggcggatcacttmaagtgggaaaatcgcttgaacccaggaggcagaggttgcagtgagccaagatcacaccactgcactcaaggctgggtgacagagtgagaccctgtctcaaaaacaaaacaaaacctgatatgtggcaaaatactraaagaatgcagaagactgaaaagctgaagtcctcttcttccccagagctgcttctgtcctttgaaaaacattctgtacatattcaaggcatattaatctcttgttatacaggtgatgttgacagtggccagcagatatgtatgtccctttcctgtaggtgacagacccaattgctgcacacaggtggtcacagtaaacagaaagctggcagcactcccacttggaagggctgataggcttggccttagagttgtgggaggacactccctgatcagggtacgaacccttctctctgccccttccaactcctgtggagtrtgtctgtatctagttggtgctaactgctacgtgcttggcagggcaaggcagggtcaccacctcagcaggcgtttgtcctcctccggcatgatgctaccctagctgcccaaggttctagcctgtgtatgttattacatggatttttttacacayaaatacatagacttcaactcayttttctttttacaaagtatacaatataccttggatgtatttatatcccaagacagggttctcattctttttcatgtgttttactgtatgggtaatatgggtaataatttttttttttctgagacagtctcgctctgtagcccaggctggagtgcagtggcgaaatctcagctcactgaaatctccgtcttccgggctccatcttacatgcccataatcccagctactcaggacgctgaggtaggagaattgcttgaacctgggagacaaaggttgcagtgagccgagattgcaccactgcactccagcctgggcaacagagctagaccctgtctcaacaacaacaacaaagaaggaggagraggaggaagaagragaagaaaagaaaaaaaaaagtcgtcaaaggatattaattgtcgatagrtaacagataatgccaaaaaatatagaagcaattcttaaaacacagtgttggaactggtccacagctctgatttttaatgagctcccatttctgaggccaatataaacttcattctatgctgcccatctctgacaggtgggcattaactaccagccccccacggtggtccctgtgggagacctggccaaagtgcagcgggcggtgtgcatgctgagcaacaccacggccatcacggaggcctgggcctgcctggaccataagtkcggccaagtgcgccttagtgcactggtacgtgggggagggcatggcagtgggggaattctccgaggcccgcgargatctggcagctctggaggattatgaagatgtgggcatggattccgtggaagctgaggctgaagaaggcgaagaatagtgaggggagggtgcggcaggcaaccatccctctrtattccccaccataacgctaggagagctaattayctattaaaatttccgtattgcaaattagccgggcgtggtggcgggcgcttgtagtcccagctactgtggagggtgaggcagccgaatggcgtgaacccgggaggcggagtttrcagtgagccgagatcgcgccactgcactccagcctgggcgacagagcgagactccgktctcaggaaaataataataaaatwaaaaataaaatttctgtattgcgatactktctttctcctgtgttgtactttgagagattcctcctccagataaccctccctgaagtccacctccccagtaygagagtgagtgcgggctctggtttttgkcgggttctttcgtgcaagcgtcccakgccccgttttatttcttccgwcagaggtcattccgaggcgagctgccscccctgcggctttcgaggctcccaggacactgccgctttccgctcccgggccgctcccgaacgctggggccgctccatcgtgccggggtgtttacggagaaaagtgaggcctgagcggacgaaagagaagcccacgtgggcgacaatactggtagcccagggagctgggacgacgcgggcgcgacagaaactcgcacgctcgcgccgcttactaa

SEQ ID NO: 1615 - DNA, 296950 bp, Homo sapiens
  misc_feature (1)...(296950): n = A,T,C or G, or insertion/deletion polymorphism (see Tables 1-2)
actgtatcctatcctgggaacaaataattgggaaaagaaaatgatcgacatttttttttttttttttttgccaattgctttcccctaaagtaagtttatagtcttgatgtcatgagagtttttgagtttcccgcccctgcccccmcccccccaacccagtttggtcacacagttgatttatagaagagttgccaataacctgaataacctgtttctaatgccaaaaacggctgatgcctgagccctgccttaggcctagaacttaagatgagaagatattttgggtgcgcaagccatgttgtccttagctttactcaaagaaaacatcctagtgaaaatatgcatggatcaatacatatttcagagggcgtgattgtctctgttgaatctctgatagttcacatggtttgctgctgcccttaatctcatgtcctttgagctagagacttccttaattaaaatacagaaacaaggaggccatctgcaaatccatacttccagtgcactcatctgttacattgcttaatgctgtgtacaagacctaggccctgagctagattattgccaagaataaatcttcatttagaaaaytgatcagatggttggcttgataaattcagaaaaatgttaggcaatatttttttgggaaggttatttgtagaagaaatcccaggtgacagataaactattttcaattttagctattttgaggggcaccaatgtagatgcagcttcagaagacaaaggcattatcctgacttgtatattgccacctctattccttagccccatgtttaataaatgaatcagttctggaaataagttagcttcccttttatatagatataacctggcccctgaactttgaagcttctattattttccttttagacttcagtttgagatactttcacagttttcaaaamccwattaaaaagtgaaaatgatctcttgaacaacagttctttttttaarcatctcgtatttttggctttttgtttttttgagacagggtcttgctctgcagccctggctggagtgcagtggcatgatcacagctgttttctttttttttttaatctgctgaacataatctctaattctmtgccaatgatcttagttacagtatttcattatttggtggtgtgatttttttctccctctttttggytgatgaaaagttgtacccaacttccctcactaataatatgaatgatctccatttctctttattgttcattgatgcatgccactattttacagtggctaagtccatatgcttggtgttgaaagccatggagatggtgaagattttgtaatgttcattgcagatccctaatcaggatagaaactggcagggatgtcctgcaattaagctactaagacttccatagtttcttcatttgtagtaggcttttgggaaggtccttgggccttttagttgtyccaagagcaytgctgaaatttgtatttgtggagagtaggggtaaggggaggtttacttatattttgaaaagatctcatgacttgacctggtggtaatcctgctgagcaaatcctattaagtctartttgttcakgctgctataaaaaataccataaaatgggtgcttatgaacaacagaaatttatttcttatagttctagaagctgggaagtccaagatccaggcattcacaaatttggtatctggtgagggttcatttccttgttcatagatgacttttccctataaccttacatggcaaaaggggtaagggaattattttggggtctcctttataaaggcactaatcccattcacgagggtttcatctttatgacctgatcacctcccaaaggtcccatctcctgagatcatcactttgggggttaaatgccaacatgtgaatttttggggggcacattcagaccatagtacaagtgttaaaactgcaagaagaatccccacactcaaggtaacccaagtaatagactaatatgaatcaatccaacccaattgttgggaattctcatagttcttgcagaggttcttttcttggttcattttcttggaacttcccaagtcgtctttagactactttccatgctcaaacttccaagtattaggatattcctttccctcatcttttgtccctatattcctcaactttcatcctacccctttatgcttctgcatgtaactttattttcttcttgacgctatcaaaagctattgatgtcctgccagaaasatctcccattaaaagcaaactgcaagattttctaacamaatttagttagggatcctcaggacaggaacagacatggcttcaaaatttaacattgtctgatctctactctgggtagcacaggaaagtgtttcccttccattctgaggacaacgttctttcctctctctccctttgctcccatatccctcaatcccaccaaccctctaataaaataagccaataggtttaaggctgcagagagtataaaatacttgaacttacatatcaaatcatgttaaatatttatattttagtatgaaagaccctcaatagttatgttaaaaaaaataactattacccaggtaatatttctgtccagaaatttgagaaacagaattatttgtaattatctacacatttaagaaaattgaactccttatgaaatataactttaggaattactggagattcatttgaggtctggttggttatcatgaccttaggaatttacttaacctctctaaatcccggtttgcttctctgaaaaatgataaaaatgttttcctcacagggtatatgtgagaattacggagctcatgtatataaatagtttttcatagttcctggtattaaaaactcaatatattttaaaaatgatgctgatggtaatgatatgctatttgtcaagtaatcacayrtatttttacccagaattwaaaaaaaaaaacaacttttcccctatcccttaggttacatatgttgctatgttcactgttttccttttatagttaaaataagctgtaacgcatcgtttcccatttttttttttgccagctacatttcttatctctattgataataactataccacctatgtctctgctttttcatgcttgagggatctctggatcaatcaacgtgcatgatggcctgaaaaagcccaatttatgggcaataaagtgaatcatcttattatcaggaacgaatatatgtttcctttattgactgctgactatgtagagcataccaacaaaattgccattcatctatccattcaacaatatttattagctattccgcactgggcartgctctaggcttggggatagaacagtgaacaaacaaaatccttagcctaatggatattacctggaagtgtgccaggaagaataaactcacttgtgaattacaacaataagtggtttattcaggtcaaaatcttgttttgtctcctgggaatttcactgaattgcatcatgtaggaggcaaactataccccaagaattaagagcaattgtgaataaatgataaaccacagagtttacatttacctcctaatacatttaactcctaatatatatatatacatatattacgaggtaaatgtaagctgtaactttatgcatatattgtaagtagtaactatacatatatacttatatactgtatacatatatagtaagtagtaactatacatatatacatatatagttactacttaaatttatatatgtgtatgtatatatatatgtatatatacagtacacacacatactgttactaccgggtgtaaaattgaataggatatagtgtcttccctcacagagctgccaattatgttggaggatgtaataaatacaaagtctgtttcttcatcttcgrtttaacaaatgactgatgtgaggaaaaaagttrtaggaatatgttcacatagtcacccaaatggagcatcctactctgtcaccatttcaggattaagactagacagtcttttgtgttacaaattgggacatcagtgctctgggaaacagtgatgtccacgattctaaatccyttggtattactatttcattgattaaactacacttctgatattttagactaaaatgttttggcttatcgcagtctaggaaacctgtcttgggtatataaaacagayagttgatgcacgattagggaaaaataaggcaacctatgaaaatggccttatggattaaaagaagtgagctcctatatggtcagtggaatccasgaaaaatttaatggaaaaagcgccacctaagcttagctttaaaacacagagtatcttcaggtagaaaaggctataggagaatgtgcccaaatggagtttggctggagacaaagaataaagactagaaagaacaattaccctaggccagacatggtgttggacggggcaagatgyttactayttaaagccatagaacactgtttgctggacacaatgagtggaatatagaacaatgcaactattttaacactttacccctcttagtggtttattagttaattttttcctgaaaaaaaaaatgcgtatactactttttctgcacttttctatatcagatcttgatttaaaactttaccactcttggtgatttattattagtttttttaatccgaagaaaacatgtgtatactcctttttctgcatttttctatatcagatcttgattggctcaccaccattacacacacacacatctcttttctcccatcctcccagcgttatagaatcatttgttgtaaaatcagtattcagtatttacataattatgactgactttacatgactactattattcacagttgaggtataccgtgtatacagtgtagtttttaaatttttatttttctcagcgttcaaaattatatgttctgttttcttaattttgaaaaatatgcattcactaatttatccccacactctttggaaaatgaaagctctctaggctgtattcaaatacaccaggtactctatcaattttcattttttaaactattctacctgagctctccatctttagccatttcctgttgacttcatactgttctcccctwccactctccctctttaatatattaccgttttagaaactttatggctaccctgtaagtaataaaaatgtctttccccactcaacaacagacagtacctttcaagtttccactttataaggacataacccccattccatttacttccccygccctccttcaacattcccacttgtattttccggctgtatttttaaaacatggtaaataacatttgcactccactttgtaaccataattaagtatgcccttaaacaataaaaaccataaacaacatttgtattttacgattatttaaatgttattcactgaacagccaagctttgtgctactatgggatttcgttttctgcggttccaagtcttgatccacgtcctgccacaggatcactgaagtagagyccattttcttacactctcgccattagttcaaaagcttgcagcattttatgtctggtacttggaggatgattttcctgtacagttttgcgtttttttcaccgaaaatttctgattattattgttttctcttgtgggatgaaatatgtaccttctatatcacagccttaataccttcagcttcttattcattsaaatcttgcttacaatccagtccgaggattcccggtttactgattttctttttcctgcaaattttagccttctgttttgttttgaaataatgcatcctctgcgctttgtcacattctgaaattcgtcaggtgttttaggatgcacactttcttagatsttttcgagggtcttaactgcagttctgtttccggaayrgcgtattytctttctaggrattgtaggctcccggccgccccctgaggagctccgctagcagctaagagggcagccacgaagagcgcctgagcactctcgcgagactgtggggctcgccattggctgctccgccgcgccgcaacggaccctgggagtcggccatcatgctggccccggaggccgttakcttagtcatggctctaaatatgtacctgcaatcggatgttgaggatcaccgagcccgcgacgtagaagtacgggaagttcatgcgcagctgccaggccagctcgaagaaggcgagcagggtgcgggagagccccttgcagaagacgccgtacgaggtgggtgtcgcggcggggcttgaggcyctgacggccaaggaggacggagccgccgcgggggccatgagccaggtgtcgccgsccgcccagcgtctgtagcgagggttgccgcagggcccgcggacctcctagcgacggctgggaccggcaggacggtaagcaaagcggctcccgggctcacacccaagcttgccgctgccgccgctcggtgcagtgcggcgcgtagccccgggcgccgctggcgctccgccccttcctgtctgcttctcactgtggcatttaccatttagagctcaactgatggtaggtggctctggaataggatgtgttatatagcatgtacgaacatccatgcagatagttccactttaaaatgaaaaaatctaagcgagatgtaacttgccgtagggcacaaaatttgtaagggccaaagctagattaaaacttyagtttgtctgctgtgttatgtgggatgttaggaatcttacccttttgatttcataatattaatattagggcaagatgattcctacgccaataaaagcacaaggtctctgtattcataatataccatagacataaaaaggatcacaatcttagtctttggatttttctatttattaggaatatttaaattgcaagtgacaggaatgataaacattcaagcaaaaaactagtggacacacacgcgtatatacataaggacatacatacaaaattatattcccagccatgtaaacccttaaaaagttcagattagctgtggaagcttcagccatttctgcatggagatgcatctgtgaaacctgtggctaggctccaagagctggaatactactctgtacttccaaactctttttttgttgttgtttttgagacgggagtctcgctctgtcgcccaggctggagtgcagtggcgcgatctcggctcactgcaagctccgcctcccgggttcacgccattctcctgcctcagcctccygagtagctgggactacaggcgccygccaccatgcccggctaattttttgtattttttggtagagatggggtttcaccgtgttagccaggatggtctcgatctcctgacctcgtgatctgcccgcstcagcctcccaaagtgctgggattacaggcgtgagccacagcgcccggcctgtacttccaaactcttaataccattagagtaacagcacagtgaatctctaatagccacaatacttttgttatttaaatgrtgcacatttcattaccttcacttatctcccattttaactagaaagcactgtattttttaatcgcacacaccgtcttcattcatggattattcaaatgtgtgatttctgatcatgaccttaaggttacagtcttgttctgaaaagcattgttgagataccacacatcgcaccgtgcactgcatgtctagcagctattcagagcacaagtacggtaccctagagtacctctgtttctatatagtctactgattatatgactggtagaaataacgtgccactgakaaatttgtaaaaattaattttgtgytcccagctagtattcttttgctactttgctgctccagtaccactccagcgaggtagcacttagaggaattacttatgacaacttctaaaatactggtatagagactgaagagcgatgtaaaataaatgatcaattctgagaactgggagaagatatatagtttcagttcacacatataatttactccctttgaaaactgaaagactaatacacagagccattcagagtcacaggagtcattacgttcctggatttttcatttccaaatatgtaaagctatgtggactcattctgtcttctattcctcttttgtgccaccctttacgccctacttgctccgtttctgggtaactccatgaaaaccttatcttccaccctgagaccgtggggaaaatagcagccacccactgataacatggccagattgagggcctattccaatgggacgggaataggcaaagaacagtcacaaagctccaaatcctactccttaatgctctagagctgaagaaagatttccttctttccacctgagagtgggataggagcaataatttaggtggttgtagwttttatctgccccttgatgtttagatttgaatgcctaatccacactkcttttgctgmgggtgatattaggagaattcatgattagagtattcatgattggaaatggcttgattgtacaaattagaaaattcatgattggaaatggcttgattktacagattaactgcattgactggcttgggcattggaagcttcctttaactgacttttcatcaggttagccagctccagaatttaacagctgtgtttaatactgcttaatatttttatacttatgttcacaccacaccattaacttgtgctaatgccaaactagaaaaaaagtacgtttccttttggacactgatcagtactcaaccctttggtttgctatctgcctgataatttttggaggtgggggtrsttcacaatagctaatttttctcagccatttttcctttggataaagtgtagaattaattatgtgaatattatgattctgatggagtccttggtttattaacattcmattgggaaataaatgattttggagtcgtaatctttcttattttctttttatcatgtactgtttttcagcttttatagcagatttgattcactttatggtaaacagcctgctgggcatgrtgcttttscagatagtaggagccttctgcctttctgatcactctgattctgattcttgggaagagcaagctgagtcagacctcactgataatgctgtggaagattagattcttgatatgatgggaaaccttggctccttgaaagccttgacgaaaacttttttgtattaggaaaaaataaaatcaagtagaagcccacataaaaactctttaatttttcttttctctttctttctttcttttttcttttcttttcttttcctttctttctttcttttctttcttttctttcttttctttcctttctttcttttcttttcctttctttctttctttctttctttctttctttctttctttctttctttctttcgttctttcgttttttgccatggctttaatatgtacatatagtttgacgtcattgtaattcttaccagaacatactcagagctaaatatatactcttatttccatatttcaagaaacttttctttttctcccctcaaacctctcttttagacaatgaaacacacttaataattgtcagattattaagatctattgtattcttcattacaaggccagatttcataggtgcataaaaaatcacctatacatgaatctattttttaattgagacatttktaaaccatgcatgtggaagaatatgatatagcatgcatttatgcatgcattttgaaaaccagcttgagaattttacttccttttagttagcagtagaccaaaagagaatgttgcttctgctctaacaaagagagtaaactaggtaggctacaaagtcataatttattttgagcttgttagaactgaagttacaaggtgagcaggtaaactgaattttagcactttgggaggccgaggtgggtggatcccgaggtcaggagatctgggccatcctggctaacatggtgaaaccccgtctctctactaaaaatacaaaaaattagctgggtgtggtggcaggcgcctgtagtcccacctactcgggaggctgaggcaggagaatggtgtgaacccaggaggcggagcttgcagtgagccgagatggggccactgcactccagcctgggtgacagagcgagactccatatcaaaaaaaaaaaaaaaaattacaagcctttccaaataggagacatgaatttatttcatctgtggcagaactccagaagagttctctggcrtttcagtaggtaacaagaaaatggctgaaattttaacaaattcttacaaaggttgagtgtagtttaatgtgacagtttagaatacctgggagccccagacacaggagtggtctgtaattgccagcttttccccttgggcttctaccgaatgcttactggaaaggttgaggacagacaggaaacctaggaaagttcctttatggtacacggtataggaggcagaataatggctttcccaaagatgtctatgacttaatctttggaactagttaatatgttacattatatggcatggagattttgcaaatgtgattattggtatgcaccttgagatgggagattatcccatattatttaggtgggttcagtctaatcatatgagcccttaaaaacagattatttcttaactagggttagagagatgcaacacttctgactttgaagatgaaggaggccccaaaccaaggtctgcaggtagtttctagaagctgggaatggcaaggaaatggattccttcctagagcctccagaaagcaatgcagccttgctgacaccttgattttagcttagtaagacaaataccagacttctgatctgtagaactgttaagataattttgtagtatttaagccactaaatttatgataatttgttttagcagcagtgcaaatctaaaacaaatgggaacaaaatcttcttaagttttaaagtggagtaatagaaactggagaagcccatttacactggaccctgcatgagtaaaaggtggttgttggccagtgctaggggacaggcaagaaaactacacatgttctggatctttattatgcaaaatctgcctgctgctgagtgaggggcagggaatacactgtaacctggaccctactctgatattgggcaatagctgattggcacaaggagtggggtaagaaacctgcctgcactcctaggtctgtattaatacatattagaagtctgttgtcacaggggaagtccaggaaactcacttgctctgggctrcatgctggctaaacagaaaggatctgccagtgaaggaaggcagaaaacccaccaatcctggactctgcatgaacaccaggaaaaacccatttgctgcaggaagggggcagttaacctgatgatatcaagaccctccactgatacaagacattgattgactgacactcaaggaggggcaggaagattgcctgacttggactcccatgctgacactgggtgaaagccatctgttgctactggaggagggggagaaaaccggctttcagccaggatccttcactgattttaggcagtttttcttgttgtgggagtggtaggagcattaaaaaagtcccacgtctgaggcaaaggtacgtagacaggggcagttgctagagaakaacaaagagctcccattgccccaccatgaacttttctctgattaacaagcaatgccactatactgggagagggacacaagtrtagaaagagccttctctatagtgcatgtgtggactcttgaagctgagcacaaacactgagaatccctttggcactccagtcttccccaaaacacaagttactggcattccaccactggagccatttgaatctaaatacagataaactacagattggattgatacaatttcacacacttagtagtctgacagaataagaaggcagcccatttttgaggggtaatatttatctcaggatttatctcaggatttactgtaaatatgtatacacacatacaaaaacccaggcattgttaagagaaaataatggcccagaggttgaaattatcagacagaacctttaaaaataattatgattaatgtgttaaaattctagtggaaaagataaataacatgctcaggaaattttagcagagagatagaaactatataagaagctcaaatgaaaatgctagaaatgaaaagcagtattggaggtgaaagattcctttggcaatttatcaacagactggagatggcagaggcagaatcagtaatattgaaggcagattactatatattattcaaacagaaaaatgaaagagggagaaaaggagagaagagatggaggaaaaaattgggaagactggcaatactaatttgtgaggatagggggcaactagaatcctcatacattactggtggagatgcaaagtggcaaagcctctttggttgagtttgatagtttcttatgaagtaaaaaataccatgaaacccagcaattcttaagagaaatgagaacatacccgtaaaattgaatactactcagcaacaaaaaagaataaatcacttttacatgcaacaacaratgactctaaacattctaccaagtgaaagaaaggttcaaacatgataccattttctcttctacaaagagaaaaatatagtgacagaaaacagatcagtgatagccaaaggcctgaggtagaatgcactgcaaaggggtctaggaatgtcaaggatgtttttgggggtgatggaaatgttctatatcttgattgtggtagttaatctgtataatttgccaaaagtaaactgtataattaaaayggtttttcatataatttataaaaattatatttcagtaaagctgatttacaaaaagaagcattttttttttgagaagcctcagaccacattaggtagaaaacaagacattttagatgttctgagttagaagaagtttaatcagggagttagacactatacaaacattagaaggctttgggggaagtgagactaattctggagggttactttcaggaatccagaattgtaggggttgtacatgaaggcaataacatttgtgtcagctacttgcatcctctatgcaggctactgtattagtcagggatctccaaataaacagatccaacagaatcataattatgagccaattttcataataaacatgtgtaaaaagggattcattatagggattggctcaattgattatggaggctgagaagtcccatgatacaaccagtggtgtagtcttgaggccaaaggcctgagaatcaggggctctgatgtccaagggcaggaggagatggatgwctccactcaagaagagagtatatttgcccttcctccagctttttgttctattagggccctcatcagattggttgatgcctacctacattggtgagggcagatctttactcggtctacagattccaatgctcatctcttctagaaacacctttacagaggcacccagaaataatgttttaccagttatacgggtattctttaacccagtcaagttgatatgtaaaattaaccatcacagctactgatgatatcaggtgcctctggcctcaaagtgggtgattcctaggagtatatttgtagctatccaacccttatgcttgtagtctgtagatacctaagtgccagtctagattgctgcccaagaaataatagctttacctcaaagtgtctttttttaagggggaatttaattgaccatggggtctgggaaatgttattccagcttcttttttatgtccctgtggcaaaggtgagagcttagaaacttggggatggtatatggtagagtaaaaaatctgatacacacattgtatctagatgcttagctttgaatctgcttctgcagactttgtaatgattctctgatacactttaataaatgtcttttgtgcttaaactaccagaatagattttaaaaataagttcatgttgatatttccaattcagattttatattcttacttctttttttctcatgctgaaaatcttggtccgtaaccacacaacattcacataattaattgtgtgcatcagcgcatataatagtttcaaactaacagtactcagattagattattctaacagcttaattattaaaacactttcagatttatcttagcatatatccttctggagataaaaaaactatgttgtaggatcatttgaaacaattcctcttttagttaaatcatccatcagacaggttcatttgtttttawttttatttttcaggattaatattcctttattttaatttttagtgattatttaataaatgttcatggtaccaggggtaaaacttcaaaacaaaatgtattcagagaagcctagcttctttcctgtcatatgctctgtgtttcctttcctataggtaaccaattttttttccttttttaattgcttttaaaaatttaagatatggaaggggccatgctaatattctctgtaattgttccaactttagtatatgtgctgctgaagtgaacactatacgtaaccattttttaaagtcagcttttgacaataccattcttaaacaatayagaacatactacacacattgttctgcatttttccttttaaaataatttaataattaggtatcacttcatagtactatatagcaatctttctcatttctttttacagctgaatagtgttccatgtatcccttctctctgcaattattgattgactcaggctaaagaagtcttcgcaaatattaacacatttttccatggttgcccaggggktattcttcattacaagtgtgcatgtgtatttatgtgtgtgtttggggtgaggctgtatttgttggggacatagagttttcacacatcacttctcaagctccagtggcaagaactcagacactgggtcacacccaactgcatgggatcctgggaaatgtagtctcatgtgtgctcaggaagaggagaacaaggattttggtcagcaacacagtacctgccacagacttcatgcctatttttaaatcaccatatgtacccttcttcccacatatagaacacacttatgctcctttcctggggatgcattaaagtcttatgttatatcagcttaaagttcagggcttctgagtgatagacagttctgtttaccacttccaaatgtagtccctcrtggtctgggaataaatgaaaacaaaaaacacaagatatatatatcttcacttcaaagtataaagtggatgattaggggcaggctgactggcaacaataaactcctcccatttagaaagaaaacaggaggaatacmatggtagattggccatagcagtgacaaaccttccttgataggctatgtggagtcgcctgccctggatttacagggaagttcctgattagtccctgtgtctggactctgggagaaactcccttatccatcattttctgaggatcctggctttaccctctggatgttcttcattattatcctccttggctgcatctgaaaaggatgatgagaagggtaccttcctggagaaggtacgtatttcaagtcttttcaataatgcaagtttggaagccagagagtcattttaatatcacatatttaattaaatcactcataatttatttgacaaatgcaatatcctcagcaacatataaagtttttaatctacttgcttctggtcagttccatcttaccctacaaaaatttccaaaatggttgtccttacacaaatgtttcatgtctgtataaataagaaaatagataaacatttttcccttacttatcccaggcctctttctttcactttggtggcagttatcttgaaggcattcgaaacaatggtctctatgtttaattgaaaagtcttaatgggcctcttaatttttttttcagtctcacttattgctgtttgataccccaaacckgtgagattttatacccctctgaaaccttagatttctgaactctctcttgctcttaattcttatttgcaaaccagtcaattcttttcctttctcatcttctcataatatcttgctaaaatattttggagaacaaccctggcacaccgttttgactttcatcaaccacttcccctagggccagagactcattaaacatggccttcttctaagttattgcatataatgtttttaaaaagtttgcttatacaccacatgtgccatcrtgttgccagtctccaagatctgttccttcactgtccaaatcctctaaacaaattctcccactttcagttccaatttctgtgttagactgggtagacaaactgcatcacaaatagctccaaaatgtaaaacgtttcraacaatatgatttaattttgttcttttaatggtactgatatgtctgagtaaccttccctatgtagttattcactaaaataggctgatcacttggtgacctttaacacagcttccaagattgccttggggtcaccttattccaggcagccaggagcagaaaaggtgcatggaggaggatgcatggcaaatttttatgggacgggcctggaartagtgcacataatttccactcacattacattgttcagcttttagtcacattgcatctgtaagagaggcttggaaatatagtctatatgcttagaaaaaagagtagaacatgaaatttaggacatggaagttggagagtgcattttgcttaaaatagccatacaaatgtgaaacaaaaaagttcctgcctatagatgcatggtatagcttgtttatgtcacttttgtagtttgaaagtgcccttaaacctgtcttgaatattagttcttttcttctttttcataaattctaaagaattccagggccaggcgtggtggctcacacctgtaatcccagcacttttggaggctgaggcaggaggatcacgaggtcaggagtttgagaccagcctgcctggccaatatggtgaaaccccgtctctactgaaaatacaaaaatcagctgggcgtggtggtgctcgcctatagtcccagctactcgggaggctgaggcagaaggatcgcttgaacctgggaggcggaggttgcagtgagctgagattgtgccactgcagtacagcctgtgtgatggrgtctcactctgtctcaaacaaacaaacaaacaaacaaacaaaaattccagttcaaactgaatgtccctaacctcagagaactatagtcaattcttcactgaagcatttgtatcttcctcgtctttaattctggtatattttgtttattctktttagctcctgtaacattgcatacaaattatttatattaatagttttaggacttgggtgaaattcttgaaytatgaataattttaggracttatttctataaatcatattgcatcaacaaaaatgcttggtatgtagaaggatgttactgaatgagagacaaataattactgaaataaatgttatttctaacaatttctattcaaaatttaagatatttgtattcaagtggtatggctcaggggagatgaaaatgcaaattagtgaaaaatgatctctcatttttgcatgtttacatactcgacttcgcttctttagtcattaccatgaatggaaaattgtggctgatgctgaagataaatagacatcattagtgtttgttctagaaattatatagtagctgactgaaagtggtaagaaaggtattcatgaagctttgtatctcttaacaatttggtttagtaccggagttacaatataaatagaacaaactatttttttcatgaagatctctgaacatatatctgaatttggctatgccttctgaaattgtgatgaaaacatagatagaaagcatcataaatgcatgcccatctgcaactgtttgactataaagctgtcagtgaagtagaatatcggaaatattttcatagaaatgttcgttggaattaatattttctttctggtggtggcaacaagaggacttgtcttaggaatgctgggaaacgggctcattggactggtaaactgcattgagtgggccaagagttggaaggtctcatcagctgatttcatcctcaccagcttggctatagtcagaatcattcgactgtatttaatactatttgattcatttataatggtattgtcccctcatctatataccatccgtaaactagtaaaactgtttactattctttggkcattaattaatcagttaagtatctagtttgccacctgcctaagcattttctacttgcttaagatagcsaatttctcccacttatttttttgcctggctgaagtggagaatgaacagagtggttcttgtgcttttcctgcggtctttgttcttatcgtttgtttacctttttatgtccaatgccattagtgagttgtgaaaaaaacatgactttgcactcagatacaagtaaaatagtctatcttcaaggccttaggcttctcagcttgacatacgttattccctttcttctgactctgacctctttgctccttttatttatatccttagtgagacacaccaagaatttgcagctcaactctctgggctcaagggactccagcacagaggcccataaaagggccatgaaaatggtgatagccttcctcctcctttttwttattaactttatttccactttaataggagattggatcttccttgaggtagagaattatcaggtcatgaygtttattatgatgattttacttgcctttccctcaggccactcatttattataattttgggaaacaacaagctaagacagagctccttgagactactgtggcatcttaaattctctctgaaaaaagcaaaacctttaacttcatagacaaaatttaactttctgcatctatgaaagaaataatagaagacctcataagttaattttatatttaacaatttcttttttggagtccttttaagtgttgttaaataattctgaaattttccttaaaatattcactaaccatattttctcaaagttgccggacataatgtctgattcaaggaaatgtctctactataataatgcctgctagtaacaatagagtatgtgagacttggagaaaaagataaacatttataatggaatataaataaatgcacatatgatatacaaggcaatatgaataaatatatataaaatcacagaaaaaagtgtaatgtaattttttgaacaaaaaattataaatacagtagggaaaaaattataaaatgttaagtataattaagtaagtttgttaaagcataatatatatcagtgtaatgcttggatatgtttgtggatgtgtagtgctactttgactactgtaataaaataacccagatgtaatcacagtagctgggaatgtaatgaagcagttaagagaattttgcttgcaaatgatgttactaaaatatgaaatgaagatcatgtattattttaatagaggaaatggatatgtccatatgaaagaaaaaaaacccagcactgttgtttgaggtaacttttaccataattttaaaaatggaataaagggaaaaaatagctggtaaatcatgggaagtatgttggttttatattantcttcatgaagtagtaggtgaaaatattcttccaggttaagccctgatgcagagaatggtgtaagaatgataaggccatagggaagaattgttgttttctccagacaaaatgaactcttccattcaggaaattagagtgaggtcacatctatcacatttatcaggtagggttctctcatttagctattaatatcatcatcaccaccaccaccactatcatcatcatatatttcatttaactatttgttttttaaatgtttacatgcacgatttggagaatgtctaggtaatttcctaaagattattattgtgggtaagttgcattattaaagagcaargcttatgtgaaacttaatacatttagagttagaagttgagtgtatttttacttaaaatgcattgcttgaacaaatgatttataaataatcttaaactcatcagaggctaactaccagaaatatttagtttttagtgtaaatagcatttgtataataagagagakaaagtcaataaaccattttataattaaactcttatttcaaaagagaggctttaaaagtcaatgaaccaaacagaaataagccctcacatcttcaatatcatactctcttgatgatggacttgtaagacacaaagccccatgtctaacagtgtaaggagagtaaaaggactacttaaatattaagccatgttataagatggtgttgctgwgattgatgtattatcttttatttatggtaatggcattttgagatcaagttctgctccttgaattttcatgtaataagagtctgtggtgaagatgcagcaacagagaagctgctacttgcatcaaatttatttttagttcttttcaacttggttaagaatgattagactcacrcttttattctattcttgaccaaagtgtgggtaatcccagcactttgggaggctgcggcaggcagatcacgaggtcaggagatcgagaccatcctggctaacatggtgaaaccccatctctactaaaaatacaaaaaaattagcygggcatggtggcrggtgcctatagacccagctactcgggaggctgaggcaggagactggtgtgaacccrggaggcagagcttgcagtgagccaagatcgcgccactgcactccagcctgggtgacagagcaagcctgcgtctaaaaaaaaaaaaaaaaattggtgttttctttgaccaaagtgtgggtaaaagaagagaattattggtattttcttgtcaagtttactaaaagtttttaaaaaatctttaagaatttggtattatgagtattttatttatccatagaaataacttacagaaatagagtgaaagtttctttctaccaccaaaataatgactgaaaaaattaatattamgaattcaatatttaacaatcaattagatttaacaatcagttagaaatggtagaataaagaattagtgaattggaagataactacacagagtgaagcataattagacaaagagatggaaaaatacaggctaaaggggaagagcattgaggctacagtcagaaaggcttaacatacttttggagttctggaagattagaagagagaatgtagggaagaagtaatgttgctgagacctttccaaaaataataaaatgtatcaatccatacattcgagaaaccaacaaacctcagacaagataactgaaaacaaattaacatataaatgctacaggaaaccaaagaccaatagaaaatttgaaaagtagcctgagaaaaaagatagattatgttgaaaggatcaactgtttgaatgacaastgattttcagcagaaagcatggaagctagaattcaatgtaatatattttcagtgtgtttcaaaggagtagcagacatttcataaacagaaattcaaaaggatacattttcagatagaaaaaagttactgaaaatacaaagttgaagatgcaagaaggaatgaaaataaaggcaatggcaaatgtgcgtaactaaaaggactattgactgtatagaacaataatatcttgtgttaaaagaggtaatgaataaaatgtatgccaataacatatagactggggtgaaggtgaaaagattaaatttagtttaattattatttaaccttttcattgtctgtgaagagagtctgagtatcaaattcaatgcatatactctagctatatatccaagagaagtgcattaaatgacatgtaaaataatgcccatggtagtattatttgtaattgttctaaaaagaaacagctcaaatacctrtaaattaaggaaggattaataattatagcaaattcatataatggaacaatatagagaaattgaaagcaatgaaccacatgtacatgcaacaaagtggatacattttatcaacataatgcttaaaaaaagaagtcataaacaagaagaaaatatattaaggttgtatttataaagagttcaaaaatgaggcaaactcaaatcaatttctgcaataaacgaatcatcttgaaaattgtatttacaacttcacaacttcctgtgttaaagtcaggaaattttctttctatatgtcacataaaattctagttttgatttttaacaactgacctaattggtttctaatgttctagaaaagacttataatcatttttccaggtttctgtaccttctctggttctctggttttcaagtgagaaaagctacacctaagcacccccatgaattatactggaaagttttccacctctcttttttgagcagagatttaggaaagttggcatttggatccaagtgacccaagctttagggcagaatgaaaattgcaaatcagtgcaagttactttttctcctatttgcatgtaatcaaagttgaatccagcccttcaatcaaaattacagatcgagtgttactgcctgggattggcagaactgtttgataggaaygaaaatgtttttatgttaatataaaatttgtgcccacatgtatgaaggatttttctattaaaactctacaattaagcrgaagatgtgacacactgcaagaaatatggcaccatgaaactaactacaactgtatactattggggctcagaaaatgatactgaaaatatatcgctctttgacatgctggactaaacaggaagcctcarattctctgtctgaagttttcccttctgtctgtgtctctgatcctctttcctgaagcaccagagggaattctctctggaatttccttatctgattaagaaaatttctttccagaagaaatgcaatttttaaaagactccttgtctaggaatctcatcaaatgaccaggataagatactggatcarataaccactggataagatacttggagttgtcaayatgcctagacagacttttcagttgttcttttgaaggcagctccaagagattccctgggtgacttyatctgcataataagacaacctttgttcacagtgaagttctggccctaaccttccctccacctcccstagagctcagaggaaatttgtcctaggccattgctctttagattatgcatttcctctggaaatcatttattcttacatcccttgctttcctctccccaattaagagtatacttaagagtcaattgtctggcccctgctttgggtctcatacttggtatatggctgtcatttatatatgcacattaataaaaacttgtgttttctcttatttatctattgtcagtttattttcaatgaaccctcagagcagatgaaaactttctcttggcttcttacaatacttgattctcttttaatgtatttcagttgaattggagtatatgctactgatgggagaattaaaagaattattgataaaaaacattttggmattgtttgattgtatccgtaaactgccaaagttggctgatgtatcataagatttatttgagtgactttattctaacaaatttgtctccagtattgagtatgttgaatactatatactatttttcaaaactcaaaaatattttatactatttttaaatattacttctttatttcaatattaaagtagaaaaaacattccactattttgctctggacacaaaccacttgtttcgctctcttgtttgccatttttttgggggtaatatctgttagtgagctcataatatttatcataattcacattatatgtattatattgttatatctacccattcataagatccatttctactcatatatctcaggtgtgtgttggtataaaattcacaaaatcttacaagtcttttggtctgaattttactttgtcctgtrtcacattttgtatcttgtcatttggggcctgctgggaattgagtgttatcatatatttaaacataagaggaggcagggatatatatagagkggtatcagcattcctctgtaagccaaacagctcaaggtaactcattacaggtttttaaggcaagggaaggaagactaaccttctcagcgaggggaggaagagtgcatctcctggcaacggtgcaccagcagaatttaggggttcaagatcctccagattctttgggatctgccattacaggcccaccccartttttaagttcctatttcttttttagcaaatttcctgactttaacacaggaagttgtgaagttgtaaatacaattttcaagatgatttatttattgcagaaattgatttgagtttgcttttcagaaattttagtacttctgctataggagataaggacttttttgaagacagtygtaggaaygttatgttagtttacataatccgaagctagtaattcaragccttaagttcataatttttctttctccaagttttctagcacacttataagtcagcaacgaaccctattctacttatgttcactaaaatgttctatggcagcctcactcaatgtcttgycttctataggaacttgattataagttattttgtaagtgatcatctatggacaataatttaaataactgttgtgtcaccgcatgccagggattgccagtgtctcctttaccgttggaaacagggtcatgaatacccttaaatctaattatatgagacaactaataccagacaactcctacctagacttggaatttgattctgtcatgatcmacagtctcattctgagtctcaggcagaaggggcagctgtacttgaagtgtagctgtggctattctcatggtgatyatcaaaatacaagaaggcccagacaaactgataatgcatttttaagatctctgctcatatacattstgctaatattctaaagcaattcacagacaagtacaacattaatgggcatggaaattatactttgcccacagtgggagagcacagcaaagttacatgcaaaggctgtgagtaatactattaaagggaataaataattggggctaaaaatccaatctactgtcatctcccaagctgaactttcttaaccatagatgtcaataaacataaaagtggagaatagttaaaactaaaatatagtacagataagtgataaaacaaaaataaattgatcttgagagaagagaaattttcttctataaaaatattaaaacagttttgtgataaaaataaaaaattctaatgtgcaattttctaaaaagtatagattatcaaaattttcttgtaaagaaatactcttgcatatgtcaaaaataatgaaagaaattttcttgtattatactatctcacaaattatcttttccaaaagagttgtaggttatatttaaaattttgtttataataaacatcacacaccggggcctgttgtggggtggggggaggggggagggggaagggatagcattaggagatatacctaatgctaaatgacgagttaatgggtgctgcacaccaacatggcacatgtatacatatgtaacaaacctgtacgttgtgcacatgtaccctaaaacttaaagtataataataattaaaaaaagaagaaagaaaatggaaaaagaaaaataaagaaaaacattaagttatttaaaaatctaaacacccgactgtaaaaataatacctatgtattattgctatattataaaattttagatctggctaccatcatgaaaaaaaaatatgacataccaaagaaatgctgattccagaaatgtgaagatggtttaacccatggtaatatattatgataatcaactcactaatagatttaagagggaaataatatgtttataaaatagttgtggacacactctttaaataaatttagtacccaattataatagaaaatttaaccaactaaagaaagactttctttccctaatataatttgtcccctaaacaactacaggcaatcttgtaacaaatgcttatcatattatgagttccacagaaaagaggcttgaagtaatcttgtatcctagtaatttatttgagcctgcattaccatggaagcaggaatggaagtaaaggatgagttaggcaaaaaaaggaagagagaaaatacaagacatatttagctggctgtcacttcataatcacagttgatttcttcgtatgtgtttaaaaggagtctgtgaaatttctgtctctatccaagggaagaaataaaaagaatgtatatattggctctcatctttcattggtcagagtttycagggtgtcccctctgtgtatttctcaactatattttctagcctctctaaccagcccctggtgtagcaagatcccgagagagcagcaacagcacttatggcataagcagggcacattgaaaaaaaaaaaagcaaggatgaccagcagtctgtttttggccagcagcctgcaacttcgtgtgcatttgtgtggatgttgacagactcttgcaggttctcacacttcagctgctgcaggtaaatcccaagacaggaaaagagaggtgggtagtatcaggcttaatgactgaggggaaatgcagtcaggctgcactcatctccttggagcagcttcaagcagggtccagccagcccagcaagaggcagagtatcagaatgatatgactccagtttcaaaggcctgtcacagctcagtgagactcctcaaaagagaaaccacctctctgacatctttaagaacacagttggcaaaaaacaaaacaaaccaatgaaacctatagaaagtgtttctgggcaatatataatggagtctggtatagaggatcaatacaaaaatattttcactgatatcttttttcattattattatactttaagttttagggtacatgtgcacaatgtgcaggtaagttacatatgtatacatgagccatgctggtgtgctgcacccattaactcgtcatttagcattaggtatatctcctaatgctatcccttccccttcccccraccccacaacwgtccccagaatgtgatgttccccttcctgtgtccatgtgttctcattgttcaattcccacctatgagtgagaacatgcagtgtttggttttttgtccttgccatagtttactgagaatgatgatttccaatttcatccatgtccctacagaggacatgaactcatcattttttatggctgcwtagtattccatggtgtatatgtgccacattttcttaatccagtctatcattgttggacatttggattggttccaagtctttgctattgtgaatagtgctgcaataaacatacgtgtgcatgtgtctttatagcagcatgatttatartcctttgggtttatacccagtaatgggatggctgggtcaaatggtatttctagctctagatccctgaggaatcgccacactgacttccacaatggttgaactagtttacagtcccaccaacagtgtaaaagtgttcctatttctccacatcctctccagcacctgttgtttcctgactttttagtgattgccattctaactggtgtgagatggtatctcactgtggttttgatttkcatttctctgatggccagtgatgatgagcattttttcttgtgttttttggatgcataaatgtcttcttttgagaagtgtctgttcatatccttcacccacttgttgatggggttgtctgtttttttcttgtaaatttgtttgagttcattgtagattctggatattagccctttgtcagatgagtaggttgcgaaaattttctcccattctgtaggttgcctgttcactctgatggtagtttcttttgctgtgcagaagctctttagtttaatgagatcccatttgtcaattttgtcttttgttgccattgcttttggtgttttagacatgaagtccttgcccatgcctatgtcctgaatggtaatgcctaggttttcttctagggtttttatggttttaggtctaatgtttaagtctttaatccatcttgaattaatttttgtataaggtgtaaggaagggatccagtttcagctttctacatatggctagccagttttcccagcaccatttattaaatagggaatcctttccccattgcttgtttttctcaggtttgtcaaagttcagatagttgtagatatgcagcattatttctgasggctctgttctgttccattgatctatatctctgttttggtaccagtaccatgctgttttggttactgtagccttgtagtatagtttgaagtcaggtagygtgatgcctccagctttgttcttttggcttaggattgacttggcgaaagcaagagcaaacacattcaaaagctagcagaaggcaagaaataactaaaatcagagcagaactgaaggaaatagagacacaaagaacctttcaaaaaattaatgaatccaggagctggttttttgaaaggatcaacaaaattgatagactgctagcaagactaataaagaaaaaaagagagaagaatcaaatagacacaataaaaaataataaaggggatatcaccaccgatcccacagaaatacaaactaccatcagagartactacaaacacctctacgcaaataaactagaaaatctagaagaaatggataaattccttgacacatacactctcccaagactaaaccaggaagaagttgagtctctgaatagaccaataacaggakctgaaattgtggcaataatcaatagcttaccaaccaaaaagagtccaggaccagatggattcacagccgaattctaccagaggtacaaggaggaactggtaccattccttctgaaactattccaatcaatagaaaaagagggaatcctccctaactcattttatgaggccagcatcatcctgataccaaagctgggcagagacrcaaccaaaaaagagaattttagacyaatatccttgatgaacattgatgcaaaaatcctcaataaaatactggcaaaccgaatccagcagcacatcaaaaagcttatccaccatgatcaagtgggcttcatccatgggatgcaaggctggttcaatatatgcaaatcaataaatgtaatccagcatataaacagaaccaaagacaaaaaccacatgattatctcaatagatgcagaaaaggcctttgacaaaattcaacaaccttcacgctaaaaactctcaataaattaggtattgatgggacgtatctcaaaataatargagctatctatgacaaacccacagccaatatcatactgaatgggcaaaaactggaagcattccctttgaaaactggcacaagacagggatgccctctctcaccactcctattcaacatagtgttggaagttgtgaccagggcaatgaggcaggagaaggaaataaasggtattcarttaggaaaagaggaagtcaaattgtccctgtttgcagacgacatgattgtatatctagaaaatcccattgtctcagcccaaartctcsttaagctgataagcaacttcagcaaagtctcaggatacaaaatcaatgtacaaaaatcacaagcattcttatacaccaataacagacwaacagagagccaaatcatgagtgaactcccattcacaattgcttcaaagagaataaaatacctaggaatccaacttacaagggatgtgaaggacctcttcaaggagaactacaaaccactgctcaatgaaataaaagaggatacaaacaaatggaagaacattccatgctcatgggtaggaagaatcaatatcrtgaaaatggccatactgcccaaggtaatttatagattcaatgccatccccatcaagctaacaatgactttcttcacagaattggaaaactactttaaagttcactgatatcttaaataaggcaaaaatgctctttaacatctgtagaactcaacattgttctagcacttttagctaatgtaataggacaagcaatataaactcatctaggaactggaatgagatagacaaatttacaatataatgatgtgatgatgtcactgcttaaatgaacactcctaaagaatcaacaggtactattagcataagaaaagataacaaggttcttcatataacatcgatttaccaraaaacagtgtatctattgccaacagtaaattacaatatgtaaatttaaaaaattctttggccaggtgtcatggctcatgtctgtaatcccagcatgttgggaggcccaggcaggtggattccttgagtccaggggctcaagaccagcctgggaaacctggtgaaaccgtgtctctactaaaaatacaaaaattagcggtgtgtggtggcacacacctgtagtcacagctactcagtaagctgaggtgggaggatctgatcttgggaggctgatgctgcagtgagccgagatcgcgccactgcactccagcctgggcaactggagtgagacattgtttcaaaaacaatacatgaagagatgtatcatgttcatagataaactgagtattataaaatataatttctttctagattaatatagtcaatgcaagttgtggcaaagtcttattaaagttttgygraaattgtgaaaaatgacttgaaaaatacatatagaaaattaacagttcggagataggcaagaaaacttggaaaaagaagraggtaagttctttactgggtatcaagatttattrtagtgtaattatgaaaattgaaagaattttggcacagaaggatgcaatagacaacaaaagggaatagtaaggcagaatatatttaggtaatttactttttgtgcacatgtaatttgtcttayaataagattatcattagaaattagtagataagatgtgttttttgcagtaaattgtttggataatggacttttcataaggaggaaaatcartgtgtaacttgtatcacaaaaaatagtccaaaaggactaagatctaaacattaagaacaaaatttaaagctaagaaaaatgtaaattattttataaattcagggtaggtgaggattttatctgaaagatacaaaaaccacaaaacataaaggaaaagtttgataagttttaaattccttggaaagatctgttmattaatccagctaagttagctgtctgactctagtctaattatayatctaggcatttgataatgaatacagaaagagtattaaaactaggaatatatggatgaaattaaaaatactcattttacctaataaaaaaatcatgttcttagatgacattctcattgttgtgatgacatcaattcttgccaaattcaggtatacatgtaagatgttaaggcaaatattgccattttttttctcatttagagtagtttattatgctaagggcctgggaaacactttagattcagtaaaaaaaactacctagaagaataaagcagaatgaatactagaaaaagactgaaagaaaaaaaatgtgtaaagacgcacagaatgaggaacatctgttggtaaaatatattataaaaatactaaaaaggtatccagatagtaaaaagctcagaaacatgaaaaatctctttcactactggtagaagcatatagtaggatatagtcaaagcgaatttagcataaaaatacatacactttatatctatgtatctatgtacacatactttttgatatgcatgtataactacatatttctgaaacgtttctaaaaataatcataaaatgattacagatatgcaaaaacagttatagagctatgtatagtttgttaacattaagataaaagccttaacattttttatgcttaaaaacattataatgcttcattatagcagaatacacatttgtcattaaaagagatayagagcagaatttctcagagttcagcagaatattcatagttgttacaaaaaaawgttcttaatttttaaatattttaggcaatgctggcttaagcgactttaacctttttgtttgtttttaaatcataagctttctgtatactctgytagtatgtaaaaggaagtgctctatgtggagtttcccaaatttccttttctgtgaaatccttttctgttttagaaaataccttttaattctaacattttcaggaatttaatttgagaaattctaatattgagggattatgtatcagtgaggaacaatttcattttttagaacatgtagactgggtatggtggctcacacctgtaatcctagcactttgggaggccaaggaggatagattatttgaggtcaggagtttcagaccatcctagccaacatggtgaaatcccatctctactaaaaatacaaaaattagccatgcatggtgttatgtatctgtaatcccagacactcaggaggctgaggcagggagaatcacttgaacctgagaggcagaggttgcagtgacccgagatygcgccactgtattccaacctgggcaatggggcgagactccgtttcaaagaaaaccaaaaacaaaaaacaaaacaaaaaaagtataggcacatgtgtaggttyggatggaacaataaacactrcagagwttcrggggattgtggcagatggatgtgaggcaggactagattgcagctctagacagaccagcatgtggatgcttgtattgtgaattttagctacaaatccactgcaagaacaaaccagtaatcccaagaggacccacagatcctctgaaggaagcagagtgctcctgcaggacccaggagacacccaaatacagtgacttccccaactgcaggagtaggaaagggagaccctcctcttctgaacacwcaccaccactggagaactgaaggtctgtttgcaggagaagtttctggctttaccttgagctgagttaagttagagagctgagtgaaatgcaggggtagaggaagcagggcagaaggccctgggagctcactgggtccccaaacagccgattcctgcctggcaccatagtactccatcaggagggtggccagaggagcagggggtaaaaccccccaggcagaagaaatctctagctgaactttataacaatttgaactggtcaagaagcctcctggccagaactcgggggaggatgtgaatcgggcatgcagacktcacaggctggggaagaactaaagcccttttctctcatggctgggaggcagatagccttgggcaagttttcaagcccattttgccctctgcctggaaatagaatcggtgctgtcggctgggaggggcatggtgggagtgagaccagcccttcagtttgcatggttgctgggtgagacctgtgactgttgsctttcccccactttcctgacaacctgcaagactcagcagaggcagccataatcctcctaggtacccaactccagtgacctgggaatctcatccccatcccccacagcagccacagcaagacccacrggagagtctgagctcagacatrcctagccctgcccccacctgatggtccttccctatccaccctggtagtggaagacaaagggtatataattctgggagatctagggccacacccactgccagtccctcaccacactactacagctgatgctttctggaaagcaccacctcctggtaggaggccaaccagcacaaaaatagagcattaaaccaccaaagctaaggacccccgtggagtccattgcaccctccatcacctcaactggaacatgcactggtgtccaaggctgagagtcccataaattgttcacatcacaggactctgtgcagacaactcccagtaccagcctggagccagtagacttgctaataagttgtcatctccatctattacagtatttgctctaatcatatttgacttatatacctgggagctccagtgttgagtgcatatatatttacaattgywatatcmtttccatatgttgaccttctttgtcrcttcatagtttttgtcttgaaatctattttgtctaatattagtatagctattcctctttttttggcttccattgccatggagtgtctttttccatccctttattttctatctgtgcatgtctgtataggcgaattgtgtttcttataggcaactgattagctagactatgccttttgattggagagtttagtccatttacattcaatgttattattggtagtaaggacttacttctgccattttgttatctgttttctggttatgttgtggtctgctcttctttctttccttcctatctttctttagtgaaggttattttctctggtgatatgatatagtttcttgctttttatttttttgtgtgtatccattgtattatgttttttgatttgcgattactatgaggcttgcaaatactatcttgtaacccattatttcaagctgatagcaacttagcactgtttgcataagcaaacaaacaagcacaaacactaaacaaatgaagactctacaccttaacaccatcttctcagtttttaactttttgtgtcactatttatatatcattgtgctgtctatatcttcaaaggttgygggaactattttttttttgtcagttcatgatttaatttttgtactttagcgaggtttacacaccacatttacagtgttatactagtctgtgtttttctgtctccttactattaccagtgagttttatagctttaggtgattacatattgctcattaatgcccttttctttctgattgaagtaatccctttaacatttcttataggacagatctggtgtttatgaaatccctcagcttttgttggtttggaaaagtctttctctttcatgtttgaagaatattttctccagtaacactattctgggctaaaagttttttccttcagcacttctaatatgtcatgccactgtctcctggcctttttccactgagaagtctgctgccagatgtagtggagctccattgtacattatttgtttcttttcttttgctgctttagaatcctttctttatccttgaccttagggaaattgattattaaattccttgaggtagtcttcttcaattttayctggcattgtttgttgagaaaaacgattaattcctttcgaattgcaatagtacctttttttgaaagcaattgaccatgaatgttggtgttagtttctggactctcagttgtgtttcattgttctttttgtctactgtaatgtgagttctatagaatcctgattagggcagctttgaagtaagctttgaaatcagaaagtataatcctccaaatttcttattttttaacaatttctttttgtgatcttgtcacttggcatttccagatatattttaggagtggttttccaatttctgtgaaaaaagtcttctgggatttggtagggattgcactgaatatatataagttgacttttcacctataaagactctccttgtgctgaatttcagttcagctggtcatcgttgcttgtacaactctgtgatgaattgaaaatataattttggccttttgtttcttttatcctagttgttggagacggatgtcatgcctttcttaaccttgtgtgttctgctcaaaaatggaggttctcagccaggtgtggttgttcatgcctgtatccaagcactttgggaggccaagatgaggggaccacttgagcacatgagttgaagaccagactgggcaacatagggagactctttgtctctataaaaaaataaaaaaaaattatctggatgttttggtgcatgcctgtagtcccagctactccagaaggtgaggtgggaggaccacttgggcccaaaagtttgagactgcagtgagctgtaatcaagccactgcactccagcctgggtgacagagcaagaccctgtctccctccctccacccaaaacaaggaagttctcactggtatcttttatgtatcaagtaacacatgatcatatgaaaaattaataatccttgattcctgcctgtaccagaaggtaaaattgaaagcagttatacaaatagtatattaactcctcagaaagactatccaaagagaatattattatcatctgtattttacagatgattataccaaggcagagagtagttgtaaaatgaggtctgtctggagcatacctatatgaagcagaaaatctggtttcctgtcttggcagtctgactccaaaatcctctcttagaaacaattatactgtaaaaatgaaaaataaataaaatccaagattggagactgattttaacatctaytcatcttaaaccattaagtaatcaaaaataaattaagcagaggaaaacaaaaccaaatattcatatagaaagaagtctagactcttcaatggaaaacgtgtttttcaagtgacccacaatagttacacaattgctgagcattttaattaaacaataaatatttaagtattaactagactcaagagaataacttagtgaaaggcccaagcatgagtggtaagtttgataaatattgaaaatgggtcaaaaagcccaaatgggaaaatagggctatttccacctggatgatctccctaaaattaattttccattttggaaattataggacaataattcctcctattcatgaggggtgagtatgtgtgtatgtgtgtgagtgtgtttgtattaatgagcttgttaacaataagttatacaaaagtattacttagtagcaaccaggttttaaggactattggcctttttgaggttcctaagaaaaccttgaatgcttttggtaggaaaagttgggattcactctacatattactggcattgaaaaaaaataaatctactttggtgatgatcctagctatcctcaagctccattcaccaggctatacaaccaatgtgtcatataygtattgggttgtaaaatatctctaacaactgaagttgctgaaaacaaattatggagaggtgaaacaaggaaaaaattgcagaacaattaaaaaactcttccttggcatgctagtatatgagaattcagctttcacttcaacatcaatatggaaaattttaccttacagcaaggatgttgtgtttgaataggagttaatttgagctgttttggaaattatcatgttttccataaagacagcattgatttcatccattagcatattgagatgatttcctstttgacgttggtcacagaatttaaaaggaacaagaacattactgcacattcaggaatcagttacacatagaagttaaggtcaggaccttaaagggaatcttgaccagtgatattaggcctactttttaaaacattcagacatgataaatttactaccattcattttttcaataacagcaatgatatatttatttttcccatggacacctacattaagcttgttgtctatttttatatttcaacatttttgtctttgagtccttttaggagttgttaaacaatcctgaaatttcccttacagtgctgttaacaattatattttttcaaagtcctttggcataatgattgattaaaggaaatatctccagtataattacacttgcttataagaaaagagtatttgaaacttgaagaaaaaaaggttagacaaatttataatgaaatataaataaatatgtataatatataaggcattattaataaatgtatatgaaataactatcatagaatgaaatttattgaagtaaaaatacattctaaattagaataggaaagaacttggaaactattgtttaataatatgttwtataaatacaaaactgtaaatattactcttacgttacttattttggaaaggatatgaaacaatgggaattttcatattctactcctaggatgataaatctgtaccatcattttggctgagtatggcattatctgattaagatgaaggatcacatcctaaacccagtatttacactcttatccgaatacatatacatgcacatgcgtatcactgagtttcagtagctaaagttgagaagtacttggaatgtctgtcagtcctccaaatggataaacaaattatggcatacttatacaatggaatactatacagtgatcaaaattaacaaagaagactgacatgtttacaacagkataatacaacaaaggaaatgaacaaatttgagctacatagataataatactcacagatgtgaaaggaattatcaagatggaaaaatacatttrgaatgatcttttacataaagtttggaaaaaaaatttttaatacattgtaatttgttacattggtgatgaaactctacagtgaaatatatgaatgatcatcataacaattgggataatcaggagggaggaaataaaagggaaataycaacaagaagacgtatattgggagtatctggattgctggcaaattctattttctgaccaaggtttggtaacatcaatgttaatgttataattttttcttactgtttttaggttttattactctctgtatgttatattccccaataaaaaaatgttaaaaaagcaaaaacataagtacatttctacgtataaattcagggtgatacagcatattctcatagataccattgtaattagagtttttgctgaataaaggagaatagagcattatggtactaagaaatacaagttaaaatttaaaactttttttattttgagacagggtcttgctctgttgtccaggctggagtgcacaagtgcaatcgcggctcaatgcaacctctgccacccgggctgaagtgattctctcagttcagcctccagagtagctaggacaacaggcgtgcaccaccacgccctgctaattttttctatttttggtagagatgggattttgccatgttgcccaagctggtcttgaactcctgtgctcaggcaatccaccgcctcagcctcctaaaatggtgggattacagttatgagccaccacacctggcccaaaagttttcttaaattaattaaaaaagaagataagcaagaactgtaaatccaccttcttaatgctaatatgaatttgaaacatcaaaatttgaatatttatgattgctagacacctttattcttatttccaatttaattattcataattcacatttcagtgtcagaaagtcatgaatttccaataaactatagtaagatggrtattacatatatagacctattatgccaaaatgtgtctctaaatgaaatatgtatattcatattgttagcattctaatttcacaatactattcatgtgtacacctgcattttgggttaaataytttgttactatatattttttggttctgcattagagaagaaaaatcataggcaaatttgttaaggtgtaaaacatatttagyatgatctttgagtatgtttgtgcatatataatgctactttgactgctatagtaagataacagatttagtcaccatagctaagaatgkgaaaaagcatttacaagaatttggcttgctaatgatgctattaaaagatgaaataaaattgatatgctgtatattgcatagagtatttgtctattttcatattgaaaactgcacaaaaaaacccaaaatagaatcctaattgttggagatcacttttgctatgaatttttaaagtrtaataaaataaaaaaagcaaataaatcattgaaaatacattggttttacattattcttgatgaaataccacgtgagggtatttgcctaggcctgatgctgagaataatataagaatcatgaggccatgaagaagaataatattgttctctcattacyttgaagtctagtacttaaaaaacaagactgaaatcacatttatcaaatagcattctcccttttacctgccatcatcattatcattatctatatccacatctatctcattaaatgatttatttttgaaatatttaaacacataatttggaaaataagtaattttaaaaagatcatmattattggaaagttacaggagtaaacagcaaagtttaagtcaagctcaatacacttagatttagaaattaagtgtagtttattttacaatacattgcttaagcaaataattatttatggatgagcttaaactaatcctcttttcactatgatcactatggaaacaatttagattttaatggaactaaacctccctagtaagaaagacaaagcaaatagcacattttatgagcaagcttatatttctaaagagagagttttaggaccagattgtcaaacagaggtaagacctcagatcttctgtcacacttgagtgagtgatgatggagtttgaaggttatagttctrtaaccaaaactatattcacggatagggattaaatggtggaattccttagaagcaccagattcagttttgtttccatgggaataaaagttcttcaatgtttgataaacttgtaagtactgttttactctttgatcttttaaagattgttataaatgaagaagccttgatttctgcttataaaaacagagtaaaatttaaatcgtggaatagattggtggagctgtggttgagatactatattttattaattgtaatgacattttgagatctagtgctgctcactgaatttccctataaggtgagtttgtggtgatgacccagcaacagacaagctactatccaaaaaaagctactcacatcaaatcaatttccggtttcttccaagttgcaggagaatgcctagaccatgattttaatctcttctgtgacctttgtattacaaaaagaagaaaattgtgaccattttcatgtcaggtatackaaaaatttataaaaactcctttttaaagaacttgtgagtagcttcactatgcctggctmacattttcatttattgtagagggagtttcggtgtattgcacaggctggtcttgaactcctgggtgctcctgccccagccttacaaaatgttgggattatgggtgtgagccaccctgcctggccaataaagagacttattgaaaatrttaagttgaatatgcaagaaggaatacraattaatgaaagtgrtaaatatgtgcataattgtaaatgaatgtttrctgtataaaataataatgtcttgagggtgattatataattgataagacatatgcaaatggcaaaaaatagactggaggtraaggtgacaggagtaaatttacttgaagtagtttttgaacttttctatgtctatgaggagattttgaacaatgaccctgtaattttacccaaaggtatatatacagaggaattgcatcaaatgatatatgaaagaattctctagtagaattattcataacttcaaaaaagaagcwgaccaaatgtacattaaggatgggtgaatcattacattaattccatgcaacggaacaatatagagaagtgaaaaaaaaccacatgtacttgcaactatgtgactaaatttcagaaacataatgttgagtccaagaagccacaaacaacaagaacatgtaggaatgcacctacacagagttcaaagcaggccagaccaagckatggagtttagggttgcatacctagttggtaaagtrtgaagaaaattaaggaaataatcaatataaattatggatattgcttatctcaggagatgtgaagaagggtttaggsggttggaaagtggcatggaggtggacctaggctgttttcagtgttccttgtcttgctccacataatggttacttgaatgtttatgatacactgcggtatttcccatttttgttttggttcatttctaagtgtgcattataattttaacataaaaagttttaattaggagaaacgtctcatagaaattattattactcgtctcattatatactgaggggaaaaataaactattggtatacattcttatacaactctaagagagttgaagtaagaactttatttagttgcaacatgaggaaatttgagatgattttatttgccaccccagatttttccaaaggatttcttctagccttaattatccacctcacatgaacaaatctttgccrttccccatctattttttcttttggctcctgaattcctgacacaacaaggttgtacacatttcccacactcttggtttagcagagttcttttatcagttatgtttttctgcaagagaaacccttcaaaactacattggatagctctggtgacttgagatgggccaaattctgcatcttggaggtcgttagagtttggccaatttagtctggatcaggtggggggcaatctgccttcattagtttctgattmtccttctgggaacagtgtactagccaggtgatattctcatagtaaatggaaagaggaagaacacccagtatggaagcyatctcaaatttctatgcaaagtgtattaattttttgttcatcaaagtaagttaaatgattgaacttcaagttcaggggaaaggtagtcagtcttcgtgtgatgggagkatactgcaagattatatatcaaagggtctggtactsaggaatacttataaaattgctgaacattttaattaaataataaatatttaaatattagacttgagagaaactttaccaaaggcctaagaattagagatatgtttgataaataaacattattcrtgggctgaaaaccttgagtgggaaaataggactaatttcacctggacaacctcctggaaactgattttttattttggaaattatgagaaaataattcgttccattcataagtggtgtgcacatgtgtgtgtttgtgtgtgtatttatgagcttgtgaataatgaagttacacaaaagtattagcagcaaccagatcttatggagtattggcctgcctgtggttctcaagtaaatcttagatgcttttgataaaagcagtttggattctgtgtatttaaatctggcatttaaaaaagtccgtattggtgatgatcttagttatgatcaagctccctttaagattttagacatttactatacgatctacatatcrggttataaaacttcccaagcaactgaagtcgctaaagacaaatgatggagaggttacacaaggaaaaattgcaaacactggaagtgaacatgtccttgtttgcatactagcaaatgagaattcaggtttcatgtcaatttcagtatgaataattccagcctataacaagaacagatggtgaatgagtcagttaatttgaattgttttgaaaataagaatgttttccataaagagagcattgaacttatccattagcatgccatggtgatttctgrcttgacactggtcacagcaattaaaagtaaaaagaatgtcacagcacatacacaaatcaggtgcatatagaatttaaggtcaggatattcaagcaatcacaaccagtgatattacaccagcattttaaaaatttctttttgtctgttcagacatgataacttttctgcccatcattttttccattctaatagtggttatatttgtkattggaaattttgctaatggcttcatagcattggtaaattccattgagtgggtcaagagacaaaagatctcctttgttgaccaaattctcactgctctggcggtctccagagttggtttgctctgggtgttattactacattggtatgcaactcagttgaatccagctttttatagtgtagaagtaagaattactgcttataatgtctgggcagtaaccaaccatttcagcagctggcttgctactagcctcagcatgttttatttgctcaggattgccaatttctccaaccttatttttcttcgcataaagaggagagttaagagtgttgttctggtgatactgttggggcctttgctatttttggtttgtcatctttttgtgataaacatggatgagactgtatggacaaaagaatatgaaggaaacgtgacttggaagatcaaattgaggagtgcaatgtaccattcaaatatgactctaaccatgctagcaaactttgtacccctcactctgaccctgatatcttttctgctgttaatctgttctctgtgtaaacatctcaagaagatgcagctccatggcaaaggatctcaagatcccagcaccaaggtccacataaaagctttgcaaactgtgacctcctttcttctgttatgtgccatttactttctgtccatgatcatatcagtttgtaatttkgggaggctggaaaagcaacctgtcttcatgttctgccaagctattatattcagctatccttcaacccacccattcatcctgatttkgggaaacaagaagctaaagcagatttttctttcagttttgcggcatgtgaggtactgggtgaaagacagaagccttcrtctccatagattcacaagaggrgcattgtgtgtcttctagcagaaaacaaactggtggtgtatgaaacattttatatttcttactgggttttctgtaatatatgtatatgaataatttccamatgtatacctagaaaagtcttttacctaaagttagtctagaaaagtayatatatatagatgtgtgtgtgtgtgtgtgttgtgtgtatgaaaaactgaagaacattgacaataacatgctttttattgttttttcacaaaaactgccaaattatagaaaatatgacaaaaattcctcaattatgaagccatgtttatttcatacatgtattttatatttcatttgtagaatttatatctatttataattattaagaactaacagcttatctcaggaaaaatattgctcttttctattgttatttgaatgacacaaatataccacagtgtgcttacaatctgttgttttaacctataactttttgataataaggtcgttcaattcttaatcactaatgaggatgtatcttcagggttttattccattatgaattcctattttatgtttagtaaaaagcaatcagaattattgttacaaaacaatgaacacaataaaatttgagtgasaagtayaygtakagtaaatttcatgtatgtgtaccataaacagtactgaggaatattagatttaatrcaagtatgtgaatagcttagaaaaaaatctctgctataagagggatgaaaaatcatgatcatgatcttgattgctattatcagcttccatatgcagttagaamagtcatttcttccagcttttcaattaaagaaaaactttttttgaaattgagctcwgatgtaaattattttagtattttttctaaagcacttctaagcccctgaattgctaattatatccttatcttccatttttaaaattctttctaaacttcagataagagaactccagtcttccgttttctaaaaaaaaatctgtcaatgtgaaaatagtataaaaattatggaaaataattcagtgaaactttttttaagtgttaaaatagtatctatgaaatctatgtattaattatgggatttgtcctagtgtaattttgttgtcaatgattaaatggaattgtcttgacatattcattaatrggaagttctattataagaaggaaatgtacagtcttgtttacagctaaattctacatgactgtattaattcttggtgttatgaaattttaacaatgttgttcagaccttaagataaatcatccccacacctgattcatgtattttttagaatcatgtatcttcctcagtacaatgtaagaacyataaaagaagagatcgtgtctgtcaggctttctgttgactcccaggacctagaacccagcacaaggaatagatggtcaaaaatgatattttaatgaacaaataaatgggtggataaaatgggtaagctgatgtggtaaaccaatgaaarggaaactcatcacaaaatctgcagttgcatgagttcccctgttctggtctcaggttaagattacaggcttatccaagcagaatccttcctcagaggaaaagtttggctattccacaattttaggggaaatatcacaataatatagtcttgatgcagctgtatcaggtgtctgaattggmgacaaggtagaacatcaaaattagatgccactattacaatattttaaaaaagcatataaaagactttggtctatttgcgtatgtatttttttctattgtgaattatatatttgtattatgatattttctagttgattatcatataaaaatggcatttcatttcaaaaaattgagttagtaaccagctactttactaaaatgtttttaacgtaatacctgatattaaagtgatgacatttatmtggaaggccaattcaagacaaaaatggcagggayatgtggaaattgagacaagaacsgatgtgaaacaatgtgtggtgatgtcyggtatgactctgctggcagccacttcacagtgaggtgagagagacagcatggtggtcatcagatgcatgcacttgactcccagaacttttccagaagggctacaaagggaaacsacagctggcattagtccatggaagagagagagaggagggagaatgtatctgctcagctgtygttagtcttctgtttccccttggccagggtttccctgagttagaactaccatctctgttgttctgtcttacatcatccagtcccttggtggtggtcatgaaagtcagacctcatgcccacagtgtggtgatgcattcaagtcccaaatggaaggatgatctggatcaggcaaggtgctgaccaggggaacaggagatagtgaagggaatctgagaaagcacatgtttgtgtccaataccaccactccttgtgccactgagacgtgctcataccctccagtcatggctggctttatgagcatatgacttgcacagttgtacagggttttgtgcttataggggcttgtgcttagagtgactctatgcttggattaatgttctgcacttgctgtttggcttttcagacagagtatacttcagcattccctctgctgaagagggaatggtcttacactggtcttacactgattccatagggatttgctctcccctctcctacaggcttgtcagagacatgcacagagtcctataatgcccactatgcatgcctctagcagctttgaattccgctggatcatctggcacagtggccagagcagcytggaccagagcctatatcttctgtagagccctctttagttctgggctccatttgagaccagtagcctttagaaacatcgttcgtgagtcagagcaatattctcaaatgtggaatatgttgtctccaaaatcccagtaggcccccaaaacatagtgtctcttttgtagtgataggaaatatayagagagagcaaaatgccgtttactgtaaaaaagattgtctcagcatgtggactagggacacyaaaaaccttaaaacrtcacctatgttgtcggtccctgaatcttctctgatttatctattttcttctggtattttacttctgctcaatgttataatattttactatactgaagaaacttgccatttcctgattattgtaccaactaatatattattattggtattattttgagacacggtctctttctgtccctgaggctggaatgcagtggcaggatcacagctcattgcagcctcaaccttctgggcacaagtgattctcccacttcggcattgctggcagctgggactgcaggggcacaacaccatgcctggctaattttggtattttttgtagggctgggatgtcaccgtgttacccaggctggtctcaaactcctgggctcaagtgatctgcctgtgtcggcctcctaaagtgytgggattacagtcatatgccacagggcccggtctgtaatattatcaatacattaaactggcaggatgttttaaaaaatgtaaattaaactgagaacagaagtgacatagccctgacatacaacagtgaagcagtgctattattcttacaaggcaaattgttttgattttccctcataatgggtgtagattaagaaccattcaccaaatcactagccccacaaaaagtaccagaagctctgctctgctcrgtgaagatagcacatcctggaaagcatttgtgagtgttgatttaagtttatggtagtctgcattcattcgataacccatctggttttggtagaggccagataggttaagtgaatcgggttatagaaaagactaccatcccctgtaactttcaggtgttttgtcatgacagtgaccagttccattccttagggaatgcggttattatattttatatattttgttgccagtagaggagaatttcagaggctttcccttggtcctgctataataatgttccttactctacagttcacgaagaatgtgagagtcctgccagctgccatacgtatccatttcaattcaggaasaggtaataactacaaactgattagatccaccttgggatggacatgagccgaagctctaggtagcatctgaccttcaaaactcccactgcgggctggatgtgatggctyatgcctgtagtcctagtactttgggaggccaaggtgtgaagatccyttgagagcaggagttccctgtgcatcatatggaaactccgtctctacaaaaaattttaaaaattacctggcatggtggtacatgcctatagttccaaatasttgagaagctgaggcaggaggattgcttgagcccaggagttccaggctgcagtgggctatgattgtgccactgtactccagcttgggtaacagagggagatgctgtctcagaacaaaaaaaaaggtggaagttctcactggtgtcaaatatcaagaraaacakgatcaaatcaataaktaacaatctttggttcctgcttatagcaaacaggtaaaattgaaagtagttacagaaatagtatattaactcctaacaaaactaaccaatgaaagttttattatcatctcctttttgttgttattttgakacggagtctcgctctgtctctcaggctagagtgcagtggcgtgatctcgactaactrtaacctctgccttctgggttcaaatgattctcctgctgcagtcaccgagtggctcggattataggtgcgtgccaccaccacctggctaatttttatatttttagtggagacagggtttcaccatgttggccatgctggatttgcactcctgacytcaggtgatccacctgccttggcctcccaaagtrctgggattacagccatgagccactgcgcccgctttttataggtgattatactgaggcaggagtagttggaaaatggagtctcagagcatagctataccaagcagggaatatgatttcctgwcctggcagyctgactccaagatcccctcttagaaacagttatgctataaaaactgaaaagaaacaaaatccaggattggagactgattttaacatctattcatcataaatcaataagtaatcaaaaataaatagagaaaagtaaaagtgaatattcatacacagagaagtgtaaattcttctatggaaaacatgtttttttagtgcccaaggaatagttatacaattgttgaggtttttctttttctttttcttttttttttttttttttttgagactgagtctcgctctgtcgcccaggctagagtgcagtggcgccatctcggctcactgcaagctccgcctcctgggttcacaccattctctggcctcagcctccccgagtagctgggactacaggcgcctgccaccatgcccggctaactttggttttgtatttttagtagagacggggtttcaccgtgttagccaggatggtctcgatctcctgacctcgtgatcagcccgcctcggcctcccaaaatgctgggattacaggcgtgagccaccgtgtccggccaaaatagttgagtattttaattaaataactaatatttaagtattctcaagagaataacttagttaaaggcctaagccttagagattaagtttgataaacattgaaaatgggctgaaaagcccgagtaagaaaattaattttcattttagaagttataggacagtaatttttccaaaccatgaggggtgtgtatgtgtgtgtgtgtgaatgtgtttgtgttaatgagcttgttaacaataagttgtacaaaattattagttagcagtaaccagttttcaaggaatattggccttcctgggcttcccaagaaaaccttggacacttttggtagaaaagttgggattcactctccataaatctggcattgaaaaaatgattcaacagtggtcatgattctagttttgaccaagctacatataacagtgtaggcatccaatgtatgatttatgtattaggttggaaaatttccctaacaactcacattgctgaacgcaaattatggagacaytaaacaaggaaaaaattgcaaaatgatgattaagtgtatgacttgatttgcatgctagcaaatgagaattcagctttcacatcaacatcagtatgaaaaattttatcttataacaagcatatagtatttgaataggagttaatttgagctgttttggaaattatcctgttttccattaagacagccttgaactcattcaatagcattccccggtgctttcctgtttgacattagccagagaatttaaaaggaacaagaacgttattgcacagtcagaaatcaggagcacatagaaattaaggtcaggaccttaaagggaaacttgtccattggtattaggcctgccttaaaaaatgcggacatggtatgtttactactcatcattattttccataacagtaatggtagaattygtattttcccatgggcaccttcattaggcttatagactattttgatatttcaacatattattttctttgagtccttttaatgagttgttaaacaaygctaaaatttgccttacagtatactgttaactaatsatattttcccaaagtcatttgacataatgtttggttaaaggaaatatgtctagtacagttacactctaggattgtaatcctagaattgtaaatcagtgcaattactttgagtatggcattatctgattaagatgatggatcacatctgaagacccactattgcactcttatcagaatacatatacacacacatgcatatcactgagttttaattgctaaagttgacaagtctstcaaatgtccatgggtgataaaatggataaataaattattgcatastcatacaatagaatactatacagcaatcaaaatgaaccaactagagagacgtttataaagaatgttaataaaaaggaaaatgaacaaatttgcactacatagatacgagagatattaagatggaaacatgattccgtataattacatttatataaagtttacaaaactatatttttaatgaaytgcaatttattacattgttgtcgaaattctaaagtgagacccaagagtgattattgtaacaactggcacagtagggacggaggaaacaaaagggaaatgatatcaacaagaaggtgtatatggggagtgtctggattgctggtaaattctacttcatgaccaagatgtggtaacatgacccttaatgctataatttttttctatactgtaccttcaggctttattaatttatatatatgttatgtttcatagtaatgaaaatatttwaaaagcagaatcatataataaatgaatgaatataaaataggctgaaaaaacattcttgtagacaccatggtaattagaatttttgctgaataaagaagaatagagcattatgatagtaagaaatccaagataaaattttaaactttaaattaattttaaaaaggaagagataaacaggaagtctacctccacactcttaatgttattcttattttgaaacatcagattttgcacatctgtattttgctrgacacctttttttcttatttccaatttaratatttatgatcacaacatttcaaagtggcagaaattagtgaatttccaatatatagtaatatmgatattaaatatacaggacaattttctaaatttatccctaaatgaaataataatacacatatttttaccattcaaagattataataccatgcatgtgtacacatgtgtgaggaaaaatattttgatactacaaattttttgaatattacaggagaattagtagaaagataattttgttaaggcataaaacatatgtagtataactacttggactgctataataaaatcacccagattttgtgacagtagctgagaatgtaaataagcagtagagakaatttaacttgttaatgatgctattaaaagatgaaatgaagcttattcactctataattgcaaagagtatttgtgtaagttcataggaaagtggaacaaaattaaacagccaacaagagagtattctttgctggaggtcaattttactgtaatttttagaatgtggtaaaagaaaaaaaatagcaagtaaatcattggaaatgtgtcggttttgtattattcttgacgaaatattatgtgagggtatttgtctaggcctgatgctgagaataatacaagaattgtgccgggcatggtggctcatgcctgtaatcccagcactctgggagaccgaggctggtggatcacctgaggtcaggatttccagactggcctggccaatatagtgaaaacccatctcttctaaaaatacaaaaattagctgggcgtgatggcgggcacctgtaatcccagctacttgggaggctgaggcaggataatcaattgaaccagggaggcagaggctgcagtgagccaatattgcgccattgcactgcagcctgggtgacaagagtgaarctccatgtcaaaaaaaaaaatcgtaaatccatgagaaagaataatagtgttctcccactacccttaactctagtacattgaaaagaagacccaaatcacatttatcaaataacattctcccttttagctgacattatcatcattattataatcatctacatttacatctatcttattawatgatttatttttgaaatatttacatacataatttggacamcgtttacataagttctaagagatatcattgtgggaaatttacgttagtaaacagcaaagttcaagtcaagttgaatacatttagatttagaaagttaagtgtagtgcagtttaaaatacattgctgaagaaaacaattatagatgatattaaactaatccaaggaacactataaaaagattttgattttagtataaataaaattgcttaataagaaaaataaataaaccatttcatgatcaagctcttatttctaaagagaggattttagggctaaacaaatcaaataagtaagccctcccccacatcttctctatttcatgtaggtaakgatggagttcaaaggcacagagccccatttctacaacataagcaaagtgaaaattaattcatggaatacaatgacatagctgtggttgatgaactatattttatctattgcaatgatattttgaaatgcagtgctactcattgagtttccttgtgaggasattgtgtggcgaggacccagcaagacaagctactatcccaaaaaagctacttatatgaacttcatttcyggtttctttcaaattgaaggtaaattccaagatgaagcttttattctattctctgaccaaagtgttggraaaagaaggaatttgttaccattttcatttctaacatactaaaacagaaaacaaaaaaccccaaaatcaaaaacacttttaaaaagaacatgscgttaagattagtttgttcagtttccctgtagaaaataatttatggaaagataataaaagattattctgaacactaaaacaagaaaactaaaaaatgaattatcaatattgagaatccaatagacagagttaaccagttagatggagtagaagagataattagtgaattggaagatagctacaaagaatgaagcactgagagaaagatggaaaatataagactagagggtaacaaattcatgctacagttggaatatgtaacatacttctggagttctgtaagattagaggagagaaaatagagcaagagaaaatacaaagttgtactgaaaatacaaagttgaacatgcaagaagcaataaaattaatgacaatgaaaaataagtgtgtaattctaaataaatgttgcctgtagaaaacaatagtgtcttgttggattaattgtataattgataagatatatgcaaatagcaataaggagactggagayaaagtgacaggaataaatttagtcaaactgttttgggcttttctatgtctgtgagtagaatttgaatatcataatcmaggaccgtataaatctacacccagatatatatacacaaaggaattgtagcaaatgatatgtgaaagaatgttcattgtagcattattaataatagctcaaaaataagctgcccaaatatatatcaaataaagatggataaataattacagtaaaatcataaaatggaaaaatatacagaagtgaaaataaatgaatcacatgtacatgcaaccatgtgattaaatttcagatacataatgttgagtccaggaagccatgaataaggacatataggattgcacctatacacagttcaaagcagaccaaacgaagctattgagtttagggttgcatgctttgttcgtaaagtacaaagaaaataaaaaaagatcattataaattatggatgtacttatcataagaggtgtgaagaaaggtgtaggggattggaaagtggcattgaggtaaacctagcctcttagcaatgttccatgtctcgccctacataatggttacatgagtgtttatgatacattgctatgttttccatttttgttttggcccatttctaagtgtgtagtctagttataaaaattattaattaggagaaattttccatgaaaattattattaccctgctcattatatactgaagggaaaaatccactatttgtatacattcatgtataactctaagagattttaagaagaaactttctgattttagttgcaacttttggaaatttgacatgatgtttcctgccaaccccrgatttttcaacaggtttttcttttaggtttaattattgacttcatatgacaaaactttgacattctccaactatttttcccttgtatcctgaattcctgacacaacaagtgtggacatatttcccacacttttggtttagcagaatacctatgtcacttatgtttttctgcaagagaaaatcctccaaaactacattagatatttgtatctcatatgtctttggatttcatttttctaagctgggtttgatggatggctgtggtgattggagatgggccacgtactgcatcttgaagatagagtttggatgatttaggctagatcaggcagtrgcattctgactccattagtttctcattcttcttctgggaacagtgtaatagccagatgatgtcctyatggtaaatggaaaagagcaagaaactccaatgtggaagccatcttaaatctctgtgtaaagtctactaatttcctgttcattgaagcaagttacaggagtgcacacgcatatatatatgtgtgtatatgtgtgcatgtgtatgaataacaacactgaccataaattatgaagccgagtacatttcacatatatatgtatgtttattatatgatagtttattgtatgatatttcatttgaagaattatctctatttataattaagaacatatagcttttatcagcaaattattgctgttttccattgtaatttgtaccacatgtatgaacttaactatcattgtttgaacatctaattttttggatggtaaagacattcaactctaaatcaatgaggagaatgtatctttggggtaggttttatttcattatgaattcttattttatgttgttgttagataatgatgcacacaattaaatttgagtgacaaacataygtagagtaaattttgtatatrtataccaaaaacagtactaaagaatactagatttataccagtatgtgaatagcttagaaaaaaaattcgtttgtataataggaatgaagaaacataatcatgatcatttcagtgctgttataattttttatgtgtagttagaaaagagatttcttccactttttaattaaagaaagccttttttgaagttgacatctgatgtcaagtatttccatttaatttgcttagccacctctgagcccctgaatttccaattatctcctttgtctcccattcctaatattcctcaaaaaaattcaaatattccttctcttaaaaaaaactcaatgtaaagagggtatagaaactatggatcataactgaatgaaacattctgcaaatattacaaattatctgtctaatcaatatattgatgataggaaacgtattaatratatgttttattgggggtgggcagtgagctgaggatcctcaggcatctcyatttttattttgtttctctacgtagtttctccagcatttggctctaggtgccaagggcacatgtgacaagaaggtgccagctttataaaccttgkaacttcttctgtgtcagttctgagacatacartttactaaaacacatcatgaaggcctgttttgaagagaaggggaataagactgcatctgttcatatgaggtatgtcgaagcacttggatatgttttcaaaccaccaatcttgatsatttagaaatgtgctcccttttccaatttcatcctgataaaaatgtatgatctctggacgttgccaatattcccctccattccatcatgagccgttctctgtaattcagaatctgtggactaagctgtaaaactaatgactgtcaatctattctacrwgaaatagtgggccaaagaaaaaggaaaacatgataagcagtaaaaatatatacacaacattttttgcttacactaatgatcaaataacacccataggaccaaacctcccacagatactttctataaattctggataaaatatttaaaaaaaaaaacagccatctgaaggcaatggagaatgaacaaaataggccgatactgaaaagcagttgacacttggaagaaggaaatagcaaggagtgagtttcctgattttatagctggccctagtgtgcaccaggcagaggactaaaacgtcagtaaaaaagctgtagagttactgggttgaagtaacagaggactgagtttagggtaacatgagccgcaggagrtcaggagaaaatctgagaaaggagaagtccagaaaaggggagccccagcttctgactataractatccaaagctttgtctggtccctacaccacacatgtataggcagacttcatgaagcccagctaaaataataaaattgatttcagttatcatcaagcacagtgaggacagaaatagcaacaaaacacattactttaggcaaagatactcttttyttgaaaacccaaactacattccattacctttcataacagtcatattccttgtccattcttgtttctaccatggttctaastcctacttttattcattacattaatcaaagtaattctctttcaaagaggaaactggaagttatgtaattgaggactattaaaaataagtattttggcagatgtgcaaaattctcargcacatatattacaactttctatagtcatatayatcctttttacacttgcttgaattggcatacaaaactcccatgtttgttaatgtaatccaaacaaatagccagtccataaaatataaaagttacatttagttatttatttatataacccgtgattggtgaccacatttcagtattccatcttaactagtaattatccaaagattttcatgaagtcactgaatctaatattagtctaaggtcttgaactaggaatcttggaaattaaatttaagacaataggctacagaaaataattactgtcaatatgtggaatttttcataatttgtattcagtttgtttgaaaacataattttacattttttggtattttaacattatgtgggcatattagtttaccttatcagtaaacaggtatgggaagtttaggaatttcttttttttwaatgtatttttaagttttgtggatatatagtaggtctrtattgagtacacgggatgtgttgatacaggcatgcaaagagtaataatcacataagaatggggtagccatcccctcaaacatttactcttttttgttacaaacaatccagttatactcttttagttacgttaaaatgtacagctaaattatcattgactatagtcactctgctgtggtatcaaatagtaggtctcattcactctttctatttttttttttggtagccattaaccagccacaccttccctttagcccccactacctttcctagcctttgttaaccatctatgtactctctatgtccacgagttcaattgttttgatttttagataccacagatgagtgagaaagtgcaatgcttgcctttctgcacaaacattgcagttattttttacttattcaacttaacataataatctccaattccatccgtattgctgcaaatgacaggatctcrttttttaaatggctgaatagtactccactgtgtatatgtaccacattctctctccctcttttttttttttttttttttgagatggagtctcgctctgtctccaggctggagtgcagtggcgcaatctcrgctcactgcaacttcagcctcccaggttcaagtggttctcctgcctcagcctcctgagtcgctgggactacaggcgccagccaccacgcccagctaatttttttgtatttttagtagcgatggggtttcaccatgttggccaggatggtctcaatctcttgacctcatgatccacccacctcggcctcccaaagtgctgggattaccggtgtcagccaccgcccccggccataccaccttctctttatctattcatctgttgctggacactttgattgcttccaaatcttggctattgtgaacagtgctacaacaaacatgggagtgtggatacctgtttgatacacttacttcctttcttttgggtatatacccaccagygagattgctggatcatatggtaactctaattttagtcttttgagaaacctttaaactgttttccatagtggttttactaatttatattcccacctgcggtgtacagtggttcccgtttctccacatcctcaccagcatttgttactacctgtcttttgtatataagctgttttaactgggatgagatgatatcttattttagttttgatttgcatttctctgatgatcaatgatgttgagcaccttttcacatgtctgtttgacattcgtatatcttgttttgagaaatgactatccaaatatttcacccatttttttgatcagattgttagattttttttcctatacagttgtttaagctccttttatattctggttattaatcccttgccagatgagtagtttgcaaatattttctcctattctgtggattgtctcttcactttgttgatcatamctttgctgtgcagaagtattttttaacttgatgtgatcccaattgtgcattttttacttggttgcctgtacttgtagggtattactacttaagaaatttttgctcaaaccaatgtcctggggagtttctctgatgttttcttatgggagcttcatggtttgagatcttaatcatacatctttaatccattttgatttgatatttgtatagatatatgggcctagtttcattcttctgcatatggatattcagttgtcccagcaccatttattgaagagactgtctttttccagtgtaygttcttggcatctttttcaaaaatgagttcactgtaggtgtgtgggtttgtttccgagttgtctgttctgttccatcgttctatgtgtcagttttaatgccagtacatgctgttttggtttctgtagcctcagtagtaagtatcatatgaagtcaagtaacatgattccttcagttttgttcttttttcttaggatagttttggctattctgggtcagttgtggctctatataaattttaggattgttttctctatttctgtgaagaatgtttttggtattttgataggaattgcattgaatctgtagattctttgggtagtatggccattttaacaatgttgatacttctaatccatgaacatggactatcttttctttttttgggtgtccttttccatttctttcattagagttttatagttttcattatagagctatttcatctctttggctgagttaattttcaggtatttaattttatgtgtgacctttgtaagtgggattacttttttgattttgttttcaaattgttcactattggcatgtagaaatactactaattttttatgttaattgtgtattctgcaaatttactgagtttgtttatcaattctaatagtttttggtacagtcttcaggttttacaaatataagatcatattgtttacaaacaagcrtaatttgacttgttcctttcctatgtggatgctctttatttttcttgagtgattgctcyagccagagcttctactattatgttgaataatagtagtgaatgtgagcattcttgtcatgttccagatcttagaggaaagccttttagtttttcccaatttagtatgatactagttgtgggtctttttatgtgatttttattatgttgagattttccttctatatccagttttctgagggtttttatcatgaaggaatgttgaatcttatcaaatgctttttcagcattaattaaaacgtttatatggttcttgaccttcattctgtatatatgatgtatcacattgattgatttgtgtatgttgaactatccttgcatcctagggataaatcccacttgttcatgaggaaatatctttttaatgtattatttaatttggttcactagtatagtattgagactttggaatcaatattcatcagagatatgtgcttgttgttttcctttttagatgtgtctttgtctggttttggtatcagggtaacaagaatttcaagaatgagcctggaagtattccctcttcctctgtttttcagaatagtttgtgtaggattggtatcagttattctttaaatgtttggtagaattcagctctaaagccatctgctcccaggctttgttttttgttttttgtttgttttgttttgttttgttttttctaaagtgggagactttttattgcagaattaatctcattacctgtttttggtcttatcaggttttggatttcttcatggttcaatctttgtaggttgtatgtgcctgggaatttttccatttttttagagatttcaatttattggcatatagttgctcatagtagtcactaataattctttgaatttcagtggtatcagttgtaatatctctgctttcatgtctgattttattaattttgatctttttttcttrgtcggcctgaacgtttgtcaatgttgtttaacttttcaagaaaacaggtttttgtttcattgatcttttgtattgttttcttcatttcaatttcatttatttctgctgtaatttttattatttgtgttcttctactaattttgggcttgggttactcttgttttttcagttatttaagatacacatttaggttgtttatttcaagtttttcttcttttctgatgtaggcccttatagctataaatttccttcttagtattgctttcgctgtatttcatagattttggtatgttgtgtttccactatcatttgtttctagcattttttcaatttccttttaaatttctttgatgacctactggtcattcaggagcatattgtttcatttccatgtgtctgtatagtttccaaaattcctcttgttattgagttctagttttattccattgtggtcagagttgatgcttggtaatatttcaattttttggattgttcaagacttgttttgtgatctaacatatggtctatccttgagaaaaatccatgtgctgaggaaaagaatgtttattctgaaacttttggatgaaatgttatgtaaatatctgtaatcaatttgttctatactgcagattaagtctgatgtttctttgttgattttctgtctggaggatctgtctgatgctgaaagtggagtgttgaagtctccatctattattgtattgaggctttctctttgctttggtctaatagtatttgctttatatatctgggtgctccagtgttgagtgcatatatatttacaattgcaatatcattttgatgaattgacccctttatcattatatggtgacctttatctcctcatagtttttgtcytgaactctattttgtctaatacttgtataggtactccactttttttggcttccattgccatgaattatctttttccatcccgttgttttctttctgtgcatgtctttatagacaaagtgtgtttcttagaggcaacagattggtgttttgtttgtttgtttgtttttccatttagccagactatgtcttttgattggagagtttagyccatttacattcaatgttagtattggtagttaggacttacttttgtcattttgttatttgttttctggttatgttgtggtctgctcktctttctttcctaccttcctatttttctttagtgaaggttattttctctggtgatataatatagttttttgctttttatgtttgtgtatccattctatgctttttggtttgagattaccatgaggcttgcaaatactaccctctaacccattatttcaagctgataacaacttagcactgttcgcataagcaaacaaacaagcacaaaaacaaaacaaatgaagactctgcaccttaactccatcttcttcatttttaactttctgttttcactatttatttcttattgtactgtgtatgtattcaaaggttgttgtggctattatttttttaattatactttaacttctgggatacatgtgcagaacgtgcaggtttgttacatcggtgtacatgtgccatggtggtttgctgcacccatcaacccgtcatctacattagatatttctcctaatgctatccctagcccccctcaccctaaaaggcccagttgtgtgacgttccctgtgtcctccctgtgtccatgtgttctcattgtttagctcccaattatgagtgataatgtggtgtttggttttctgttcctgtgttagtttgctgagaatgatggtttccagcttcatccaggtccctgcaaaggacatgaactcatccttttttatggctgcatagtattccatggtacatatgtgccacattttctttatacagtctatatttgatgggcatttgggttggtcccaggtctttgctcttgtgaacaatgctgcaataaacatacatgtgcatgtgtctttatagtagaataatttataatcctttgggtatgtacccagtaatgggattgctggatcaaatggtatttctggttctagatccttgaggaatcaccacactgttttccccaatggttgaactaatttgcactcccaccaagagtgtaaaagcattcctatttctccacctactctccagcatctgttgtttcctgactttttaatgatcaccattctgtcatgagatggtatctcattgtggttttgatttgcatttctctaatgagcagtgatgatgagcttctttctttcccatattttcttgggmacataaatgtcttcttttgagaagtgtctgctcatatcctccacccactttttgatggggttgtttgtttaatagattgcaaaaattttctcccattctgtaggttgcctgtcactcygatgatagtttcttttgctgtrcagaagctctttagtttaattagattccatttgtacattttgtcttttgttgcaattgcttttggtgtttcagtcatgaagtctttgctcatgcctaygtcctgaatggtattgcctagsttttcttctagggtttttatggttttggatattacatttaagtttttaatccaccctgaattaatttttgtataatgtgtaaggaaggggtccagtttcagttttctgcctaaggctagccagtttgcccaacaccatttatcaaatagggaatccattccctcactgcttgttttttgtcaggtttgtcaaaatcagatggttgtagatgtgtggcattatttctgaggcctctgttctgttccattggtctatatatctgttttggtaccagtaccatgctgttttggttactgtagacttgtagtatactttgaagccaggtagtgtgatgcctcctgctttgttctttttgcttaggattgtcttgrctacacgggctcttttttggttccatgtgaatttctaagtagtgttttccaattctttgaagaaagtcaatggtatgaaatgtttttccatgtgtttgtgtcctctcttatttccttgagaagtggtttgttgttctccttgaagagatctttcacatctcttcttagctgtattcctaggtattttattctctttgtagcaattgtgaaatggagttcactcatgatttggctctctgtttgtctgttattggtgtataggaatgcttgtgaattttgcatgttgattttttatcctgagactgctgaaattgcttatcagcttaaggagatttggggctgagatgatgggtttttctaaatatacaatcctgtcatctgcaaacagagacagtttgacttcctttctttctatttgaataccctttatttctttctcttcctgattgtcctggccagaatttccaatactatgttgaacaggagtggtgagagatggcatccttgttttgtgccgattttcaaagggaatgcttcccgtttttgcccattcagtatattggctgtgggtttgtcataaatagcacttaatattttgagatacattccatcagtacctagtttcttgagtgtttttagcatgaaggcatgttgaattttatcaaaggccttttctgcatctgttgagataatcatgtggtttttgtcattggttctgtttatgtgatggattatgtttattgatttgcatatgttgaaccagccttgcatcccagggttgaagacgacttgatcttggtggataagcctttttatatgctgctggatttggcttgccagtattttattgaggattttcgcatcgatgttyatcaaggatattggcctaaaattttctctttttgctgtgtctctatcaggttttggaatcaggatgatgctggcctcataaaatgagttaaggagtagtccctctttttccagtgttttgaatagtttcagaaagaatggtaccatctcctctttgtacctctggtagaatttggttgtgartatgtctgttcctggactttttttggttgctaggctattaattactgtctcagtttcagaacttgttattggtctattcagggatttgacttcttcctggtttagacttgggatgttgtatgtgtccagtattttatccatttcttctaaattttctagcgtatttgcatagaggtgtttatagtattctctgatgatagtttgtatttctctgaagtcagtggtaatatctcctttattatttttttattgtgtctattggattattctctcttttcttctttactagtctggctagctgtctttctattttgttgaacttttcaaaaaaccagctcctggattcattgattttctgaagggttttaggtgtttctatctccttcagttgtgctctgaccttagttatctcttgtcttctgctagcttttaaatttgtttgctcttgcttctccagttcttttaattgtgatgctagggtgtcaactttagatctttcccactttctcctgtgggcatttagtgctataaatttccctctaaacactgctttagctgtgtcccagagattctggtacattttgtctttgttctcattggtttcaaagaacttatttatttctgtcttaatatcgttatttactcagtagtcattcaagagcaagttgttcagtttccatgtagttgtgcagttctgagtgagtttctgaatcctgagttctaatttgattgcactgtggtatgagagactgtttgttatgatttattttgttttgcatttgctgaggagtgtttcacttccacttatgtggtcagttttagaattagtgtgatgtggtgctgagaagaatgtgtattctgttgatttgaggtggagagttctgtagatgtctattaggtcagcttggtccagagctgagttcaagtcctaatatccttgttaattttctgtctcattgatctgtctaatattgactgtggggtgttaaagtctctcackattattgtgtgggagtctaagtctctttgtaggtctctaagaacttgctttatgcatctgggtgcccctgtattgggtgcacatatatttaggatagttagctcttcttgttgcgttgattcctttaccattatgtaattctcctctttgtcttttttgacctttgttggtttaaagtctgttttatcagagtctaggattgccacccctgctttcttttgctttccatttgtgtggtaaatattcctccatccctttatgttgagactatttgtgtctttgcacatgagatgggtttcctgaatacagcacaacaatgggtcttgactctattcaatttgctggtctgtgccttttaattggggtatttttcccatttacatttaaggttaatattgttatgtgtgatttttttcctataattaygatgctagctggttattttgcttcattagttgatgtagtttcttcatagtgccartggtctttacaatttggtgtttttctgaagtggctggtactggtttttcctttccacatttagtgcttgcttcagaagctcttgtgaggcaggcctggtggtaacaaaatctcttagcatttgcttgtctgtaaggattttatttctccttcaactatgaagctttttggcttgctatgaaattctgggttgaaaatccttttctygaagaatgtccccactctcttcyggcttgtagggtttctgccaggagatctgctgttagtctgatgggcttctctttttggtgactcagcctttctktctggctgttcttaacattttttccttcatttcaaccttggtgaatctgactattatgtrtttttgggtgctcttctcaaggagtatctttgtggtgttctctgtattccctgaatttgaatgttggccagtcttgctaagttgggtaagttctcctggataatatcctgaagagtgttttccaactttgttccattatccccatctctttcaggtacaccastgaatcataggtttggtcttttcacatagtccaatatttcttgaggctttgtttgttccttttcattsttttttctctaatctcatcttcatgcattatttcattaaattgatcttcaatgtctgatatcctttcttccgcttgattggttcacctattgatatttgtgtatgcttcacaaagttctcatgctgtgcttttcagctccatcaggtcatttatgttcttttctaaactggttattccaggtagcaattgctctaaccttttttcaaggttcttggctcccttgcattgggttagaccatgcttctttatctcagttgagtttattacccaccttctgaagcctacttgtgtcaattcatcaaactcattctctgtccagttttgttcccttgctggtgaggagttgtgatcctttggaagagaagaggcttccggtttttggaattttcagccttttttgccctggtttttcctcatcatcatggatttttctacctttggtctttgatgttggtgaycttcagatggggtctctgtgtgtacatcctttttgttgatgttgatgctattcctttttgtttgttgattttccttctaacagtcagggtcctctgctgcaagtctgctgtagtttgctggaggtccactccagaccttgtttgcctgggtatcaccagtggaggctgcaaaacagcaratattgctgcctgttccttcctctggaagcttcatcccagagggttacccgccagatgtcaggcagagctytcctgtatgaggtttctgtccaccattgctgggagatgtctcccagtmaggaggcacagaggtcagggacccacttaaggaggcactctgtcctttagcagagctcaagtgctgtgctgggagatctgctgctcttttcagagtgtcaggcaggaaagtttatgtctgctgatgctgctcccacagctgccccttctcccaggtgctctgtcccagggagatgagagttttatctataagcccctgactggrgctgctgcctttctttcagagatgccctgaccagagaggaagagtctagagaggcagtttggctacagtggttgtgcagagctgctgtgggctccacccagtttgaacttcctggtggctttgtttacaccgtaaggggaaaattgcctactcaagccccagtaatggcggacrtccttcccttgactaagctcaagcatcccaggttgacttcagactgctaaactagcagtgagaatgtcaaaccagtggatcttagcttgctgggctccaaggaggtgggatccactgagctagacaacttggcttcctggcttcagccccctttccaggggactgaatggttctgtcttgctggcattccaggcaccactggggtatgacaaaaaacttctgcagctagcttggtgtctgcccaaatgatcgcycagttttatgcttgagacccatggccctggtggcataaacactggaggaaatctcctggtttgtgggttacgaagaccatggggaaagtgtagtatctgggccagaatacrtcgtccctcactgcatggtcccttacagcttcccttggctaggagagggagttcccygaccccttgcacttcccgggtgaggcaacaccacaccctccttyggctcrtcctccgtgggcttcaccygctgtctaaccagtcccartgagatgagccatgtaactcagttggaaatgcagaaatcacccaccttttgtgttgatcttgctgggatttgcagactggagctgttcctattaggacattttgccagccactccactattttttttcattattacttcatcatttagtttttctatttaagtgatgtttatgcaccacatttacagtgttatattagtctgtgttttctgtctccttactattacccgtacgttttatagcttcaagtgattacttattgcccattaatgtccttttctttctgactgaagtaatccgtttgaaatttttctaggasagatctggtgctgatgaaatcactcagcttttgttggtctggaaaagtctttatttctctttcacgtttgaaggatattttctccagttacactattctaggctgaaagttttcttycttcagcacttttaatatgtcataccactctctgcacttttaatatgtcataccactctctcctggcctttttccactgaaaagtctgctgccacatgtagtggagctccattgtacattatttgttccttttcttttgctgctttcagaatcctttctttatccttgagcttagggaaattgattattaaattctttgaggtagtcttcttcaattttacccagcattgtttkttgagaaaaaccattaattcctatcaaattgcagkagtcccttttttgaaatcaattgaccaygaatgttggtgttaatttctggactctcagttgtgtttcattgttctttttgtctaccctaatgcgagtaccatagaatcctgattcgtgcagctttgaaggaagctttgaaatcagaaagtgtaatcctccaaatttgttattttttaacaatttctttttgtgatcttgtcacttggcatttccagacacattttaggagtagttttccactttctgtgataaaacatctgctgggatttgatagggattgcactgaatatataactgcaatctataaagactctccctgtgctggatttcagttcagctggtcattcttgcttgtacaactctgtgacaaattgaaaatataattttggccttttatttctcttatcttaattgtagcagaaggtatcatgcttttctgaaccttgtgcattctgcccaaaaatggaagttctcagccaygtgtggttgttcacacctgtatscaagcactttgggaggccaagatgaggggaccacttgagaacaggagttgaagaccagactgggcaacatagggagactctgtctcaacaaaaaaattaataaattagctgggtgttgtgatgcatgcctgtagacacagctactccagaagctgaggtgggaggacacaaatgtttgagactggagtgagctgtgatcaagccattgcactccagcctgggtgacgagtaagaccctgtctttctcgctcccctaccccaaaaaagaaggtctcactggttatcttttatgtatcaagtaacacacgatcatacaaaaaattaataattcttggttcctgcctgtactagacagataaaattgaaagcagttatacaactagtatactaactcctcataaagactacctgaagagaatattattatcatttgcattttacagatgattataccaaggcagagagtagttgtcaaatgaagtctcagaccatatttgaagcagaaaatctgctttcctgtcttggcagtctgactccacaatcttctgttagaaacaattatactgtaaaaatggaaaagaaataaaatccaagattggagactgattttaacatcgattcctcttaaaccattaagtaatcaaaaataaattaagtaatcaaaaataaattaaatagagaaaaataaaaccaaatattcatatatgaagatctagactcttcaatggaaaacgtgttttttaagtagcccacaatagttacacaattgctgagtattttaactaaaaaattaatatttaacaattaagtaaactcaagagaaaaacttagtcaaaggtctcagcatgagagataagtttgaaaaatattgaaaatgggttgaaaagcccaaatgggaaaatagggctatttttacctggatgatgtccctgaaattaattttccattttggaaattataggacaacaatttcttctatccatgagtgagtgagtatgtgtgtatgggtttgagtgtgtttgtattaatgagcttcttaagaataagttattcaaaagtattagkagcaaccrggttttaagaattattggcctttctgagattcccaagaaaaacttgaatccttttgstaggaaaagtttggattcactctacatattactcacgttgaaaaattaaatttactttggtgatgatcctagttatgtccaagctccctttaccaggttatacaaccagtgtgtcatctctgtattaggttgtaaaatttctctaacaactgaagttgctgaacacaaattgtggagaggttaaacaaagaartaagtgcagaacaattaaaaaactcttcattggcatgctagtagatgagaaatcacttttcacttcaacaccaatatggaaaattttatcttacagcaaggacrttgtgtttgaataggagttaatttgagctgttttggaaatcatcatgttttccataaagacagcattgatttcatccactggcatattgagatgctttcctgtttgacattggtcacagaatttaaaaaggaacaagracattcctgcaaattcaggaatcaggtacacatagatgttaaggtcaagaccttaaaggaaatcttgaccagtgatatcaggcttgcctttaaaaaaattcagacatgataaatttactaccaatcattttttcwtcaacaataatatatttatattttcccatggacacctacattaaacttatagactctttttatttttcaactttttttctttgagtccttttaagagttgttaaacaatcctgaaatttcccttactgtatgctgttaactaattatattttttcaaagtcatctgacacaatgattgattaaaggaagtatctccagtataattacagttacttataacaagagtatttgaaatttgaagaaaaaggttagacaatttataatgaaatataaataaatatgtataatatataaggcattattaataagtgtatatgaaatagtcatagaatgaaaaagattaatgtaattcattgaagtaaacatacattctgaataagaatagaaaaggacttggaaaatattgtttaataatrttttatataaatacaaaaatgtatatattagcccaacattatttattttggaaaggatatgacacaatgggaattttcatacactactcctagaattataaatctgtgccatcatttcggctgagtatggcattatctcattaaggtgaaggatcatatcctaagatcaagtatttacactcttatcagaatacatatacatacacatgcatatcactgagtttyaatagctaaagttgagaagtcctccaaatgtctcagtcctccaaatggataaagaaattgtggcatacttatacagtggaatactrtacagtgatcaaaattaacaaacaagactgacatgtttacaacagaataatacaacaaagaaaatgaacaaatttgagctacatagataataatactcacagatgtgagaggaattatcaagrtggaaaaatacatttactgtaatctcatygacgtaaagtttgaaaaactttatttttaatacattgtcattcattacattggtgataaaaccctacagtgaaacatatgagtgatcatcatatgagtgatcatcataacaatttgggatagtcagaagggaggaaaatatcaacaagaagacatatatcgggagtatctggattgctagcaaattctattttcttccttttttttttttttttttttttactctttcatttggatcttatctgtgcgaagtatctttgactgtgttggtcaccgttgaatcaaatatctaaataaagtgaatctggaacatcctagtgtccacatcaaaagcactcaatraagytggatgggggagtggtagtggtggtacagcaacagggtagcctagttaggttgcacaagcccatctaaacacgtgtgattatctgattagaaccaggaaactggttactagaaaaagtaatttagtgaactgtagaaagaaaatattacatattgaagcacctcacaatgacttaacaccaattttatttgaggaatttctttagtgttaaaatacartaaacagccacagtaacagtaatrccactaacattcttgagcatttattgtgtgcttagaaatttgtgtatgaattcatttaatatagtcctatggcttaacacgagattttgttcatttttttwatattttatttatttatttatttttattttactttaagttctagggtacatgtgcacaatgtgcaggtttgttacatatggatacatgtgcttgttggtgtgctgcacccattaactcgtcatttacattaggtatatctcctaatgctatccctccctcctccccccaccccacaacaggccccagagtgtgatgttccccaccctgtatccaagtgttctcgttgttcagttcccacctatgagtgagaacacgtggagtttggttttctgtccttgyratagtttgctcagaatgatggtttctagcttcatccacgtccctacaagggacgtgaactcatcattttttatggctgcatagtattccatggtgtatatgtgccacattttctttatccagtctatcattgatgggcatttgggttggttccaagtctttgctattgtgaatagtgctgcaataaacatatatgtgcatgtgtctttatagcagcatgatttataatctttcgggtatatatccagtaatgggatggctgggtcaaatggcatttctagttctatatccctgaggaatcgccacactgtcttccacaatgtttgaactagtttatagtctcaccagtagtgtaaatttttcctatttctccacatcctctccagcacctgttgtttcctgactttttaatgattgccattctaactggtgtgagatagtatctcattgtggttttgatttgcatttctctgatggccagcgatgatgagcattttttcgtgtgtcttttagctgcataaatgtcttcttttgagaagtgtctgttcatatccttcacccacttgttgatggggttgtttgatttttttcttgtaaatttgtttaagttctttgtagattctggatattagccctttgtcagatgggtagattgtaaaaattttctccttctgtaggttgcctgttcactgtgacrgtagtttcttttgctgtgcagaagctctttaktttaattagatcccatttgtcaattttggcttttgttgccattgcttttggtgttttagccatgaagtccttgcccatgcctgtgtcctgaatggtattgcctaggtttacttctagggtttttatggttttaggtccaacatttaagtctttaatccatcctgaattaatttttgtataaggtgtaaggaatggatccagtttcagctttctacatatggctagccagttttccagcaccatttattaaatagggaatcctttccccatttcttgttttkgtcaggtttgccaaagatcagatggttgtagatgtgtcatattatttgtgagggctctgttctgttccattggtctatatctctgtttwggtaccagcaccatgctgttttggttactatagccttgtagtatagtttgaagtcaggtagcgtgatgcctccacctttgttcttttggcttaggattgtcttggcaatgcaggctcttttttggttccatatgaactttaaagtagtttttttccaattctgtgaagaaagtcattgktagcttgatggggatggcattgaatctataaattaccttgggaagtatggccattttcatgatattgattcttcctatccatgagcatggaatgttcttccatttgtttgtatcctcttttatttcattgagcagtggtttgtagttctccttgaagatttccttcacatcccttgtaagttggattcttaggtattttattctctttgaagcaattgtgaatgggagttcactcatgatttggctctctgtttgtctgttattggtgtataagaatgcttgtgatttttgcacattgattttgtatcctgagactttgctgaagttgcttatcagcttaaggagattttgggcagagaagattaggttttctaaatatacaatggcaaattctattttcttaccaaggtatggtaacatcaattttaaccttataattttttatcttactstttattagttgttattactctgtatmtgtatgttttgctccacaataaaaaatgttaaaaaagcagaaacctaaagtacatttctaagtgtaaaattagrgtgatgcagcatattcttatagatatcattgtaattagagtttttgctgaataaagaatagaggattatggtactaagaaatccaagttaaaatttaaaacttttctatttttattttgagacaggatctgactctgttgtccaggctggagtgcacaagaacaatcttggctcaatgcagcctctgtcaccttggctcaagtgattctcccatcttagcctccagagtagctaggacaacaggcgtgcaccactacgccctgctaattttttctatttttttgtagagacatggttttkccatgttgcccaggcaggtcttgaactcctgtgcttaggcaatccacctgcctcagcctcccaaatgatgggattacaggtgtgagccaccacacctggcccaaaacattacttaaattaattcacacaaaagaagagataggcaagaattgttaatccactttcttagtgctaatatgaatttgaaacatcaaaatttgaatatccatgattgatagacaccttttttcttatttccaatttaattatttwtgatacacatttgaaagtgtaagaaattcaggaatttacaataaattatagtacgatggatattaaatatattaaattaaatgtattaaaaatgtgtctctaaatgaaatatttatattcacattgttagcattctaatttcactatactattcctgtgtacaccagtgtgttgggtaaaattttttgttactataaattttttggctgtccattagagaaaaaaatcatagaaaggcaaattttttaaggtataaaaaataatttagcctgatctttgagyatgtttgtgcacatataatgctactttgactgctgtagtaaaataatccagatttagtcaccatagctaagaatgagaaaaagcatttgtgatagtttgctgagaatgccgtcattttttgataaagttttaagtactgttttactatttgatsttttaaagattgttaaaaactaagaagtgttgatttctgctaataaaaacagcttaaaatttawatcatggaatagaatggtggagctgtggyggagatactttgtcttattaattgaaatgacattttgagatccagtgctgctcactgaatttccctgtgaggagagtttgtggtgatgaccccacaacagacaagctactatccaaaaaaactcctcacatcaaatcaatttccagtttcttccaagttgcaggaggatgcctagaccttggttttattctcttctttgaccaaagtattacaaaaggaagaaaatcattaccattttcatgtcaggagggtggcatggagatggacttagcctattttcrgtgttccatctcttgccctttataagggttagttgactgtttatgatrcattccggtatttcccatttttgttttggttcatttctaagtgtgcattataattttaatattaaagkttttgattaggagaaatgtctcatagaaattattattactcatctgattatatactgaagggaaaaatcaattagttgtatatacattcttatacaactctaagatagttgaaataggaactttcttatttagttgcatcatgaggaaatttgagatgatgttatctgccaagcgcagatctctccaaaggatttcttctagccttaattatccacctcacaggacaaacctttgccattccccatctaytttttctttcggctcctcaattcctgacacaacaaagttgtacatatttcccacactcttggtttagcagagttcttttatcagttatgtttttmtgcaagagaagaccctctaaaacattagacatatatatctcacatgtctttggatttcatttktgtgtgtgtgtgttttctgttttttgagatggagtctcactctgttgcccaggctggagtgcagtggcactatcttggctcactgcaacctccacctccagggttcaagcgattctcctgcctcacccttctgagtagatgggactacaggcacactccactgagcccacctaatttttgtatttttagtagagatggggtttcaccatgttggccaggatggtctcaatctcttgacttcgtgatctgccctcctcagcctcctccacacctggcctggatttcatttttctaagctgggtttgatggatggctctggtgatttgagatgggccaaattcggsatcttggagatagagtttggccaatttagtctggatcaggtgggggcaatctgactwcattactttctcattctccttctgggaacagtgtacttgcgaggcgatattctcatggtaaatggaaagaggaagaatccccagtatggaagccatctcaaatctctatgcaaagtgtagtaattttctgtttatcaaagtaagtkaaatgattgaactccaagttcaggggaaaggtagtcagtcttcctgtgataggaggatactgcaagatkatataccaaagggtcgggtactcaggaattcttataaaatggctaaatattttatataataataaatatttaaacattagacttgagagaaactttaccaaaggcctaagaattagagatatgtttgataaataaatattattcwtgggctgaaaactcttgagtgggaaaatagggctaatttcatctggacaacttcttggaaactcattttttattttggaaattwtgagaaaataatttgttccattcataagtggtgtgcacatgcgtgtatttgtgttcatatttatgagcttgtgaataatgaagttatacaaaagtattagcagcaaccaaatcttatggagtattggcctgcctgtggttctcaagaaaatcttagatgcttttgataaaagcagtttggattctgtgtatacaaatctggcattttaaaaagtccatattggtaatgatcttagttgtgaccaagctccctttaagactttagacatttgctatatgatctatgtattgggttataaaacttcccaaacaactgaagttgctaaacacaaatgatggagaggttacacaaagaaaaattgcaaactctgaaagagagtacrttcttatttgtgtactagcaaatgaggattcaggtttccagtcaatttcagtatgaataattcyagcctgtaacaagaacaaacagtgaatgaatgagttaatttgagttgtttgaaaataagaatgttttccataaagagatcattgaactcatyagttaacacgccatggtgatttctggcttgacactggtcacaacgtttaaaagtaaaaagaatgacccagcagatttacaaattaggtgcatatagaatttaaggtcaggatattcaagcaatcacaaccagtgatattacattgagaggtgaagccagctggacttcctgggtggagtggagatttggagaactattctgaagctagcaaggggattgtaaaatgcaccaatcagtgctctgtaaaaggcaccaatcagcactctttaggtagcatggggattataaaatgcaccaatcagcactctttaggtagcrtgggaattataaaatgcaccagtcaacactctgtaaaaatgcaccaatcagcactctagctagccagaggattgtaaaatgcaccaatcagctctctgtaaaaggcaccaatcagcgctccataaaacgcaccaatcatcaggatcctaaaagtagccaatcacagggaggattgaaaaaagggcactctgataggacaaaaatggaacatgggaggggacaaataagggaataaaagctggccattccagcccacggggcagcccacggggcaacccactcaggcccccttccaccctgtggaasctttgtccttttgctcttaacaataaaccttgctaccactcagtctttgggtccacacmgtctttaagagctgaaaccttgctactgctcagccctgggkccatgccatctttaagagctgtaacatcaytgcaaaggtccgtgcctccattcttgaagtcagcgagaccacgaacccacctgcaggaaccaactccggatacaacaccagcattttaaaaatttctttttgtctgttcagacatgataacttttctgcccatcatattttccattctagtagtggttacatttgttattggaaattttgctaatggcttcatagcgttggtaaattccaccgagtgggtgaagagacaaaagatctcctttgctgaccaaattgtcactgctctggcggtctccagagttggtttgctctgggtgttattattaaattggtattcaactgtgttgaatccagctttttrtagtgtagaattaagaactactgcttataatatctgggcagtaaccggccatttcagcaactggcctgctactagcctcagcatattttatttgctcaagattgccaatttctccaaccttatttttcttcgcttaaagaggagagttaagagtgtcattctggtgrtgctgttggggcctttgctatttttggcttgtcatctttttgtggtaaacatgaatcagattgtatggacaaaagaatatgaaggaaacatgacttggaagatcaaattgaggcgtgcaatgtacctttcagatacgactgtaaccatgctagcaaacttagtaccctttactgtaaccctgatatcttttctgctgttagtctgttctctgtgtaaacatctcaagaagatgcagctccatggcaaaggatctcaagatcccagtaccaaggtccacataaaagttttgcaaactgtgatctccttcytcttgttaygtgccatttactttgtgtctgtaataatatcagtttggagttttaagaatctggaaaacaaacctgtcttcatgttctgccaagctattggattcagctgttcttcagcccacccgttcatcctgatttggggaaacaagaagctaaagcagacttatctttcagttttgtggcaaatgasgtactgrgtgaaaggagagaagccttcatctccatagattcagaagaggggcrttgtgtgtcttctagcagaaaacaaactggtggtgtatgaaacattttatatttcttacwgtgttttctgtaatgtatgtgtatgaataatttccaaacatatacctagataaatctttaacctagtctaaaaaatgtatgtatgtgtgtgtrtatgtgtgtgtgaaaaacttaagaacattgacaataacatactcttytttgtttttttcatatgaactgccagattatacaaaatatgacaaaaattcctcagaattatgaagccatgtgtatttcattcatgtattttatctttcatttgtagaatttacaatgtctatttataattattaagaactaacagcttatctcaggaaagatattgctgttttctattgttatttgaaccacacaaatataccacagtgtgcttagaaatcattgtttgaacctctatcttattggatggtaaggtcattcaattctaaaccaataatgtggatgtatctttggggttttattccattatgaattcctattttatggttagtaaaaagcaaacagaattattgtaaacaatgcacactatagaattcgagtgacaagtataggtagaataaatttcatatatgtctaccataaacagtactgaagaatactagatttaaagcaagtatgtgaatagcttagaaaaaaatctctttgataataaagggaggaaatatgatcatggtcttgattgctattatcggtttccatacgcagttagaaacrtcatttcttccagcttttgaattaaagaaaagctgtttttgaagttgagatctgatgtaaattattttagtatttttttctaagrcacttctaagcccctgaattgctaattatatcctcatcttccatttacaaaattccttctaaacttcagataagagaactcaaatcttctcttttctaaaaaaaaaaactatcaatgtaaaaatagtatagaaattatggaaaataattcagtgaaactttttgtaaatgttaaaatagtatctatgaaatctatgtattaattatgggatgtgccttaccattgtaattttgttgtcagtgatgaaagtgttttgacatattcattaayaggaagttctattataagaaagaaatgtacagtcttgttcacagctaaattctatatgactayattaattcttggtgttatgaagttttaacaatgttatttaatgttatttaaaccttaagataaatcatccccacacctgatttatgtaatttttkaatcatatatcttcctcagtacaatgtaagaactgtaaagaaagagatcatgtctgwcttgctttctgttgaytcccaggacctagaacccagcaccaagaatagatggccaaaaatgatactttaatgaacaaataaatgggtggctaaaatggataagttgatgtggtaaatcaatgaaaaggaaactcatcacaaaatctgcagttgcatgaattcccctgttctggtctcaggttgaggttkcaggcttatccaagcagaatccttcctcagaggaaaagtttggctattccacaattttaggggaaatatcacactagtgatatatatagtgatatatagtcacactatatatatatatwgtgatatatagtcttgatgcagctgtgtcaggtgtctgaattggagacaaggtaaaacatcaaaattagatggcaccttggaaggctgaggcgggcgratcacgaggtcaggatatcgagaccatcccggctactatggtgaaaccccgtctccactaaaaatacaaaaaaattagctgggagtggtggtgggcacctgtattcccagctactcggaaggctgtggccrgagaatggcgtgaacgtgggtggcagagcttgcagtgagccgagaccgcgccactgcattccagcctgggcgacaracaaaaaaaaaaaaagaaaagaaaaaattaggtggcacctatgacaatactttaaaaagcatataaaagactttggtctatttgcataagtatttttttattgtgaattatatatttgtgttatgatattttctagttgattattaggtaaacaaaatggcatttcatttcaaaaaattgagttagtaaccagctacttgaccaaaatgtttttaattaatacctgttaatgaaagtgatgacatttatttagaagtaaagttcaagacaaaaatggcagggacatgtggaaattgagacaggaagaaatgtgaaacaatgctctagtcgctttgaattctgctggatcatctggcacagtggccatagcagcttggaccagagcctgtatctgctgtagagccctcttttgttctgggttccacttgagaccagtagcctttggaaactttattaatgagtcagagcaatattttcaaacgtggaatatgttggctccaaaatctcaataggtccccaaaacattgtatctcttttgtagtgataggaagtacayagagagagcaacatgccatttactttaaaaaagattgttttgacatgtgccctagggacactgcacaccttaaaacatcacctatgctgtaggtccctgaatcttctcaggtttatttcttttcttctggtattttacttccatccaacattagggtattttactatatttaataaacttgcaacttcctgattattgtaccaactaatactttattattattgttattattttgaacagggtctcattctatccctgaggctggagttcagtggcaggatcacacctcattacagcctcaaccttctgggctcaagtgattctcccacttccgcatttctagcagctgggactgcaggggtacaacaccttgcctggctaattttgktatttcctgtagggctaggatttcaccatgttacccaggctggtctcaaactcctgggctgaagtgatctgtytgtgtcggcctccaaaagtgctgggattacagtcatgtgccacagggcccggtttgtaatattactaatatattaaattagcacgatgttttaaaaaatgtaaattaaactgagaacagaagtgacatagccctgacataaaacagtgaagcagtgctattattcttacaatacaagccaaattgttttgattttcctgcataatgggtgtagattaacaaacattcaccaaatcatgagccccgtaaaaagtatcaaaagctctgctctgctcagtgaagatagcacatcctggaaagcatttgtgagtgttgattgaagtttatggtagtctgcattcastataacctgtctgtctttggtagaggccagataggttaagtgaatcgggttatagaaaggactaccatcccctgtaactttcaagtgttttgtcatgacagtgaccagttccattccttggggaatgcagttattatattttatacattgtgttgccaatggaggagaatttcagaggcttccccttggtcctgctataataatgttccttactctacagttcaggaagaatgtgatagttctgccagctgccatacgtatccatttcaattacacattcaggaagaggtaataactacaaactggttagatccaccttgggatagacatgagcygaagctctgggcagcatctgaccttcaagaactcccactgcaggctggatgtgatggcgcatgcctgtagtcctagtactttgggaggccaaggtgggaggatcttttgagagcaggagttcccttcgcaacatatggaaactctgtctctacaaaaaatttaaaaaattagctggcggggtggtgcatgcctatagttccaaatacttgggaagctgaggcaggaggattgcttgagcccaggagttccaggctgcagtgggctatgatcctgccactgtactccagcttgggtaacaaacggagactgtctcggaggaagaaaaaaaaaagaagtgcaagttctcactggtatcttaaatatcaagtaaaaagggatcaaatcaataattaacaatctttggttcctgcctatagcaaacaggtaaaatggaaagtagttatacaaagggtatattatattaacycctaacaaaattaaacaaagccagttttttttcatctcctttcattttttttttttttgaaacagggtgttgctctgtctccccgttggagtgcagtggtgtgatctcgaccaattacaacctccgtctcctgggttcaaatgattctcctgccgcagscaaccaagtacctaggatcataggcatgcacaaccacaactggcaaatttttgtatttttagtggagacagggtttcaccatgttggccatgctgttttctaactcctgacctcaggtgatccacctgcctcggcctcccaaagtgctggaattacaggcctgagccaccgtgcccagcctattatctgctttttataggtaattatactgaggcaggcagtagttgtaaaatggagtctcacatatctrtatgaaacagggaatctggtttcctgtctttgtagtctgactcgaagatcccctcttagaaaccattatagtgtaaaaactgaaaagatataaaatccaagattggagactgattttaatatctattcatcttaaaccatttagtaatcaaaaataaatagggaaaaataaagctggatattcatacatagagaagtgtagattcttcaatggaaaacatgttttttaagtgtccaaggaatagttataaaatttctgagtattttaattaaataactaagatttaagtgttagactcatgagaataacttagtcaaaggcctaagcatgagagattaagtttgataaacattgaaaatgggctgaaaagcctgagtaagaaaattaattactttttcattttagaaattataggacaacaatttttcccaaccgtcaggggtgtatatatgtgcatgtgaaagtgcttatgttaatgagcttgttaataataagttatacaaaattattagttggcagcaaccagattttaaggaatattggccttcttgggcttccgaagaaaaccttggacgcttttggtaggaaaagttgggattcactctccataaatccggcgttgaaaaaatgaatcaacagkggtcatgattctagttttgaccaagctacatataacagtgtaggcatctgatktatgatctatgtattaggttggaaaatttcccttacaactgacattgctgaatacaaattatatagaggttaaacaaggaaaaaaattacaaaatgatgaataagaatatgacttratttgcatgctagcaaatgagaattcagctttcacatcaacatcagtatgaaaatttttatcttataacaaggacatagtatttgaataggagttaatttgagctgttttggaaattatcatgttttccattaagatagccttgaactcattcaatagcatgctccggtggtttcctgcttggcattagtcagagaacttaaaaggaacaggaacattactgcacaaccagaaatcaggtgcacatagaaattaaggtcaggaccttaaagggaatcttgcccattgatattagtcctgccytaaaaaaagtcggacatggtatgtttactactaatcattttttttccataacgttaatggtaktttgtattttcccatgggcacctacattacacttatagactattttgatatttcaacctattattttctttgaatccttttaaggagttgttaaacaatgctgaaatttgccttacagtatgctgttaactaatcatatttctcaaagtcatttgacataatgtttggttaaaggaaatatgtctagcatagttatacccgttcataacaaaagagtatttaaatctttaagaaaaaatattagaaaagctaataatatgaataaataaatatatgaagtatataattcattattaatatayktgcatgaaatcatggtcatagaatttaaaagtaataatttttgaattaaggatacattctgaactataatagaaaaaggcttcaaaaatgttaggtttataatgtttcatatagatacgaaagtgtaaaaattagtctgatgttacttattttggaaagcatatgaagcaatgggaattttcatacattgctcctagaattgtaaatcagagcaattactttgtctgactatggcattatctgattaagttgatggatcacatttgaacacccagtatttgcactgttatcagaatatatgtgsacacacatgcatatcactgagttttaatagctaaagttgagaagtctctcaaatatccatcagtgataaaatggataagtaaattatggcatacttgtacaatagaatactatacagcaatcaaaatgaactgttggagacatgtgctcggagtagccaaaagaaatccccacttggacaatttctcagcaaggcacctttacgtyrgcagaagggtgctgcttgcacctgttacaatcccaagagaagagcatacctaacaaaggagggaaggagtttttaatcctaacacagttcctgtttctgtgtccttcccttattggctggggttggattgcacaatmtaagctgatcctgaatggcttagacttaaacttttccaaatagggtaaacgcacattttgcaaaaagaaagaggggtgggaggtaggattcatttacaacatttacaacttatggctggraagttgagtctttaaagaggaatttagttgtcctaacggaaccagctagagtgacatgtttacaaagaatataaataaaaagaaaaatgaagaaatttgaactacatagatatgagaggaattaagtttgaaaaaatgattcagtataattccatttatataaagtttacaaaaatgtatttttaataaattgaaatttattacactggtggtgaaattctaaggtgagacatatgagtgattatcctaacaattgggatggtagggatggaggaaacaaaagggaaatgttatcagtaagatggcatatatggagagtgtctggattgctggtgaaatctactttatgaccatgatgtggaatcatgactcttaatgctataatttttttctttactgtacattagrcctcattactttatatactttatatatatatgttatgtttcacaatattaaatatttcacaataatgaaaatatttaaaaagtagaaacatacactaaatgaatgaatataaaataggctgaacaaacatattcttatagacatcattgtaattagagtttttgctgaataaagaatagagcattatgatagtaataaatccaagataaaattttaaacttttttttaaattaattagaaaaaggaagagataagcaggaagactacctccacattcctaatgttattcttactttgaaacatcagattttgagcacttatattttrctggacacmtttttttcttatttccaatttaawtatttatgataacatttcaaagtggcagaaattagtgaatttccaataaattatagtagtatagatattaaatgtataggacaatttttctaartttatctttaaatgaaataattatacacatatttttaccattcaaagattataataccatgcatgtgtacacatgtgtaaggaaaaatattttgatactgcaaatttttttaatattagagaaaaattagtagaaagataattttattaaggcataaaacatatttagwgtagttactttgactgctataataaaaacacccagattttstgacagtagctgagaatgtaaataagcagtcaagagaatttaacttggtaatgatgctattaaaagatgaaatgaagcttattcartctataattgcacagagtatttgtgtaagttcatatgaaactggaccaaaactaaacagccaaaaaaagagtattatttgctttaggtcacttttgccataatttttagaatgtggtgaaagaaaaaaaatagcaagtaaatcattggaaatgtgttggctttgcgttattcctgatgaaatactatatgagggtatttgtctaggcctgattctgagaataatataagaatggtgccaagcacagtggctcatkcctgtaatcccagcactctaggaggccaaggcagtggattccctgaggtcaggagttccagaccagcctggccaacatagtgaaaccctgtctctactaaaaatacaaaaattgacgggtggggtggtgggcacctgtaatcataggtacttgggaggctgaggcaggagaattgattgaatcagggaggcagaggtttytgcaagccgagattgtgccattgcactccagcctgggtgacaagggagaaacttcatctgagaaaaaaaaaaaaattgtaaatccatgaggaagaataagagtgttctcccatcacccttaactccagtactttgaaaagaagacccaaatcacagttatttggtaacattctcccttttagttgacatcatcatcattattatcatcatctmtatttacatctgttttatgaaatgatttatttttgaaatatttacatacataatttcgtaacatctatgtaatttctaagagatatcattgtgggaaagttacattagtaaacagcaaagttcaagtaacaataaatacatttagatttagaaagttaagtgtagtgtagtttaacatacattgcttaagaaaacaattgtagatgacattaaactaaaccaagaaacactataaaaaagattttgattttagtataaataaaattccttaataagaaaaataaaccatttcatgatcaagctctgatttacaaagagaggattttagggctraataaatcaaagagaagtaagccttcccccacatcttctctatttcatttaggtaatgatggggttcagaggcacagagccccatttctacaacataagcaaagtgaaaattaattcattgaatacagcaatgtagctgtggtagatgaactatattttatctattgccatgatattttgagatccagtgctgctcattgagttcccctgtgggcagagtttgtggtgaggasccagcaacagacaagctaatatccaaaaacatctactcacatcaacttaatttccagtttctttcaaattgaaggtaagttccaagacaaactttttattctattctctgaccaagtgttgggaaaagaaaactgttaccattttcatttctagcatactaaaacaaaaaacataaaaaccccaaaatctaaaacacttttaaaaataacatggtgttaagagtagtttgttcagtttccctatagaaaatgatttatggaaggagaataaaagwttattctgaacactaaaacaataagaccaaaaaaatgaattatcaatattgagaatccaatagacagaattagcctgttagatgcagtagaagagagaattagtgaattggaagatagctaaacagaatgaagcatagagagaaacagatggaaatataccaagctagagggtawcacaytgatgctacagtcagaacacctaacatacttctggagttctgtaagattagaggagagaaaatsaagcaagagaaatgttgcaaggatttttccaaaagtgataaaatgtattcctccatatatttttagtaatctcaaacttcaagcatgataaattaaaccaaattarcataaaataatacaggacaccaaagaccaatagaaaatctgaaaagtagcgagaggtggaagatagagtatgtcgtgtgttgaaaagaactgcattctaaatacaacctgattttaacagaaaacatggaagaaggaactcaatggaaacatgtcttcagtgcatttccaaagagtagtagaacttcataaacagaaattgaaaatatttttcagagaaaataaaaatgactgmaaatgcaaagttgaacatgcaaggagcaataaaaattattgacaatgaaaaataagtgtaattctaaataaatgttgactgtataaaaattattgtcttgttagattaaatttataattgataagatatatgcaaatggcaataaagagactggagataaaggtgacaggaataaatttagttagactatgttttgggcttttctatgtctgtgcagataatttgaacatcataatcaaggaccctgtaattctacacccaggtatatatatgcaaaagaattgtagtaaatgatgtaggtcattgaagcattattcataatagctaaaaaataagctgcccaaatatatatcaaataaagatggataaataatyacagtaaaatcataaaatggaaaaatatggagaaatgaaawgaaataaatcacatgtacatgcaactatgggattaaatttctgatacagaatgttgatttcaggaagccatgaataagaacatatagaattgcacctatacmcagttcaaagaaggccaaaccaagctattgagtttagggtcgcatacctagttggtaaagtataaagaaaattttaaaaagatcaacataaattatggatgttgcttatcacaggagatgtgaagaaacgtgtagcagattggaaagtggcattgaggtaaacctaggctcttagcaattttccatgtcttgccctacatgatgattacatgagtatttatgacacattgctatgyttcccagttttgttttggctcatttctaagtgtgcastctagttacaatacaaaaattgttaatgaggagaaatgttccatgaaattattattactctgctcattatatactgaagggaaaaatccactatttgtatacattcatgtataactctaagaggttttaagtagaaatgttctgattttagttgtaacttttggaaatttgacatgatgttacctgccaaccccacgtttttcaataggtttttcttctaggtttaattatctacttcatatgacaaaactttgacattctccatctatttttcccttggatccagaattcctaacacaacaagkgtggtcatgttacccacactcttagtttagcagaatacctatatcagttatgtttttctgcaagagaaaatcctccaaaactgctttagatatttgtgtctcataagtctttggatttcrtttttctaagcttggtttggcagatggctctggtgattggagatgggccacatactgcatcttgcagctagtttggctgatttaggctggatcaggtagtggcattctgactccattagtttctcattcttcttctgggaacagtgtactagccagatgatgtcctcatggtaaaaggaaaagagcaggaawctccaacatggaagctgtcttaaatatctgtgtaaagtctactaacttcctgttgactgaagcaaattagaggagtgaattyagagtccaagttcaaggtagtcaccctgcctrtggtgggaggatactgcaggattatatgacaaaatgtagggtacttagaaacatttacaaaattgctgaatattttaattaaaatttaaacaaaaaacagacttgaatgtaaatttaccaaagacctaagcataagaaacatgtttgataaacattattcattgtctgacaaygctgaataggaaaatagtactaattctacctggatgacctcctggaaactcgttttccatttggtgagtaataagaaaataattccttccrtcccctaatggtgtgagtgcatgtgtgtctatgtgtttaggagcttattaacaataatgtcatataaatgtattggttatcagaaaccagattttcaggtgtattggcctcacaggactttccaagataaccttggatgattttgacaaaaggtttagaatctggtatttaaatctggcataaaaataaatccatattgatatgatcctatttatgaccaagctyctttaacaatttagacatttactgtatgatatatgtattgggttttaaaatttccctatgtaacaactgaagatgctggatacaaattatggagaggttaaacaagaaaaaaattgcaaaacaatgaaaaagaatatggctttatttgcatactaacacacgagaattcacttttgacttcaacatcagtataaaacatttcagcatatagcaaggacagatagtctataaagaggaatgagtttcagctgttttgagattaataatattttccctaaagacagctttgaattcatccattggcatatgctggtgctttcctgttgacattagagaacttaaaggcagaaaatgttactgcacatttagaaatcaagtgtttatcgaagttaatgtctggatattaagggaatcacaaccagtgttattaagcctgcatttttttttttgttgttgttcaaacatatgtgttctgctcatcattttatcaattctggtagtgtttgcatttgttcttggaaatgttgccaatggcttcatagctctarttaatgtcaatgactgggttaagacacaaaagatctcmtcaactgaccaaattgtcactgctctggcattctccagaattggtttactttgatcatattattacattggtatgcaactgtgtttaattcagctttatatagtttagaagtaagaattgttccttctaatgtctcggcaataatcaatcatttcagcatttggcttgctacgagcctcagcatattttatttgttcaagattgccaatttctccaattttatttttctccacctaaagaagagaattaagagtgttcttcttgtgatactgttggggtccttggtatttttgatttgtaatcttgctgtggtaaccatggatgacagtgtgtggacaaaagaatttgaaggaaatgtgacttkgaagatcgaattgaggaatgcaatacacctttcaaacatgactataaccaaccatgctagcaaacttcacactgttcattctgactctaatatcttttctgctgttagtctgttctccgtgtaaacatctcaagatgatgcagctccatggcaaaggatctcaagatctcagcaccaaggtccatataaaacctttgcaaactgttatctccttccktatgttatttgccatttactttctgtgtataatcacatcaacttggaatcctaggacacagcagagcaatcttgtattcctgctttaccaaactcttgcaatcatgtatccttcattccactcattcatcctgattatgagaagtaggaagctaaaacagacctctctttcagttttgtgtcaggtgacgtgctgggtgaaataacagaaaccctcaactccatagattcacaaggggagcatggtgtgtcttttagcagaaaagaaactgatggtgtctagaacgttttatatttctgtcagtttgttgtagtgtatgtatktgagtaatttcaaaacagattcctaggatagtcttttatatatatataatatatataaaaytcatatatatataaaatacgtatgggtgtatatgtgtgcatgtgtgtgaataataacattgaccataaattatgaagcctagtatatttcayatatataagtatgtgtattttatgatagctaattgtatgatatttcatttgaagaatttatctctctttgtaattaagaaattacagcatttatcagaaaatcattgctgttttccattgtaatttgtaccacatacatgtacttaactatcattgtttgaacctctcattttctggatggtaaagacattcaattctaaatcaatgatgagactgtatctttgtagtaggttttatttcattatgaattsttactttacttttagtataaagcaaatagaatttttgttagataatgatgtacacaataaaattagtgtacatattaaataaaatcagtgacaaacatgtagagtatatgtatttgcctttgggaaggcaaattttgtatatgtataacaaaactgtactaaagaatactagatttaataccartatgtgaatagcttagaaaaaaatcatttctataataggaatgaagaaacaaaaccatgatcatttcagtgctattataattttttaagtgtagttagaaaaatcatttcttccaccttttgagttaaagaaaatcttttttgaagttgacatctgatgtcaagtatttccatttattttgcttagcaacctctgagcctctgaatttccaatattcttctttgtctcccattcctratattcctcaaaaaaactcaaatattccctktctttaaaaaaaaaagcccaacataaasagggtgtagaaactatagatgataatcgaatgaaactttcttcaaatgttaaaaattgcctgtgaaatctatatattgatgataggaaatatattaatgactattataatgatgtaaatggtgaaatgatasaaagtgtgctgatgtatccattgataccaagttctattataagaaggtaatctacagccttgtggaacagctaaattctgtgtgactatattcattcttggtgttatgaaattttaacattgttatctcaaccttaaaataaatcaactcctcatattatatatatataatatatatatacacacatacattttgtttatcatacatcttccctagtactatgtaatcagcataaaaagagaggtaatagctgtcttgctttctcttgactcacaggatctaaaagccagcacaaagaatagttggtcaaaagaatatattaatgaacacataagtgattggataaatggataatttgwtgtggtaaaccaatgamaatgaaactcatcacaaaatctgcagttgcttgaattttctagtttcaggttgaggttataggcttatcaaagaagaagcatttctcagagcaaaagtttgactrttccaaaattctaggggaaatatcactgtaatatagctttgctgtagctatatcaggtgtgtgaagtagagacaaggtggaacgtcaaaattagatggcacttattctaatgctttttgaaaagcatatwaaagattttggtatatttgcacagggtcagggtcagcagtgwgtgccagctgctcggggctagctgaccccatgacaagaatgttagggaacttcccagtagctgctaaacacacttttgtttttagggaatgtctctttctccttcawtatgacttatgctgccttcaatgctttgctgatacaaaagaastgaactcaaaagaagtaaaaataaaagctagcaaactttgcaactggttaagctggttgtaaacgtacctaatcactttctactgtgaatgatatatttgtattgtgatattttttagctggttattagatacacaaaaaaggtatttcatttttaaaaattgagttagtaaccactcaccttacttacamattatttgtatattattttgtttagtatcctttctaaatgaatgttttaattgccacgttataaacrcatggaaaagtgattcaratgaatgtatatcttagctttgggtgtctagaactagagccaatgtctgattttacagtgatgacatttatttgggaaggcaagtccagggcagcaatgagggatacatgtggaaactgaggcaaaggaagatgtaaaatcatgtgtcatgatgttgatatgactttgccagttgtcgcttcacaatgaggtgagacagacagcatggtggtcatcagatacatgcacttggctccccrtacttttccagaagggttacaaggggaagccacaacaaatattagtccatggaggagagaaaagggagaatgtatcctagctgtcttctgtcttctatyttcctttggccaaagattgtttgaggcagaactaccatctttgcttttcttccttacattatccaaccccttggtggctgtttgggaaagtcacactaaccaatacccccatttttctaagagatagtttttttttaatttattttttctcttytcctctcccctttccctatgtttcctgctttctacttaactttttagacatgcacatagaactgtttactttcccctcaccagacagtcccttcgggcaagttcatctaactgtgtgctccamgarggatctctccttgagacttgacagttgatttgcagacaaaagtatgccctcatsgaactgtcacctccagggtttagcttagacctcacatccattaggaggggatgtggagasgatgcccaggtggccacttctacaatggctgtcctgctcatttccttcccaactttaaaaaaaaatccactttctgctccaaaggtgaagtgtcacattagaaggcaggatgctttgtgctccttcccgcaagctaacttccaaatacattctctatttttatatcagactyttttattactttttattattttttatattagactttacatgaagtgagccgttaaccttttttgttacaagacttcatgcccacaggtatattcaagtcccagatggaaagatgatctggatcaggcaagatgctgaccaggggaacaggagacacagtcaagggaatctgaggaagtrcatgtttttgcccartacagtccccaccttgtgccactcagatgtcctcatgccctccaaytgtggctggttttataagcacatgactagtgtagttgcacgcggtcttgtgcttttgggmtttttgcttggattaatgttctgcacttgcatttttatttttcagacagcggatactcctccgctgaagagggaatagttctgcagtaattccctaggggtttgctttctcctctcctaagggcttgatggagacaggcacagagtcctataatgcccacgatgcatgcctctagcagctttgaattctgctggatcatctgacgcaatgggcagagcaggtttggccacagcctatatctgctgtagagatatywtatgttctggattccacttgaaaccactagtctttgcattcattctgcaacccatctagttttggcagaggctaggtaggttaactgaacagggatttaaaaaggactttattaacacgttggagcaatatcctctattgtggtatttgtggactcygaaaccccaagaggctcaataaacactgtgcttcctttttagtgataagaagtatatatagggcaacatgccatttaccttaaaaaggatgtttctgctgggcgtggtggttcaagcctgtaatcccagcactttgggaggccaaggtgggcagatcacttgagaccatgagtttgagaccagcctggataacatggtgaaaccctgtctctacttaaaaaaaaaaaaaaatgccagkcmtggtggcacatgcctgtaaacactgctactcaggaggctgaaagatttgaactgattgaacccaggagacaaagcttgcagtaagccgagattgcactagtgcgctccaacctgagcaacagaatgagactctgtctcaaaaataaataaataaataaataaatgaataaataaacagattttttgacatgtggactaggagtatgggacccctaaaaacaatatctgtgttgcaggtctctaaatattaycaggtgtatctctttctgctggtattttatttctatttaatgttcaagtattttactatatttaggaaactttccatttcctggttattgcaccaattactgtaacattattaataaattaacatgatgttttgcaaaatgtaaattaaactgagagcagaagtgacatcgcctgacataaaacactgaagcagcgtttttgttcttaccacacaaaggtcaattgttttaatctcctgacccacccatgggtgtaaaataagaaacattcactaaatcaagagccacatgcaaagtgccagaagctctgctctgctcagggaagataccttatcctagagagcatttgtaagtagtgatttaaatttatggaactctgccctcattttataatgcatctgattttggtagagaccagttaggttaagtggagagggatgtaaaaagactaccatcccctgtaactttcaagtgttttgtcatggtagtgatcaattccattccttggagaatgtgattattatttttcaatccttgttgccagtggaggagaatttcgcaggcttcgccttggtcctgctctaatagtgtcccttactctacaggtcaggaagaaagtgagagtcctgccagctgccatgtrtgtccatttcaattacacattcaggaagaggtaataacagcaaactgatcagattcactttgggatggacatgagtcaaaactctaggtagcatctaaccttcaaaaactcccagtgcaggctgggtatgacggctcatgcttgcagtctycacactttggtaggcacagttgggaatatctattgaggccaggagttccagaccaccctgggcttcatggtgagagcctgtctgtacaaaaactaaaaaaagaaaaaacaacaacaaaaaattagtttggcatggtggtgctcacctgtagtcccagttatccaggaggctgaggcaggatactcccttgaacctaaaarcaatatgtgagtcagttgctggccacatccagagtactgttaacaagagtgatgcctggtagaaaagtaatgaatttattccaaacctagcttggggaaggggcacaaagagtcctgcctttaagtgtaccacttcacctttggagcagaaagcagacacttttataagataaggggggttattgagcaagggtagagggtcctyctgcaagcttggtgccttttctaccatgcgggggtctgtcctgcagaycctgactcaatgacagaggagtaatatacacygacacatatattttgcttgtcagtccagctgagcatcctggccacttacagactctaaggaagagtgctgtcagctgccgccccaamttgctggccttcttggcatttatttagaacacattaaatgacaaacgctttgagtcaacaccattagagggtaatcaacctggtcaccttcccccaggagagcaatcctgcctgtgagtgatgaaaggttagctttaggactacctgagtaaacaagctctttagataaactactatacattcctttgtatctgtgccccaagtgcccaggctccrgcaaagagactggctgccttcagccaaactatctgaagctatgcaaaaacttttggtcttccaagaaggtttttgttttgttttatacttttccctaccattctgactgaayccctacactaccagatagttgaattggtgccttcctttgcagaaatacgttataaaagtggccaagtgggtatgttttccatatgccctcctgttggatgaaagcccttgggtaattcctagagtggagaagagyctggaatttccaggtccactttctggaggtaaaaattctgtggcgggtgtgctttggtctgcaaattgactgtcagttctcaggagaatctgtcttggagcastaagttwgaaaatgtgccctgtagggaatgtctagtgagtgggagtgaaaggttatatttgcatttatgaagggctaagcaggatacagggaacaaagagaaaggggagagaagagaagagaaaataataattaaaaaaacagtaaatcattctctttttcttagaaaaaaatggggcaatctgttacaaacccaggagttcaaggctgtagtgagtaatgatcatgccactgtactagatacagcctgggtgacagattgaggctgtgtctctaaaaaaaayctaaggcaaataacacaaaaaacaaaagaacattaaaaagaaaatctcccattccatctcatggaacacgttgtctttggggtacctagatattagtgttagttcaggctctgctggggtggccaatatctggtttactggtggcaatttcatacgagtctgcagcaacgtcaagtcttgcctccccagaggaaggaattcaactgaggggcatacgtaagaagagactgaaggaagtttctgagcaggaatggaagtttattaaaaagagagcaggaaagaaaggaagagactttattggaagtctcttggaagacacttggaagagaccacagtgggcactttggagatcaagtgcagtgtcacacctttgacttgtggttttatatgttggtatacttctggggtcttgtgttccttttcccacgattcttctcttagggtcttgtgttcctttttccatgattcagccccttagggtgggctgctcacatgcatggtagcttgctaacactttagaggtgagyatgcgcagtgtgtttactggaattgtacacatgcttgcctgaggcattcttcccttttttggtggaatgcccacagaaggtcatattccaccattttctctcttaacacgcatgcctcagcctactcaccctattcctgagctgctgactaccaattttaagcgtttttatttattgtgaaatgcctctccctggcacctatgaycaattattatttttagagaggcagggtgtcaactgccaggccatcagctgatggccacttgacattccttgtgggtggtgggagccttcttctgccctactcatgcctgactaactacgtactgtaagagccctatacctaaaagtctcagatgrtatggatgtgtgtccttccctctgagtactattatctgggaaatggctacaggtctttgagaaagcatcatatgaatacattctgaatattctgtggtgaattttctgcatcttttatcaaggggacttaagcttcccttcagttattgaattcttgttctctgaattggctcagtcctgacaactggttgaggttcttggattttccacttctaaggctgacctcaggaatcagcttttcagctccattttgctcttggtttataagtatttatcaaagtatgaagcctcttcaactattggcttatgaactcattccaatgaagctgctactgtcatcgtttcattgattctgacatttgcaagatcaccagagtctgtgttgctgaggttagtcttcatgttgcatgctctattagccacattgaacatagtttatttgcatttcaggatgctgtcctctcctgattttatctttgttcactgggcagcacttctcagtctcctttgctagttcttttttgtctctaaactgaaaataccaattttcaacagggtctcaattcttcaatctctacaatgatgcctgttgtgttggtgatctcatgtattctccttactgacaatgtagtcaaatcagtcaacagacagkcataagggtgattatccatttatattgtttatttattcacatatcttggtatatagcacattatgtaaatatttttccttcaaatgtcaaatttacatttagaagtaatagtacgatggtgggtgctctggcttaagcccgtaattgagcagcttgggaggtttaggcaggcagatttcttcagcgcaattagtggagaccaacctgggaagaacggcgaagcccagtctctagtaaaaatacaacaattagccaggtgtggtggcatccatctgtagtcctagctacttgggaggctaatgtgggaggatagcttgaggctggaactgtagacagcagtgagccaatctcaaaccactgcactccatttggggctacagagtgagaacatgtctcaaaaaatgaaaaatagaagtaataataccaaaaatctaagggaaaagatggagtattaataatatttttgcttgaatttccactaaatcagagtgagggtgacccaccatctaatttagttttatttaaaatagcattatacatattgatagattactatgcaggggattattattattatagaaataatgatctaagtagagaaatatacagatggaattatggttgattaacccacttatattacttgcagttgtacaggtagtatgttttagtatcttagttactaatctcaccttttatgtatagctctataatcaaatatgagttattttttgtgtatggtatgaaataagaatataaatttatctttatgcatgtcctccaaatgtctttcagacctccaaatggataaacaaattgtggcatacttatacaatggaatactatacagtgatcaaaattaatgaactagacagacatgtttacaacagaataatacaacaaagaaaatgaacaaatttgagctacatagataataatactcacaaatgtgagaggaattannnnnnnnnnnnnnnnnnnnnnnnnnnnnnnnnnnnnnnnnnnnnnnnnnnnnnnnnnnnnnnnnnnnngatatactgtattattgcagagagtatttttctatattcatattgaaaaatgcccaaaaagccccaaaatagaatcctaattattggatgtcacttttgctatgaatttttaaaatgtagtaaaagaaaaagaagcaaagaaattcttgaaaatatgttggttttacattattcttgatgaactaccacatgaggatacttctctaggcctgatgctgagaatcatagaagaaacatgaggccatgaggaagaatagtagggttctctcactaccctgaactccagtacttaaaaaacaagatggaaatcacatttatcaaatagcattctcccttttacctgccataattattatcatcatcatctatatatacatctatctcattaaatgatatatttttgaaatatttaaatacataatttggaaaataagtaatttttaaaagaccatcattgtgggaaagttacaggagtaaacagcaaagcttagtcatgctcaatacatgtagatttagaaattaagtatagcttattttacaatatattgcttaagcaaataattatttatagatgagcttaaactaatctttgtttcattatgatcactatagaaacaatttagattttagtgtaactaaaactaaccagtaagaaggacaaagcaaatgatacattttatgagctagcttttatttctaagagaggattttaggaccaaatagtcaaacagagttaagacctcagatcttctgtcacacttgtgtgagtgatggtggagttcgaaagttatagttctataaacaaaactatactcacggatagggattaaatggtggaattctttagaaacaccagattcagttttgtttccatgagacttaaagttcttcaatctttcataaacttgtatgtactgttttactctttgatcttttaaagattgttataaatgaagaagtcttgatttctgctaataaaaacagagtaaaatttaaatcatggaatagaaaggtggagctgtrgttgagatattatattttattaattgtaatgacaktttgagatccagtgctgctcactgaatttccctgtgaggagagtttgtggtgatgacccagcaacagacaagctactatccaaaaaaagctactcacatcaaatcaatttccagtttcttccaagttgcaggagaatgcgtagaccataattttaatctcttctgtgacctaagtattacaaaaagaagaaaatcactamaattttcatgtcaggtgtrctaaaaatttayaaaaactattttttaagaasttggtgttataaatactttgtttagtttctccattaaaaatgatttatagcaagagaataaaagttcatttctacccctaaaacaataagataaaaaagagtaatgaatattgagaatccaatagacagakttgagaaccagttaaacataagaaagaattagtgaattggaagataactgcccagaatgaagcataaagagaccaagaggtagaaaatataaggctagagggtcagagacattgaagctacaatcagaacaactaacatacttctgcagttccagaagattagaagagagaaaatgggccagaagcattgtggagatttttccaaaagtggtaaagtgtatcagttcatatatttttagaaaccatcaaacttcagacaagataactaaaaccaaattaatataaaatgacaggacatcaaagaccaataaaaaacctgaaaggtaactaaaggaaaagacagattatgttaaagggaataactgtctaaatgacaacctgattttcaacagacaaaaatgaagctagaattcaatggaatcatgccttcagtgcatttcaaaagtagaatagaccttgataaacagaaacttaaaatgatatttttttcagataatagaaaaattattattattatcagtattattctatgtggagttggagtctcaatctggtgtccaggctggagttcagtggtaggatcatggcttactgcagtctggaactcccgggatcaaaccatcctcccacctcagccttgtgagtagcttccttatgcctggctttttcatttattgtagacacagtttcgctgtgttgcacaggctggtcttgaactcctgggtgttcctgactcagccttacaaaatgttgagattatgggtgtgagccaccctgccttgccaataaaaggactttttgaaactattaaattgaatatgcaaaaaggaatacaaattaatgaagtggtaaatatgtgcataattctaaatgaatgtttactgcataaaataataatgtcttgttggggtaattatataattgataagatayatgcaaatggcaaaaaatagaatggaggtaaagctgacaggagtacatttagttaaattatcttttaaacttttctatgtctatgaggatattttgcacaatgaccctgtaattctactcaaaggtatatatacagaggaattgcatcaaatgatatatgaaagaatgctctagtagaattattcgtaactgttcaaaaaagaagctggccaaatatatattaaggatagatcaatcattacagtaaatccacacaatggaacartatagagaagtgaaaaaaaatcacatgtacttgcaactatgtgactaaatttcagaaacacaatgttgagtccaagaagccacaaacaagaagaacatgtaggattgcacctacacrcagtgcaaagcaggccagaccaagcgatggagtttagsgttgcatacctagttggtaaagtgtaaagaaaattaaggaaataatcaccataaattttggatatygcttatctcaggaggtatgaagaaatgtttagggacttggaaagtggcatggaggtggacctaggttgtgtttggtgttccttgtcttgcctgcatcatggttacttgaatgtttatgatacactgcrgtatttcccatttttgttttggttcatttctaagtgtgcattataattttaatgtaaaatgtttaattaggagatatgtctcatagaaattattattattcatctcattatatactgatggcaataataaactatttgtatacattgttatacaactctaagggagttgaagtgagcactttcttatttagttgcaacgtgaggaaatttgagatgatgttatcctccaaccccagaactttccaatggatttcttctagccttaattatcgacctcacaagaacaaacctttgcaatttcccatctrtttttgcttttggctcctgaattcctgacacaacaaggttgtacatatttcccacactcttggtttagcagagttgatttatcagttatgtttttctgcaagagaaaaaccctccaaactacattagatgtttatatctcacatgttgttggatttcattttttttaagctgggtttggtggatggctctgtttatttgaaatggaccaaattctgaatcttggtagtagttagagtttggccaatttggtctggatcaggtgggggcaatctgacttcattagtttctcactctccttctgggaacagtgtactagccaggtgatattctcatggtaaatggaaagaggaagaatccccattatggaagccatctgaaatctctatgcaaagtgtagtaattttctgtttatcaaagcaagttaaatggttgtactccaagttcaggggcaaggtagtcagycttctcagtgatggcaggatactgcaagactatatatcaaagggttgggtactcaggaattcttatacaattgctaaatgttttgtatagtaataaatatttaaacattagtcttgagagaaactttaccaaaggcctaagaattagagatatgtttgataaataaatattattcrtgagctgaaagccctgagtgggaaaataggactaacttcacctagacaacctcctggaaactcctttttttattttggaactgatgagaaaataatttgttccattcgtgagtggtgtgcacatgtgtgtgtttgtgtgtgtatttatgagcttgtgaataatgaagttatacaaacgtattagcagcaaccagattctgaggttctccagaaaatcttagatatttttgataaaagcagtttggattctgtgtatttaaatctgtcattwaaaaaagtccatataggtgatgaacttaattatgaccaagctccttttaagaatttagacatttactatatgatctctgtattgggttataaaacttccctaacaactgaagtcactaaagacaaatgatggagaggttacacaaggaaaaattgcaaacactgaaagtgaatatgtccttgtttgcatactagcaaatgagaattcaggtttcatgtcaacttcagtatgaataattccagcctataacaaggacagacagtgaatgaatgggttaatttgagttgttttgaaaataagaatattttccataaagagagcgttgaacttacccattagcatgccatggtgatttctggcttgacaytggtaacarcaattaaaagtaaaaagaatgtcacagcacatacacaaatcaggtgcatatagaatttaaggtcaggatattcaagcaatcacaaccagtgatattacaccagcattttaaaaatttctttttgtctgttcagacatgataacttttctgcccatcattttttccattctaatagtggttacatttgtgattggaaattttgctaatggcttcatagcattggtaaattccattgagtggktcaagagacaaaagatctcttttgctgaccaaattctcactgctctggcagtctccagagttggtttactctgggtattagtattaaattggtatgcaactgagttgaatccagcttttaacagtatagaagtaagaattactgcttacaatgtctgggcagtaatcaaccatttcagcaactggcttgctactagcctcagcatattttatttgctcaagattgccaatttctccaaccttatttttcttcacttaaagaggagagttaagagtgttgttctggtgatactattggggcctttgctatttttggtttgtcatctttttgtgataaacatgaatcagattatatggacaaaagaatatgaaggaaacatgacttggaagatcaaactgaggagtgcaatgtacctttcaaatacaacrgtaaccatcctagcaaacttagttcccttcactctgaccctgatatcttttctgctgttaatctgttctctgtgtaaacatctcaaaaagatgcagctccatggcaaaggatctcaagatcccagcatgaaggtccacataaaagctwtgcaaactgtgacctccttcctcttgttatgtgccatttactttctgtccataatcatgtcagtttrgagttttgagagtctggaaaacaaacctgtcttcatgttctgcgaagctattgcattcagctatccttcaacccacccattcatcctgatttggggaaacaagaagctaaagcagacttttctttcagttttgtggcatgtgaggtactgggtgaaaggagagaagccttcatctycatagattcacaagagcagcattgtgtatcttctagcagaaaacaaacgtgttatatgaagcattttatatttcttactgtgttttctgtaatgtatgtatatgaataactttcaagcatgtacctagaaaagtcttttacctaacgttagtctaaaaaagtgcgtatgtatatatatgtatttttgtgtgtatgtttgtatgaaaaacaaaagaacattgacagtgacatactcttttttgttttttcacacaaactgccaaattatacaaaatatgacaaaaattcttaagaattatgaatccatacctatttcatttatgtattttatatttcatttgaataatttatgatctatatttataattattaagaactatcagcttatctcaggaaagacattgctgttttctattgttatttgaaccacacaaatataccacagtgtgcttcgaattcattgtttgaacctgtaactttttggatggtaaggtcattcaattctaaatcaataataaggatgtgtctttgaggttttattccattatgaattcctattttatgtttagtaaaaagcaatcagaattattgatagaaaacaatgcacacaataaaatttgagtgacaagcatatgtagagtaagtttcaactatgtctaccataaacagttctgaggaatattagatttaatacaagcatgtgaatagcttagaaaacaatctcttctataatagggatgaaaaatcatgattgtgatcttgattgctattatcagtttccatatgtagttagaaaagtcatttcttccagcttttggattaaagaaaagctttttttttgaagttgagaggtgatgtaaactattttagtatttttttctaaagcacttttaagcccctgaattgttaattatacccttaccttccatttataaaattccttctaaacttcaggtaacagaacccaaatcttccttattctaaaaaaaaactatcaatgtaaaaatagtatagaaattatggaaaataaatcaatgaaatttttgtaaatgttaaaatggcatctatgaaatctatgttttaattatagaatgtgctttacagttataattttgttgtcaatgatgaaatgaaagtggttgacatattcattaataggaagttctattatgagatggaaatgtacagtcttgttcacagctaaattctacatgactgtattaattttggtgttatgaaattttaaaaatgtgatttaaaccttaagataaatcatccccacatgtgatttatgtgtttttttaaaatcatgtatcttcctcagtacaatgtaagaactgtaaaatcagatcagagatgatctcatctctgtcttgctttctgttgaatgtaagatcagagagcaagatgatctcatctctttcttgctttctgttgactcccaggacctagaacccagcaacaagaatagatggtcaaaaatgatattttaatgaacaaataaatgggtggataaaatgggtaagctgatgtggtaaaccaatgaaagggaaactcatcacaaaatctgcagttgcrtgarttcccctgttctgttctcaggttaaggttacaggcttatccaagcagaatccttccgcagaggaaaagtttggctattccacaattttaggggaaatatgacaataatatagtcttgatgcarctgtatcaggtgtctgaattggagacaaggtagaacatcaaaattagatggcgcctattacaatatttttagaaagcgtataaacaaccttggtctatttgaatatgtatttttttctattgtgaattatatatttgtattatgatattttctagttgattattatttaaacaaaaatggcatttcattttaaaaattgagttagtaaccagctactttactaaaatgttttttatgtattacctgttattaaggtgatgacatttatttagaaatcaagttcaagacaaaaatggcaaggayatgtggaaattgagacaggaacaaatgtgaaacaatgtgtggtgatgtctggtatgrctctgctggcagccacttcacagtgaggtgagagagacagcatgacggtcatcagatgcgtacacttggctcccagcacttttccagaagggctacaaggggaaaccacagccggcattagtccagggatgagagagaggagggagaatggagaatgtatctgctcagtkgtcttctgtatttgatttcccattggccattgtttccctgaggcagaactaccatctctgctgttctgccttccatcatccagtccctaggtggaggttgtgaaagtcagacctcatgcccacagtgtggtgttccattcaagtcccaaatggaaggatgatctggatcaggcaaggtgctggccaggggaataggagatagtgaagggaatctaagaaagcacatgtctgtgtccaataccaccactctttgtgccgctcagatgtactcatgccctccagtcatggctggctttatgagcatatgacttgcacagttgcacagaggatactcctctgctgaagagggaatggtcttgcactaattccatagggatttgctctcccctctcccacaggcttgtcagagacgtgcacagagtcctataatgcccactatgtatgcctctaacagctttgaattctgctggatcatttggctcagtggccatagcagtttggatcagaacctatatctgctgtagagccctcttttgttctgggctccatttgagaccagtagcctatagaaacttcattaatgagtcagagcaatattctcaaatgtggaatatgttggctccaaaatcccagtaggcccccaaaacactgtgtctcttttgtagtgataggaaatatagagagagagcaacatgccgtttactttaaaaaagattgttttgacatgtggactagggacactgaaaacctgaaaacatcacctatgttgtcagtccctgaatcttcacatatctcttttcttctggtattttacttccattcaatgttatagtattttacaatattaagaatcttgcctcttcctgtttattttaccaaataatatataattattatttgagacagggtctcattctgtccatgaggctggagtgcagtggcaggatcatagctcattgcagcctcaaccttctgggctcagttgattctccctcctcagcattgctagcagctgggactgcagggacacaccaccttgcctggctaattttggtattttttgtagggctgggatttcaccatgttacccaggctggtttcaaactcctgggcccaagtcagcctcctaaagtgctggaattacaatcatgtgccacagggcccgggctgtaatattattaatatattaaattagcatgatgtttttaaaaaaatgtaaattaaacagagaacagaagtgacataktcctgacataaaacagtgaagcagtgctattattcttacaatacaaggcaaattgtcttgattttccctcataaagggtgtagattaacaaatattcaccaaatgacgagccccgtaaaaagtgccagaagctatgctctgctctgtgaagacagtacatcctagaaagcatttgtgagtgttgattgaagtttatggtaatctgcactcattctataatccatctggttttggtagaggccagataggttaagtgaatccrgttatagaaaggwctaccatcccctgtaacttgcaagtgttttgtcacggcagtgaccagttccattccttagggaatgcggttattatattttatacattgggttgccagcagtggagaatttcagaggcttcaacttggtcctgctataataatgtcccttactctacagttcacgaagaatgtgaaagtcctgccagctgccatacgtatccagttcaattacacgttcaggaagaggtagtaactacaaactgattagatccaccttgggatggacatgagacraarctctaggtagcatctgaccttcaaaacctccccctgcaggctggatgtgatggctcatgcctgtagtcttagtagtttgggaggccaaggtgggagaatcccttgagagcaggagttccctttgcaacatatggaaactccatgtctacaaaaaattgaaaaattagctggcgtggtgctgcatgcctatagttccaaatasttgggaaactgaggcaggaggattgyttgagcccagggtttcaaggctgtagtgggctatgatcctgccactgtactccagcttgggtaacagagggagactctgtctaagaagaaaaaaaaaaaagtgaaagttcttactggtgtcttaaatatcaagtaaaacaggttcaaatcaataattaacaatctttggttcctgcctatagcaaaaaggtaaaatggaaagcagttatacaaatagtatgttaactcataagaaaactagccaaagacagatttattatcatctgctttttttgttgttgttttctcgagacggagtctagctctgtctcccaggctggtgtgcagtggtgtgatctcgactaactacaacctccacctcctgggttcaaatgattcttttgctgcagccatctgagtacctgggattacagacgggyacyaccacacctggctaatttttgcatttctagtggatatagagtttcaccatgttggccatrctggtcttgaagtcctaacctcaggtgatccacctgcctcagcctgccaaattgctgggagccacgggcctggccaatcatctgctttttataggtgataatactgaggcagggagtagttgtaaaatggagtctcagatcatagctataccaagcagggaatctggtttcctgtcctggcagtctgactccaagatcccctcttagaaaccatcatactgtaaaaactgaaargaaataaaaatccaagattggagactgattttaacatctattcatctaaaccattaagtaatcaaaaatgaattaaatagaggaaaatacaactgactattcatacacagagaagtgtagactcttcaatggaaaacatgttttttaagtgcccaaggaatagttataaaattgctgagtattttaattaaacaactaatatttaagtattaggctcaagagaataatttagtcaaagtcctaaatatgagaggctaagtttgataaagattgaaaatgcactgaaaagcccaagtaagaaaattattttttcattttagaaattataggacaataatatttcccarctatgaggtgtgtgtatgtgtgtgtgtgaacrtgtttgtgttaatgagcttgttaacaataagttatacaaaattattagttggcagcaacsagatttttaggaatattggccttcctgggcttcccaagaaaacsytggatgcttttggtaggaaaagttaggactcactaaatctggcacagaaaaggtgaatcaacagtggtcgtgattctagttttgaccgagctgcatataacagtgtaggcatctgatgtasgatctatgtattaggttagaaaatttcccttacaactgccattgctcagcacaaattatagagaggttaaacaaggaataaatggcaaaatgatgaataagaatatgacctgatttgcatgctggcaaatgagaattcagcttttacttcaacatcagcatgaaacattttatcttataacaaggtcacagcatttgaataggagttaatttgagctgttttggaaattatcatgttttccattaagacagccttgaactcattcagtagcatggcccggtgcgttcctgcttgacattagtcagagaatttaaaaggaacaagaacattactgcacaatcagaaatcaggtgcacatagaaattaaggtcaggaccttaaagggaatattgcccattgatattaggcctgccttaaaaaaattcagacatggtatgtttactactcatcattattatccataacagtaatggtagaatttgtattttcccataggcaccttcattacacttatatactkatttgatatttcaacatattattttctttgggtccttttaagtagttgttaaacaatgctgaaagttgccttacagtatgctgttaactaatcatattttctcaaagtcatttggcataatatttggttaaaagaagtatgtctagtataattacatgtgttcataayaaaagagcacttaaaactttaaaaaatattagaaaaacgaataaaggaaaatgaatacatatataaaatatataattcattattaataaatrtgcataaaatcacactcatagaatttaaaaagagtaacaatttttgaattaaggatacattctaaattataatagaaaaaggcttataaaatgttagttttaataatactttatgtaaatattattgagtttcctgcttcatacatgtccctgcaaaggacatgatctcatccttttttatggttgcatagtattctatggtgtatatgtgccacattttctttagccaatctatcattgatggacatttgggttggatcccagtcttcactattgtgaatagtgccgcaatgaacatacgtgtgcatgtgtctttatagtagcatgstatttaatcctttgtgtagatagccagtattggaatcactgggtcaaatggtatttctagctctagatccttgaggartcacyacactgtctttcataatggttgaagtaatttacactcccaccaacagtgtaaagcgttcctatttctccacatcctctccagcatctgttgtttcctggctttttaatgatcgccattctaactggcatgagatagtatttcattgtggttttgatttgaatttctctgatcaccagtgatgatgagcattttttcatgtgtctgttggctgcataaatgtcttctttcgagaagtgtctgttcatatcctttgcccactttttgatgggatttttttattgtaaatttgtttaagttctttgtagattctggatattagccctttgtcagatgtgtagattgaaaaattttctcccattctgtaggttgtctgctcactctgatggtagtttcttttgccgtgcagaagctcttcagtttaattagatccaatttgtctattttggcttttgctgccagtgcttttggtattttcgtcctcaaggccttgcctatgtctatgtcctgatctttcatatcactgagttttaatagctaaagttgagaagtctctcaaatttccgtcagtgataaaatgtataaataaattatggcacacttgtacaatagaacactatacagcaatcaaaatgaaccaactagagagacaagtttacaaagaatataaataaaaaggaaaatgaacgtatttggacaacatygatatgagaggaattattaaaattgaaaaaagattcagtataattccatttatataaagtttacaaaaaatatttttaataaattacaatttattacattggtggcgaaattctaaagtgagacatgtgagtgattatcataacaattgggatagtagggatggaggaaacaaaagggaaatgatatcaacaggaaggcatatatggggagtgtctggattgctggcaaattctactttatgaccaagatgtgataacatgactcttaatgccataattttttaatttactgtacatttaggctttattactttataaatatgcttcacaataatgaaaatacttaaaaagcaaatcatataataaataaatataaaataggctgaaaaaacatattcttatagacatcatgataattagagttttgctgaataaagaagaatagagcattatgatagtaagaaatccaagataaaattttaaacttttctttaaatattttaaaaagtaasagataagcaggaagtctacctccacattcttaatgttagttttactatgaaacatcagattctggccgggtgcggtggctcatgcctgcaatcccagcactttgggaggccaagttgggtggatcacgaggtcaggagatggagaccatcctggctaacacggtgaaaccccctctctactaaaaatacaaaaaataagccaggcctgatggcaggcgcctgtagtcccagctactccggaggttgaggcaagagaatggcatgaacctgggagatggagcttgcagtgaggcagagcttgcagtgaggcggagcttgcagtgaggcggagcttgcagtgaggcagagcttgcagtgagccgagatctcgccactgcactccagcctgggtgacagagcaagactccgtctcaaaaaaaaaaaaaaaaaaaaaaaagaamcatcagattctgagcatctgtattacactagacacctttttttcttatttccaatttcattatttatgataacatttcaaagaggcagaaattagtgaatttccaataaattatagtaatatagatattaaatacacaggacaatttytataaatttatctctaaatgaaataattatgcccatttttaccattcaaagattataycatgcatgtgtacacatatgtgaggaaaaatattttgatagtacaaagtttttgaatattagagaagaattagtagaaagataattttgttgaggcataaagcatatttagtgtaactactttgactgctgtaataaaatcacccagattttgtsacagtagctgagattaaaaataaacagtagagagaatttcacttgttaataatgctattaaaagatgaagcttatacactttataattgcacagagtatttgtgtaagttcatataaaagtggaataaaattaaacagccaaaaagagagtattctttgctagaggtcacttttggggtaatttttagaatgtggtaaaagaaaaaatatcttgcaaatcattagaaatatgttgattttgtgttactcttgatgaaatactatgtgagggtatttgtctaggcctgattctgagaataatataagaatcgagccaggcaccatggctcatggttgtaatcccagcactttggaagttgagactggtggatcacctgaggtcaggagttccagaccagcctggccaatatagtgaaacccactgtctactaaaaatataaaaattagctggatgtgatggacagcacctgtaatcccagctacttgggaggctgaggcaggagaatcaattgaaccttggaggcggaggttgcagttagctgagattgtgccattgcactgcagcctgggtgacaagagcgaaactccatctcacacacacacacacacaaaatgtaaagccatgaggatgaataatagtgttctcccaccacccttaactctagtgctttgaaaagaagactcgaatcacaattatttagtaacattctccctttcaggtgacatcatcatcattattatcatcatctacatttacatctgtcttattaaatgatttatttctgaaatatttacatacataatttgggtaaygtctatgtaatttccaagagatatcattgtgggaaagttacattagtaaacagcaaagttcatgtcaggctgaatacattgagatttagaaagttaagtgtagtgtagtgtagtttaaaatacattgcttaagaaaacaattatagatgatattaaactaatccaaggaacactataaaaagattttgattttagtataaataaaattgcttagtaagaaaaataaataaaccatttcatgatcaagctcttatttctaaagagaggattttagggctaaataaatcaaacagaagtaagctctcccccacawcttgtctatatcatttggataatgatgtaattcaaaggcacagagcaccttttcaacaacataagcaaagtgaaaattatgtcatggaatacaatgatgtatctgyggttaatgaactatattttatctattgcaatgatattttgaaatccagtgctgctctttgagttccctttgagcagagtttgtggtggggacccagcaacagacaagctaatatccaaaaaaagstactcacatcaacttaatttccagtttctttcaaattgaaggtaaattctaacacaaagcttttattctattctctgactaaagtgttgggaaaagaagaaaattgttaccgttttcatttctaacatactaaaacaaaaaacaaaaaatcaaaaaaatcagaaacatttttaaaaagaacagagtgttaagagtagtttgttcagttttcctatagaaaataatgttcagaaagagaataaaagattattctgaacactaaaacaataagactaaaaaaatgaaatatcagtactgagaatccaatagaaagagtcaaccagttagagyackagaagagataattagtgaattagaagatagctamacagaatgaagcayagagagaaagaaatggaaaatgcaaggctagagggtaacacactgatgctatcatcaaaacacctaacatacttgtagagttctgtaagattagaggagagaaaacagagcgagagaaatgttgcagggatttttccaaaagtgaaaatgtatcccagcatatatctttagtaatcacaaacttcaggcatgataactaaaatcaagttaacaaaaaataatacaggacaccaaagaccagtagaaaatctgaaaagtagctagaggtagaagatagagtatgttgataagaaytgcattctaaatacaacctgattttaacagaaaatatggaaggaggaattcaawggaatcatgtcttcagtgtgtttccaaagagtagtagaccttcataaacagaaattgaaaatgatatttttcagatataataaaaattactgaaaatacaaagttgaacatgcaaggagcaataaaaattaatgacgaaaaataagtgtgtaattctaaataaatgttgactgtataaaacaatattgtcttgttggattaaaygtataattgatamgatatatgcaaatagcaataaagagactggagataaaggtgacaggaataaatttagtcaaactgtgttttgggcttttctatgtctgtgaggagaatttgaatgtcataatcaaggacsctgtaattctacacccagctatatawatgcaaaggaattgtagcaaatgatatgtgaaagaatgctcattgtagaattattctaacagctcagaaaagaagctgcccatatgtacatcaaataaggatgaataaataattacaataaaatcataaaatgraaaaacatagagaagtgaaaagaaatgaatcacatgtacatgcagttatgtgattacatttcagatccataatgttgagcacaggaagccatgaatacgaacatataggattgtatctatacagagttccaagcagaccaaaccaagctattgagtttagggttgcatacctagttggtaaagtataaagaaaaattttaaaaaatgatcatcataaattatggacgttgcgtattacaggaggtgtgaagaaaggtgtagagggatggaaacacattgaggtaaacctaggctgttagcaacattccatgtcttgccctacctgatggttacatgagtgtttatgacatattgctatgttttccatttttgttttggctcatttctaagtgtgcagtctagttataatataaaaattattaatcagaagaaatgttccatgaaaattattattactctgctcattatataccaaagggaaaaatacactgtatacattcatgtacagctctamaagattttaattagaaaatttttgattttagttgtgactactgaaaatttgacaagatgtttcctgccaaccccagatttttcagtagatatttcttctagttttaattatctacttcatgtgacaaaacattgacattttccatctatttttcccttggatcctgaattcctgacacaacaggggtggacatgtttcccacacgcttggcttagcagaatacctatatcayttaagtttttctgcaagagaaaatcctccaaaactgcattagatatttgtgtctcatrtgtctttggatttcatttttgtcagctaggtttggtggatggctgtggtgattggagatgggccacattctgcatcttgaagctactttggctgatttaggctggataaagcagtggcattctgactccattagtttctcattcttcttctgggaacagtgtactcaccagatgatgttctcayggtgaatggaaaagagcaagaaactccaatatggaaaccgtcttaaatctctgtgtaaagtctactaatttsctgttcactgaagcaaattacatgagtgaattcagagtccaagttccaggtagtcaccctgcctgtggtgggaggatactgcaggattatatgacaaagtgtagcgtacttagaaatatttgcaaaattgctgactgttttaattaaataattaatatttaaacaaaaaacagacttgagaataaatttaccaaaggcctatgttgggcacaggcccccaaatctggccataaactggccccagtaaactggccataaataaaatctctgcagcactgtgacatgttcgtgatggccatgacacccatgctgaaggttgtgrgtttaccagaatgagagcaaggaacacctggcccacccagggcaggaaaccacttaagggtattcctgagccacaaacaatagcatgagcgatctgcaccttaaggacatattcctgctgcagataactcgccagacccatccctttgtttcggcccatcccattgtttcccctgaagaatactttcagttaatctataatctatagaaacaatgcttatcactggcttactgtcaataaatatgtgggtaaatctctgtttggggctctcagctctgaaggctgtgagacccctgatttcccactccacacactatatttctgtgtgtgtcttaattcctctggcgccacaggattagggtctccacaaccgagctggtcttggcaggcccaagcatgagaaacatgtttgataaatattattcattgtctgacaaccctgagtggaatatgactaattccacctagatgacctcctggggaaactcgttttccaattggggatttataagaaaataattcattgcatctgctaagtgtgtsagtgcatgtgtgtctatgtattgaggagcttattaacaatgatgtcatataaatgtattggttatcagaaaccagattttaaggtgtattggcctcccaggactttccaaaataatcttggatgatattgataaaaggtttagattctggtattaaacaaaccatattggtattatcctagttatgaccaagctccttaaacaatttaaacctgtactgtatgatatgtgtattgggttttaaaatttccctatgtaacaactgacgatgctgracacaaattatggagaggttagcaaggacaacaattgcaaaacaattwaaaaaatgcctttatttgcatactaacacatgagaatttacttttcacttcatcctcaatataaaatatttcagcatatagtaagacagacagtgtatgaagaggagtgaatttgagctgttttgagaataagaatattttctatttctataaagacagctttgaattcatccattagcatatgatggtgctttcctgttgaaattagtcatgaatttaaaggcagaaaatgttactrcacatttaaaagtcaagtgtttatcgacattaaggtctggatattaagggaatcacaaccagtgttattaaggctgcattttttctttcttttcatttgttcaaacatgatatgttttctgctcatcattttatcaattctggtagtgtttgcatttgttcttggaaatgttgccaatggcttcatagctctagtaggtgtccttgagtgggttaagacacaaaagatctcatcarctgaccaaatttctcactgctctggtggtgtccagarttggtttactctgggtcatattattacattggtatgcaactgtgtttaatttggcttcayatagattagaagtaagaatttttggttctaatgtctcagcaataaccaagcatttcagcatstgggtgttactagcctcagcatatttcatttgctcaagactgccaatttctccaaccttatttttctccacctaaagaaraggattaagaatgttggtttggtgatgctgttggggcccttggtatttttcatttgtaatcttgctctgataaccaygggtgagagtgtgtggacaaaagaatatgaaggaaatttgtcttggatgatcaaattgaggaatgcaatacagctttcaaacttgactgtaaccatgccagcaaacgtcacaccctgcactctgacactaatatcttttctgctgttaatctattctccatgtaaacatgtcaagaagatgcagctccatggcaaaggatctcaacatctcagcaccaaggtgcacataaaagctttgcaaactgtgatctccttccttatgttatttgccatttactttctgtgtctaatcacatcaacttggaatcctaggactcagcagagcaaacttgtattcctgctttaccaaactcttggattcatgtatcytttgttccactcattcatcctgactatgggaagtaggaagccaaaacagacctttctttcagctttgtgacaggtgaaatgctgagtgaaaggacagaaaccctcaactccatagattcacaaagggagcattgtgtatcttttagctgaaaacaaactgacggtatctggaacattttatatttccattcgtttttccttagtgtatatatttgaataatttcaaaacagatacctagaaaagtcatctatctatctatctatctatctatctatctatctatyayacacacacacacatatrtgtgtgtgggtatatgtgtgcatgtgtgtgaataacaacattgaccacaaattatgaagccgagtatatttcacatatatatgtaggtatattttatgatagttcatcctatggtatttcatgtgaagaatttattacctctatttataattaggaacttacagcttttatcaggaaatcattgttgttttccattgtaatttgtaccacatatatgtacttaactatcattgtttgaacctctaattttttggatggtaaaaacattcaattctaaattaatgatgagaatggatctttggggtaggttttatttcattatgaattcttattttatatttattataaagcaaatagaatggttgttagctaatgatgcacacaataaaatttgagtgacaaacatacatacataagtagagtaaattttgtatgtgtatrccaaaaactgttctaaaggatactggatttaatagtagtatgtgaatagattagaaaaaaatcatttctataataggaatgaagatacatgatcatgatactttcagtgctgttataattttttaatgtgtagttagaaaagttgtttcttccactttttgaattaaagaaaaccttttttttttgaaattgacatctgatgtcaagtatttccatttattttgcttagccacctcygagcccttgaatttccaattttccctttgtctcccattcttaatatttctcaaaaaaattcaattattccctctcttaaaataaactcaatgtaaacagggtatataaactatggatcacaattgaatgaaacattctgcaaatattgaaaattatctgtctaatctatatattgatgataggaaatgtattaatcatatgtttcaytgtgggtgggcagtgagctgaggctcctcaagcatctctttctatttttattttgtttcttgacataggttctccagcatttggctcaaggcyccaagggcacatgtgacaagaaggcgccrgctttttaaacattggaagttcttctgtgtcagttctgtgacagaacatttacttaacacatcatgaaggctagtttggatgtggaggggaatagactccatctatccatatgaggtgagycaaagcacttagacgtgttttcaaaccactaatcttgatgattcagaaatgtgctcccttttccaatttcatcctgatacaaatgtawcatctccggatgatgccaatattctccccaattccatcatgagctgttctctataattcagaatctgtagactaagttgtaaaactaatgactgtcaatgtattctacatgaaatagtgggccaaagaaagagggaaacatgataagtagaaaaatatacatacaacatttttttcttacactaaagatcaaataaaacccataggaccaagcctcccacagatactttttataaattctggataaaatatttwaaaaaacagccattcattggcaatggagaatgaacaaaataggcagatactagagagaggtcagcacttggaagaagggaatagcaaggagtgagtttcctgattttatagctggccctagtgtgcaccaggcagaggactaaaacgtcagaagaaaactgtagacttactgggttgaagtaacagaggactgagtttggcataacacgagcagcaggagrtcaggagaaaatctgagaaaggagaaggccagaaaaggggagccccaacttctgaatataaactatccaaagctttgtctggtccctataccatgcatgtatagggcagacttcatgtagcccagctaaaataattaaattgagatttcagttatcatcaagcacagtgaagacagagatagcaacaaaacatattactttaggcaaagatactctattcttgaaaacctaaactacattccattacctttcataacagtcatattccttgtccattctggtttctaccttggttctaactcctacttttattaattacactaatcaaagtaattctctttcaaggagaaaactggaagttatgtaattgargactattaaaaataactattttggcagatgtgcaaaattctcaagcrcatatattacaactttctatagtcatatacatcctttttacacttgcttgaattggtctacaaaacccccatgtttcatagtgtaatccaaacaaatagccactccataaaatataagaataaaagttatatttatttattatataactttgattggtgaccacatttcagtattccaacttaactagaaattatcygaagattttcatcaactcactgaatttaatattagtctaaggtcttaaattgcaccaggaatcttggaaattaaatttaagctgataggctagagaaaataattactgtcaatatgtggagtttttcataatttgtattcagtttatttgaaagcataattttacattttttggtattttaacattatgtggacatattaatttaccttatcagtaaacagatataggaagtttaggaatttctttttttaaaatgtatttttaagtttcrtggatacatactaggtgcatacatttattgggtacatgagatgtgttgatacaggcatgcaatgtcacataatgaagaatggggtagccatcccctcaaacatttactcttttttgttacaaacaattcagttatactctttcagtcattttaaaatgtacaactgaattatcattgattatagtcaccctgctgtgctatcaaatagtaggtcttattaattctttctatttttttttttttttggtaaccattaacmagccactccttccctttagcctccactacctttcccagcctttgtttagcatccatgtactctctatgtccatgccttctgtgcaaacattgcagttgtttctgatgtattcaacttaacataataatctccaattctatccatatattgctgcaaatgacaggatctcattttttaatggctcaattgtactccattgtgtatatgtaccatattatctttatctattaatctgttgctggacactcaggttgcttccaaatcatggctattgtgaacagtgctacaacaaacatgggagtgtagatacctgtttgatacacttatttcctttcttttgggtatatacacaccagtgagattggtggaacatatggtagctctaatttttgtcttttaagaaaactttcaatggttttccatagtggttttactaatttatattcccacctgaggtgtagaatggttcccgtttctccacatcttcaccagcacttgttacatgccttttggatataagctgttttaacggggttgagatgatatctatctcattttagttttggtttgcatttctctgatggtcaatgatgttgagcaccttttcaccttttcatatgtgtgtttgacatttgtatatcttcttttgagaaatgcatattcaaatctttcacccattgtttgatcagattgttagattttttttttcctatacagttgttaaagctccttttatattctggttattaatcccttgtgagatgagtagtttgcaaatattttctcccattctgtgggttgtctctttactttgttgattgtamcctttgctgtgcagaagtattttttaacttgatgtcatcccaattgtgcatttttgacttggttccctgtgcttgtggggtattactactcaagaaatttttgctcaaaccaatgtcctggggagtttctctgaagttttcttatgggagcttcatggtttgaggtcttaaagatacatctttaatccattttgatttgatatttgtatagatatatgggactagtttcattcttctgcatagggatattcagttgtcccagcaccatttattgaagagactgtctttttccagtgtacgttcttggcatctttttcaaaaatgagttcacygtaggtgtgtggatttgtttccaagttgtctattctattccgttggtctatgtgtctgtcttaatgccagtaacatgctgttttggttactacagcctctgtagtataatatgaagtcaggtaacatgattcctccacttttgttcttttttcttaggatactyttggctattctgggtcagttgtggctccatataaattttaggattgttttctctatgtctgtgaagaatgtttttagtattttgataggaattacattgaatctgtagattctttgggtagtatggccattttaacaatgttgatacttctaatccatggacatggaccatcttttcttttgttgggtgtccttttcaatttcttgcattagtgttttatagttttcattatagagatctttcatctctttggttgagttaatcttcagctatttaattttatgtgtggcttttgtgagtgggattaattttttgattttgttttcagattgttcactattgacatatagaaatactactaattttttatgttaattgtgtatactgcaaatttattgagtttgtttatcaattctaatagttttttggtacagtcttcaggttttataaatataagatcatattgtttgaaaacagggrtaatttggcttattcttttcctatgtggatgctctttatttatttttcttgcatgattgctctagctagagcttctactattatgttgaatagcagcagtgattgtgagcatttttggmatgttccagatcttagaggaaagtcttttagtttttcccaattcagtatgatactagttgtgggtctttctatatgatttttattatgtttagattttccttctatattcagatttctgagggtttttatcatgaaggaatattgaattttatcaaatgctttttcagcattaatttaaatgatcatatggttcttgtcctacattctgttgatatgatgtattacattgattgattttgatttgtgtatgttgaaccacccttgcatctcagggataaatcccacttggccatgaggaattatctttttaatgtattatttaatttgattcgctagtatattgttgagactttagcatcaatgttcatcagggatatttayttgtagttttcctttttcaatgtgtctttgtctggttttggtatcagggtaataagattttcaagaataagcctgggccgggcctggtggctcacgcctgtaatcccagcactttgggaggctgagttcggtggatcacgaggtcaggagatcaagaccatcctggctaacacagtgaaaccccgtctctactaaaaatacaaaaatttagccgggcgtggtggtgggcgcctgtagtcccagctactcgggaggctgaggcaggagaatggcgtgaaccygggaggtggcgcttgcagtgagtggagagcatgccactgaactccagcctgggtgacagagtgagactctgcctcaaaaaaaaaaaaaaaaaaaaaaaagaatgagcctggaagtagtccctctttctctattttttcagaagagtttgagtaggattgrcatcagttctttaaatgtttggtagaattcagatctaaagccgtctgctcccaggcttttttttttttttttttttaaactgggagacattttattgcagaatttatctcattacctgtttttggtcttatcaggttttgggcttctttatggttcgatctttgtaggttgtatgtgtctaggaatttgtccatttgttttagagattccaatttattgatatatagttgttcatactagtcactaatatttctttgaatttctgttgtatcagttgtaatatctccattttcatctctgattttattaatttggatctttttttcttrgtctgcctaaacgtttgtcaatgttgtttaacttttcaagaaaacaagtttttgtttcattgatcttttgtattgttttcttcatttcaatttcatttatttctgctgtaatttttattatttgtgttctactaattttgggtttgggttacttttgtttttctagttctttaagatacacaattaggttgtttatttgaatttttcttcttttctsatgtaggcttttatagctgtaaatttccttcttagtattgtttttgctgtatttcatagattttggtatgttttgtttccactatcatttgtttctagcaattttccatttccttttaaatttatttgttgacctactggtcattcaggagcataytgtttcatttccatgtgtttatatagtttccaaaattattcttgttattgatttctagttttatcccattgtggccagagttgatgcttggcaatatttcagttttttggattgtttaagacttgttttgtgatctaacatatggtctatccttgagaaaaatccatgtgctgaggaaaagaatgtttattctgcaacttttgggtgaaatgttacgtaagtatctaataatcagtttgttccatagtgcagattaagtctgatgtttctttgttgattttctgtctggaggatctgtccaatgctgaaagtggaatgttgaagtctccatctattattgaattgaggcttttctctttgctttgctctaataatatttgctttatatatctgggtgctccagtgttgagtgcacatatatttacaattgctatatccttttggtgaattgacccttttatcgttatatggtgaccttctttatgtcctcatagtttttgtcttgaaaactattttgtctaatattagtataggtactctacttttttgttttgttttttttttttttttttggtttgcmttgacatggaatatctttttccatccctttattttctctctgtgcatgtctttataggcaaagtgtgtttcttagaggcaacagattgragttttttttttgttttgtttttccatttagccaaactatgtcttttgattggagagtttagtccattttcattcaacgttattactggtagtaaggtcttacttctgtcattttattatttcttttctggttatgttgtagtctgctattctttctttccttccttcctatttttcattagtgaaggttattttctctggtgatatgatatagtttcttgctttttattkttttgtgtatccattctatgctgttaggtttgagattaccatgaggcttgcaaatgctatcttctaacccatcatttcaagctaataaccacttagtactgtttacataagcaaacaaacaagcacaaaaacaaaacaaatgaggactctgcaccttaactccatcttctcaggttttaactttttgttttcactattaatatcttattgtactgtctatgtcttcaaagcctgttgtagctattttttaaaattatactttaagttctggggtacatgtgcagaacacgcagggttgttacataggtatacatgtgccatggtggtttgctgcacccatcaacccgtcatctacattaggtatttctcctaatgctatccctagctccccaccctccaaaaggcccaggtgtgtgatgttcccctccctgtgtctgtgtgttctcactgttcaattcccacttatgagtgataacatgtggtgtttggttttctgttcctgtgttagtttgctgagaatgctgatttccagcttcatccatgtccctgcaaaggacatgaactcatcatgaacagatgattatactgaggcacagagtagttataagatgaagtctcagagcatagctatgtgaagcagaaaatctggtttcctgtcttggcagtttgactccaaaatcctctcttagaaacaattatactttttaaatggaaaagaaataaaatccaagattggagactgattttaacatctattcctcttaatcctttaagtaatcaaaaataaattaaacggagaaaaatgaaaccaaatattcatatacaaagaactctagactcttcagtgagaaacatgtgtttttcaagtcacccaaaatagttacacaattgctgagtattttaattaaacaataaatatttaagtattaactgggctctagagaaaaacttagtcaaaggcctcagcatgagcgataagtttgataaatattgaaaatggtctgaaaagcccaagtggaaaagcagggctatttctacctggatgatgtccctgtaattaattttccattttggaaattagaggacagaaattccttctatccatgagggggtgagtatgtatgtatgtgtgtatgtttgtgaatgtgtttgtatgaatgagcttgtaaacaataagttatacaaaagtattagtagccaccaggatttaaggattattggcctttctgaggttcccaagaaaaccttaaatgcttttggtaggaaaagaygggattcattctacatattactggcgttgaaaatataaatctactttgktgatgatcctagttatgcccaagctccctttaccaggtaataaaaccaatgtgtcatctgtgtattgggttgttaaattgctgaacacaaattatggagagtttaaacaaggaaaaaattgcagaacatttaaaaaactcttcattggcatgctagtagatgagaattcaggttttacttcaacaacgatgtggaaaattttatcttacagcaaggacattgtgtttgaacaagagttaatttgagctgttttggaaattatcatattttccataaagagagcattgattacatccgttggcctattgagatgctttcctgtttgacattggtcacagaatttaaaaggaaaaacaacattactgcacacttaggaatcaggaatagaagtaaaagtcaggtaaagggaatctcgtcaggatatcaggcctgcctttaaaaaaattcagacatgataagtttactaccaatcattttttcaataacaacaataatatatttatattttcccatggacacctacattaagcttgtagactatttttatatttcaatatttttttctttgagtccttttaagagttgttcaacaatcctgaaatatcccttacagtatgctgttaactaattatattttttcaaagtcatttgacataatgattgattaaaggaartatctccagtataagtacacttgcttataacaaaagagtatttgaaattgacattacttattttggaaaggataygacacaatgggaattttcatacaccactcctagaattataaatctgtgacatcatttcggccgagtatggcattatctgattaagatgaaggatcacatcctaagacccagcatttatactcttatcagaatacatatacattcacatgcatatcactgagtttyaatagctaaagttgagaagtcctccaaatgtctatcagtcctccaaatgrataaacaaattgtggcatacttatacaatggaatactatacagtgatcaaaattaacaaasaagactgacatgtttacaacagaataatacaacagagaaaatgaacaaatttgagctacataaataataatacagatatgagaagaattatcaagatggaaaaatacatttagtataatctcatttacataaagtttgaaaaacattctttttaataattgtaatttattacattggtgataaaactctgtagtgaaacatatgagtgatcatcataacaactgggatagtcaagaaggaggaaaatgtcagcaagaagacatatattgggattatctggatggctggcaaattcttttttcttgccaatgtgtggtaacatccatgttaacgttacaattttttctctttctgtttctgttgtgttattactctctatgtgtatgttatgctccacaataaaaaatgttaaaaaagcagaaacataaagtatatttctaagtataaaattarggtgatacagcatattctcatagataccattgtaattagagtttttgctgaataaaggagaatagagcattatggtactaagaaatccaaattaaaatttaaaacttttctttttttattttgagacagcgtctcactctgttgcccaggctggagtgcacaagcgcaatcttggctcaatgcaacctccgccacctgggctcaagtgattctcccatctcagcctcctgaatatctaggacaacaggtgtgcaccaccacaccctgctgattttttctatttttttttagaggcaaggttttgccatgttgcccaggctgggcttgaactcttgtgctcaggcaatccacctccctcagcctttcaaaatgctgggattataggtgtgagccaccacacctgacctaaaacttttcttaaattaattttaaaaaaggagagataagcaagaactgtaaatccaccttcttaatgctaatatgaatttgaaacatcaaaatttgaatatttattattgatagacactttttatttccaatttgattatttatgatacacatttgaaagtgttagaaattcatgaatttccaataaattatactacgatggatattaaattaaataaatatatccaaaaatgtgtctctaaatgaaatatttatactcatatttttagcattttaatttcacaatactattcacatgtacacctgtaagttgggttaaatattttgttactataaattttttggctctacattagagaaaaataccatagaaaggcaaattttttaasgtataaaayatatttagcatgatctttgagtatgtttgtgcatatataattcwactttsactgctatagtaaaatgatccagatttagtcaccatagctaagaakgggaaaaagcatttgcaagaatttggcttgctaatgatgctattaaaagataaactaaagttgatatactgtattattgcatagactatttgtccatgttwgtrttcaaaaatgccaaaaaaaawcccaaaatagaatcctaattgttggaggtcgtgtttcttatcgaattttaaaatgtagtaaaagaaaaaaaagcaaataaatcgttgaaaatatgttggttttacattattcttgatgaaataccatgtgagggtacttgtctaggcctaatgctgagaatcatagaagaatcrtgaggccatgaggaagaatartagtgttctctcatcacgctgagctccagtacttagaaacaagcctgaaatcacactgatcaaatagcattctccctttcacctgccatcatcattatcatcatcgtctatatcttcatctatmtcatgaagtggtttgtttttgaaatatttaaatacataatttggaaaataagtaattttaaaaagatcatcattgtgggaaagttacaatagtaaacagcaaagttcaagtcaagctccaatacatttagatttagaaattaagtgtagtttattttacaatacattgcttatgcaaataattatttatggatgaccttcaatgaatcctcctttcactatgatcatgatagaaacaattyagattttcgtgtaaataaaattccttaataagaaagataaagcgartaacacattttttgagcacgcttttatttctaaagagcggattttaggaccaaactgtcaaacagaggtaagaccccagatcttctgtcacacttgagtgagtgatgatggagttagaaggttgtagttctataaccaaaactatattcatggataggattaaatggtggaattccatagaagcaccagattcagttttgtttccatgggacttaaagtctacttatgtcagatgtccttcattttttgataaactcgtaagtactgttttactatttgatctttcaatgattgttataaactaagaagttttgatttctgctaattaaaacagcatagggcgggcgcggtggctcacgcctgtaatcccagcacttcgggaggccgaggtgggtggatcacgaggtcaggagatggagaccatcctggcgaacacagtaaaaccctgtctctactaaaaatacaaaaaattagccaggcgtkgtggcrggctcctgtagtcccagctactccggaggctgaggcaggagaatggcgtgaacccgggggacagagyttgcagtgagccgagatcgcgccactgcactccagcctgggagacagcgacactccgtctcaaaaaacaaaacaaaacaaagcaaaaacagcgtaaaatttaaatcatggaatagagtggtggagctgtggttgagatgctctatttaattaattttaatgacattttgagatccagtgctgctcattgaatttgcctgtgaaaagagtttgtggtgatgacccagcaacagataagatactatccaaaaaaagctactgacatcaaatcaatttccagtttcttctaagttgcaggagaatgcctagatcttgcttttattctcttctttgaccaaagtattacaaaaagaaaaatatggttaccattttcatgtcaggtatactaaaagtttaaaaaaactctttttttaataacttggttttaggamtacytggtttagtttctccgttagaaaaatgatttatataaggagaacaaaagttcatttctacttctaaaacaataagacaaaaacaaaaagagtaatcaattttgagaatccaatagagttaaaaaccagttaaacataagaaagaattagtgaatttgaagataactacccagaatgaagataaagagacgaatagatagaaaatataaggctagagggtcagagacagtgaagctacaatcagaacaactaacatacttctgcagttcccgaaaattagaagagarcaaatggggcagaagcaatgtggagatttttccaaaagtgataaagtatatcagttcatatatttttagaaactatcagacttcagacacgataactaaaaccaaattaacataaaatgacaggacatcaaagaccaatagaaaacctgaaaagtaactagaggaaaagatagattatgttaaagggaataactgtctaaacgacaagctgattttcaacagacaaaaataaagctagagttcaatggattcatgtcttcagtgtatttcaaaagtagaatagatcttgataaacagaaacttaaaatacatcttttcagatagaagaaaaattattattaatattattattattatttttgttggtagagttggagtctcactctgttatccaggctggagttcagtggtaggatcatggcttactgcagtctggaactcctgggctcaaaccatcctcccacctcagccttgtgagtagcttcactatgcctgactaactttttcattcattgtagaggcagttttactgtgttgcacaggctggtcttgaactcctgggtgctcctgccccagccttacaaaatgttgggattatgggtgtgagctaccctgcctggccaataaakggtcttwttgaaaatattaagttgaatatgcaagaaggaatacaaattaatgaaagtggtaaatatgtgcataattctaaatgaatgtttagaaaataataatgtcttgttggggtaattatacaattgataagacatatgcaaatggcaaaaaatagaatggaggtaaaggtgacaggagtaagtttagttaaattattttctgaacttttctatgtctatgaggagattttgaacaatgataatataattctactcataggtatatatgcaaaggaattgtatcaaatgatatatgaaagaatgttctagtagaattattcataactgttcaaaaaagaaactggccaaatacatattaaggttggatgaatcattacagtaattccatgcaatggaacaatatagagaagtgaaaaaaaatcacatgtgcttgcaactatgtgactaaatttcagaaacataatgttgagttcaggaagccacaaacaagaggaacatgtaggattgcacctatacagcgttcaaagtaggctagaccaagcgatggagtttagggttgcatacctagttggtaaagtatgaagaaaattgaggaaataaccattataaattatggatattgcttatatcaggagatgcgaagaagggtttagggacttggaaagtggaatggaggtggacctagsctgttttmggtgttccttgtcttgccctgcatcatggttacttgagtgtttatgatacactgtggtatttcccatttttgtattggttcatttctaagtgcgcattataactttaatatacaaatttgtaattaggagaaatatctcatagaaattattattactcgtctcattatatactgaaggggaaatatcaattatttgtatacattcctatacaactctaagatagttgaaataggaactttcttatttagttgcaacatgaggaaatttgagatgatgttatctgccacccccagatctttccaaaggatttcttctagccttaattatcgacctcacaggacaaacctttgccattccccatctattttttctttcggctcctgaattcctgacacaacaaggttgtacatatttcccacactcttggtttaagagttcttttatcagttatgtttctctgcaggagaagacccttcaaaactacattagatatttatatctcacatgtcgtttgatgttggttttttgttttgttttgttttgttttgttttgttttgttttttgacagagtcttgctgtgtcgcccaggctggagtgcagtggcataatctcagttcactgcaacctccgcctcycgggttcatgccattctcctgcctcagcctcccgagtagctgggaatacaggtgcacaccaccatgccctgctaatttttgtatttttrgtagagatggggtttcaccatgttggccaggatggtctccatctcttgacctcgtaatctgccttcctcaacctcgcctgcgctgggcctggattttatttttctaagctgggtttggtggatggctgtggtgatttgagatgggccaaattctrcatcttggaggacgttagagttttgccaatttaatctggatcakgtggcagcaatctcacgtcwttagtttctcattcttcttctgggaacagtgtactagataggccatactcttatggtaaatggaaagaagaagaatccccagtatggaagccatctcaaatctctatgcaaactgtagtaattttctgtttatcaaagtaagtgaaatgattgaactccaagttcaggggcaaggtagtcagtcttcctgtgataggatactgcaggattatatatcaaagggtctggtactgaggaattcttataaaattgctaaatattttttataataatatttaaacattagacttgagagaaactttaccaagtcctaagaattagagataatgtttttgataaataaatatkattcatgggctgaaaaccctgagtgggaaaataggactaatttcatctgcacagcctcttggaaactcattttttattttggaaattacaagaaaataatttgttccattcataagtggtgtgcacatgtgtatatttgtgtgcatatttatgagtttgtgaataaygaagttatacgaaagtgttagcagcaaccagatcttatggagtagtggcctgcctgtggttctcaagaaaatctgagatgcctttgataaaagcagttaggattctgtgtatttaaatctgtgatttaaaaaagtccgcattggtgatgatcttagttatgaccaagctccctttgagaatttagatatttactatatgatatatatattgagttacaaaacttccctaacaactgaagtcactaaagataaatgatggagaggttacacaaggaaaaattgcaaacactgaaagtgaatatgtccctatttgcrtactagcaaatgaggattcaggtttcacgtcaatttcagtgtgaataattccagcctataacaagaacagacagtgaatgaatgagttaatttgagttgtttgaaaataagaatgttttccataaagagatcattgaactcatcagttaacatgccatggttatttctggcttgacactggtcacaacrattaaaagtaaaaagaatgtcacagcacattcacaaatcaggtgcatatagaatttaaggycaggatattcaagcaatcacacccagttatattacattgagagatgaagcgagctatactttctgaatcgagtggggacttggagaacgtttctgtagctagcaaggggattgtaaaatgcaccaaacagtgcactgtaaaaccacagcaatcagcgctctgtagctagcaagaggattgtaaaatgcaccaatcgctctaaaatacaccaagcaacaggatcctaaaagtagccaatggcagggaggattgaaaaaagggcactctgataggacaaaaaaaggaaaatgggaggggacaaataagggaataaaagctcatggcttcagccagcagcagcaacctgcctgggtcgccttcctcycggtggaagctttgtcctttctctcttctcaataaaccttgctgttgctcactctttgggtccatgccatctttaagagcagcaacactcaccgtgaaggtcggtggctccatttttgaagtcagggagaccacgaacccacctgcaggaaccaactccggacacaacaccagcattaaaacaatttttttttgtctgttcagacatgacaacttttatacccatcattttttccagtgtggtagtggttctatttgttattggaaattttgctaatggcttcatagcattggtaaattccattgagygggtcaagagacaaaagatctcttttgctgaccagattctcactgctctggcggtctccagagttggtttgctctgggtattattattaaattggtattcaactgtgtttaatccagctttttatagtgtagaagtaagaactactgcttataatgtctgggcagtaaccggccatttcagcaactggcttgctactagcctcagcatattttatttgctcaagattgccaatttctccaaccttatttttcttcacttaaagaggagagttaagagtgtcattctggtgatgctgttggggcctttactatttttggcytgtcaactttttgtgataaacatgaaagagattgtacggacaaaagaatatgaaggaaacwtgacttggaagatcaaattgaggagtgcagtgtacctttcagatgcgactgtaaccacgctaggaaacttagtgcccttcactctgaccctgctatgttttttgctgttaatctgttctctgtgtaaacatctcaagaagatgcagctccatggtaaaggatctsaagatcccagcaccaaggtccacataaaagytttgcaaactgtgatctttttcctcttgttatgtgccrtttactttctgtccataatgatatcagtttggagttttgggagtctggaaaacaaacctgtcttcatgttctgcaaagctattagattcagctatccttcaatccaccsattcatcctgatttggggaaacaagaagctaaagcagacttttctttcagttttgcggcaagtgaggtactgggtgaaaggagagaagccttcrtctccatagattcatgagaggggcattgtgtgtcttctagcagaaaacaaactggtggtgtatgaaacattttatatttcttactggtttttctatactgtatgtgtatgaataatttcccaacgtatacctagaaaagyctttgacctaatattagtctagaaaaaaawatatatatatgtgtgtgtgtgtttatgtgtgtatgaaaacttaagaacattgacaataacatgctcttttctgtttttttcatacaaactgccaaattatacaaaatatgacaaaaatttcttagaattttgaagccatgtatatttcattcatgtattttatatttcatttgtagaatttatgatgtctatttataattattaagaagtarcagyttatcccaggataaatattgctcttttctattgttatttgaaccacaggaatacaccacattgtgcttagaattcattgcttgaacctcgaatttattggatggtaaagtcattcaattctaaatcaataatgaggatgtatctttggtgttttattccattatgaatttctattttatgtttagtaaaaagcaatgagaattattgttagaaaagaatgcacacagtagaatttgagtgagaagcatatgcagagtaaatttaatgtatgtctaccataagcggtactgaggaatattagatttcatatgtgaatagcttaggaaaaaatcccttctctaataaagggatgaaatatcatgatcatgatctggattggtatcatcagttatgcatatgcagttagaaacgtcatttcttccgcttttgaattaaagaaaagctgtttttgaagttgagatctcatgcaaattattttagtattctttctaaagcacttttaagcccctgaattgctaattatatccttaccttccatttatgaaattccttctaaacttcagataagagaactcaaatcctctctttttgaaaaataaaatcaatgtaaatatartatakaaattgtggaaaatatttcagtcaaactttttgtaaatgttaaaawagtatctatgaaatctgtgtattaattatgagatgagccttaacgttgtaattttgtcatcaatgatgaaatgaaagggtgttgacatattctttaataggaagttctattataagaaagaaatgtacagtcytgttcacagctaaattctacttgactgtattaattcttggtgttatgaaatttaaacaatgtgatttaaaccttaagatgaatcatccccccacctgatttgtgtatttttttaatcatatatcttcctcagtacaatgtaaggactgtaaaaaaagagataatgtctgtcttgctttctgttgactcccaggaactcgaaaccagcaccaagaatagatkrysaaaaatratactttaatgaacaaataaatrggtggctaaaatggrtaagytgatgtggtwaaccagtgaaaaggaaactcacacaaaatctgcagttgcatgaattmccctgttccrgtctcaggttaagattacaggcttatccaagcagaatccttctcctaaggaaaagtttggctattccacaattttaggggaaatatgacaataatatagtcttgatgcagctgtatcaggtgtctgagttggagacaaggtagaacaccaaaattagatggcacctattataatrgtttgaaaaatcatataaacaactttggtctatttgaatatgtatttttttctattgtcaattatttgtattatgatattttctagttgattatttaaacaaaaatgacatttcatttcaaaaaattgagttagtaaccagctactttaccaaaatgtttttaatgtaatacctgttattgaagtgctaccatttatttagaagtcaagttcaagacaaaaatggcaaggacgtgtggaaattgagaccggaacaaatgtgaaacaatgtgtggtgatgtctggtatgaccctgatggcagccacttcacagtgaggtgagagagacagcatgatggtcatcagatgcatgtacttggcttccagcacttttccagaagggctacaaggggaaaccacagctggcattagtccatggaagagagagaggagggagaatgtatctgctcatctgtcattagtcttctatttcctattggtcagggtttccttgaggcagaactatcatctctgctgttctgtcttacatcatccagtcccttggtggtggtcatgaaagtcagacctcatgcccacagtgtggtgatgcattcaagtcccaaatagaaggatgayctggatcaggcaaggtrctrgccaggggaatwggacatagtgaagagaatctragaaagcacatgtttgtgtccagtaccrccactccttgtgccactgaggcgtgctcataccctccagtcatggctggctttatgagcatatgacgtccacagttgcatagggttttgtgcttatagggacttgtgyttagagggactctatgcttggattaatrttctgcacttgctrttttgtttktcasacagaggatacttstctgctgaagagagaatgktcttrcactaattccatagggatttgctctccystctccaacaggcttgtcagagacatgcacagagtcctataatgaccactaygtatgttctagcatctttgaatcctgctggatcatctggcwcagtggccagagcagcttggagcagagtctatatcttctgtagagccctcatttgttctggattccacttgagaccagcagcctgggaaacttcrttaatgagtcagagcaatattctcaaatgtggaatatgttgtctccaaaatcccaataggcccccaaaacattgtgtctcttttgtagtgataggaaatttatagagagagcaacatgccatatactgtaaaaaagattgtttcaacgtgtggtctagggacactgaatgctttaaaacatcacctatgctgtaggtccctgaatsttctcaggttgrtttcttttcttctggtattttacttccattcatcgttagagtattttactatagttaagaaacttgccacttcctgattattgtaccaagtaatatattattattattattgctattattttgagacagggtctcattctgtccctgaggctggagttcagtggcaggatcacagctcattacagcctcaaccttctgggctcaagtrattcycccacctcygcattgctagcagctgggactgcaggggcacaacatcacgcctggctaatttttgtattttctgtagggctaggatttcacagtgttacccaggctggtctcaaaatcctgggctcaaatgatcttcccgtgtcggcctcctaaaatgatgggattacagtcatgtgccacagggcctggtctgtaatattattaatatattaaataatcacgatgttttaaaaaatgtaaattaaacagaagtgacatagccgtgatataaaacagtgacacagtgttattattatgatacaaggcaaattgttttgatttttcctcataatggktgtagattaagaaccattcagcaaatcacaagcccagtaaaaagtaccagaagctctgctctgcttagtgaagacagcacatcctggaaagcatttgtgagtgttgatttaagtttctggtagtctgyattcattctataacccgtctggttttgatagagkccagataggtttagtgaatcggcttatagaaaggactaccatcccctgtaactttcaagtgttttgtcacggcactgaccagttccattccttagggaatgcggttattatattttatatattttgttgccagtagaggagaatttcagaggcttccctttggtcctgctataataatgtcctttactctacagttcacgaagaatgtgagtcctgccggctgccatacatatctatttcaattatactttcaggaagaggtagtaactacaaactgattagctccaccttggaatggasatgagccgaagctctaggtagtatctgaccttcaaaaactccccctgcaggctggatgtgatggctcatgcctgcagtcctagcactttgggaggcgaaggtgggaggatcccttgagagcaggagttcccttcacaacatgtggaaactccgtctgtacaaaaaatttaaaaaattagctggtgtgttggtgcatgcctatagttccaaatacttgggaagctgaggcaggaggattgcttgagcgcaggagttccaggctgcagtggactatgatcctgccactgtactccagcttgggtaacagagggagactgtgtctcagaagaagaaaaaaaaacaagtataagttctcaccggtatcttaaacatcaagtaaaacagtatcgagtaaaacaaaaaactaaaaactccaaaagtcaaaaacacttttaaaaagaacatggtgttaagagtagtttgttcagtttccccatagaaaatgatttatggaaggagaataaaagattattctgaacactaaaacaataagactgaaaaaatgaattatcaatattgagaatccaatagacagagttaaccagttggatacagtacaagagagaataagtgaattggaagatagctacacagaatgaagcatagaagggaagagatggaaatacacagagctagagggtaacacattgatgctacagacagaacacctaacatacttctggagttctgtaagattagaggagagaaaatagagcaagagaaatgttgcaaggatttttccaaaaggtataaaatgtatccctgaatatatttttagtaatctcaaacttcaggcatgataactaaaaccaaattaacataaaataatacaggacrcaaaagaccaatagaaaatctgaaaagtagctagaggtagaagatagagyatgttgaaaagaactgtattctaaatacaacctgattttaacagaaaacatggaagcaggaattcaatggattaatgggaatcatgtcttcaatgtgtttccaaagagtagtagaccttcataaacagaaattgaaaatgatatttttcagataaaataaaattactgaaaatacaaagttgaacacgcaaggagcattacaaattaatgacaatccatgctggctaacacggtgaaaccccgtctctactaaaaataaaaaawaattagcctggcstggtggcgggcacctgcagtcccagctactccggaggctgaggcaggagaatggctaaacccggaagrcggagctttcagtgagcagagatcgtgccactgcactccagcctgggtgacagggagactatgtctcaaaaaaaaaaaaaaaaattaatgacaatgaaaactaagtgtgtaattctaaataaatkttgactatataaaacaatagtgtcttcktggattgaatgtataattgataagatatatgcaaatagcaataaagaggctggagataaaggtaacaggaataaatttagtcaaactgtgttttgggcttttctatgtctgtgagaagaatttgaacatcataatcaaggaccctgtaattctacamccagatatatatacacagaggaattgtagcaaatgatatgtgaaagaatgttcattgtagcattattcataaaagctcaaaaaataagctgtccaaatatatatcaaataaggatggataaataattacagtaaaatcaaaaaatgaaaaaaatatagagaagtgaaaagawatggatcacatgtacatgcaatgatggggttaaattttggatacaaaatgttgattccaggaagccatgaataagaacatataggattgcacctatacatagatcaaatcaggccaaaccaagctattgagtttagggtcgaataccttattggtaaagtataaagaatattaaaaaaagaccatcataaattagggatgttgcttatcacaggagacatgaagaaaggtgtagggaattagaaagtggcattgaggtaaacttaggctcttagcaatgttccatgtcttgccctacatgatggttacatgagtgtttatgacacattgctatgttttccatttttgttttggttcatttctaagtgtgcagtctagctatatgataaaaattattaattagsagaaatggtccatgaaaattattattactctgctcattatatactgaagggaaaaatcmactatttgtatacattcatgtgtaactctaagagattttaagtagaaactttctgattttagttgcaactttaggaaacttgacatgatgttacctgccaaccacagatttctgaataggtttttcttttaggtttaattacccacttcatatgacaaaacttggacattctctattttttccttcgatcctgaattcctgacacaacaatggtgggcatatttcccacactcctgatttagcagaatacctacatcacttatgtttttctgcaagagaaaactgagttagataattgtgtatcattatgtctttggattacatttttctaacctaggtttggtggatggctctggtgattggagatgggccacgtactgcatcttgccgctagtttggctgatttagggtagataaggcagtggcattctgactccattagtttctctttcttcttctgggaacagtgtgctagccagatgatgtcctcatggttagtggaaaagagcaggaaacttcaatatggaagccatcttaaatctctgtaaattctactaatttcctgttgactgaagcaaattacgtgagtgaattcagagtccaaggtcaaggtagtcaccctgcctgaggtgggagggtactgcaggattatgtgacaaagagtagggtacttagaaatatttacaaaattgctgaacattttaattaaataattaatgtttaaacaaaacagacttgagtgtaaatataccaaaggcctaagcttgagaaacatgtttgataaatattattcattgtctgacagccctgagttggaaaataagactaataccacctggatgagttcctggaaactcattttccatttggggaattataagaaaataattccttccatgccctaagggtgtgagtgcatgtgtgtctatgtgtttaggagcttattaacaatgatgtcatatcaatttattggttatcagaaaccagattttaaagtgtatcagcctcccagggatttccaagataatcttggatgattttgataaaaggtttagaatctggtatttaaatctggcataaaaataagtccatattggtatgatcctagttatgaccaagctcctttaacaatttagacatttactatatgatatatgtattgggttttacaatttccctatggaacaactgaagatgctgtatacaaattatggagaggttaaacaaggaaaaaaattgcaaaacaatgaaaaataatatgcctttctttgcatactaacacatgagaattcattttccactkcaacctcagtataaaaaagtacagcatatagcaaggagagaatstatatgaagaggagtgaatttgagctgttttgagaataatgaccttttctatttctataaagacagttttgaattcatctattagcatatgctggtgcttgcctgttgacactagtcactgaatttaaaggcagaaaatgttattgcacatttagtaatcaagtgttcatcgaagttaacatctggatgttaaaggactcagaacaagtgttactaagcctgcatttttttatctgttcaaacatgatgtgttttctgctcatcatttcatcaattctggtagtgtttgcatttgttcttggaaatgttgccaatggcttcatagcyctagtaaatgtcattgactgggttaacacacgaaagatctcctcagctgagcaaattctcactgctctggtggtctccagaattggtttactctgggtcatgttattcctttggtatgcaactgtgtttaattctgctttatatggtttagaagtaagaattgttgcttctaatgcctgggctgtaacgaaccatttcagcatgtggcttgctgctagcctcagcatattttrtttgctcaagattgccaatttctccaaccttatttctctccacctaaagaagagaattmagagtgttgttctggtgatactgttggggcccttggtatttytgatttgtaatcttgctgtgataaccatggatgagagagtgtggacaaaagaatatgaaggaaatgtgacttggaagatcaaattgaggaatgcaatacacctttcaagcttgactgtaactactctagcaaacctcataccctttactctgagcctaatatgttttctgctgttaatctgttctctttgtaaacatctcaagaagatgcggctccatagcaaaggatctcaagatcccagcaccaaggtccatataaaagctttgcaaactgtgacctccttcctcatgttatttgccatttactttctgtgtataatcacatcaacttggaatcttaggacacagcagagcaaacttgtactcctgctttgccaaactgttgcaatcatgtatccttcattccactcattcatcctgattatgggaagtaggaagctaaaacagacctttctttcagttttgtggcagatgacaygctgagtgaaagaagagaaaccctcaactccatagattcacaaggggagcatcgtgggtcttctagcagaaaacaaactgatggtgtctggaacattttatatttctatcagtttttccatagtgtttgtatgtgagtaatttcaaaacagatacctagaaaagtcatatatatatttatgggtgtatatgtgtgcatgtgtgtgaataacaacgttgaccataaattatgaagctgagtatatttcacatatatagtatttatattttattatagttcattgtatagtatttcatttgaagaatttattatctctctttataattaagaacgtacagcttttatgaagaaatcatttctcttttccattgtaatttgtaccacatatatgtgcttaactatcattggtgaacctctaattttttggatggtaaagacattcaattttaaatcaatgataagaatggatctttggggtaggttttatttcattatgaattcttattttatgcttagtagaaagcaaatagaattgttgttagttaatgatgcacacaataaaattggagtgaaaaacatatgtagagtaaattttgtatatgtataccaaaacagtactaaagaatactagatttaataccagtatgtgaatagcctagaataaaaatcatttctataataggaatgaagaaacatgctgatgatcatttcagtgctgttataatttttttatctgtagttagaaaagtcattgcttccactttttgaattaaaggaaaccttttktgaagttgacatctgatgtcaagtatttccatttrtttttcttagccaccttgagcccctgaatttccaattttctcctttgtctcccattcctaatattcctcaaaaaaactcaaatattctctatcttaaaaaaacaggccaatcaaaggagggtatagaaactatagaagataatcaaatgaaactttcctcaaatgttaaaaattatgtaaaaattacataaaaatctgtgaaatctatataattgataggaaatgtattaatgatatgtattattataatggtgtaaatggtgaaattacacagtgtgttgatgtatccattgataccaagttctattataagaaggaaatgtacagccttgttgaagagctaaattctgtgtgactgtgttaattcttggtgttatgaaattttaacattattatgtagaacttaaaataagttaactccacatcatatatatatctatgtatctatatctatatctatagacatatatayatatatatatatawctmtygcttatcatacgtcctccctagtacaatgtaatcaccataaaaagagaggtcatatctgtctcgctttctcttgactcacaggacctaaaagccagcacaaagaatagttggtcaaaaatgatatgttaatgaacacataagtgattggataaatggataatttgatgtggtaaatcagtgaaaatgaagctcatcataaaatctgcagttgcttgaattttctattttcaggttgaggttataggctttttgaagaagaagcatttctcagagcaaaagtttggctagtccacaattctaggggaaatatcactgtaatatagctttgatgcagctatatcaggtgtgtgaagtagagacaaggtggaacgtcaaaattagatggcacttattctaatgctttttgaaaagcatattaaagattttggtatatttgcacagggtcagggtcacctgtgagtgccagctgctcggggctagcagaccccatgacaagaatgttagggaacttcccagcagctkccaaacacacttttgtttttagggaacgtctctttctccttcagtatgacttatgctgccttcaatgctttgctgatacaaaagaagtaaactcaaaagaagtaaaaataaaagctagcaaactttgcaactgattaagttggttggaaatgtacctaatcactttctactatgaatgatatatttgtattatgatattttctagctggttatcatatacacaaaaaggcatttcatttttaaaaattgagtttgtaaccagtcacctttcttacacattatttgtatatttttttagtatcctttctaaatgaatgttttaattgccatgttayaaacrcatggaaaagtgatgcaactgaatgtatatcttagctttkggtgtctaaaactagagccaatgtctgagtttacagtgatgacatttatttgggarggcaagtccagggcagcaatgaggggtaaatgtggaaactgaggcaaaagaagatgtaaaaccatgtgtcgtgatgttgatatgattttgctggtggccacttcacaattagtgagacagacagcatggtggtcatcagatgcatgcacttggctcyccatacttttccagaagggttacaaggggaagccacaacaaatattagtccgtggaagagagaaaagggagaatgtatcctagctgtcttctgtcttctatttccctttggccaaagtttgtttgaggcagaactaccatctttgcttttcttccttacattatccaaccccttggtggctgtttgggaaagtcacactaaccaatacccccatttttctaagagatagtttttttttaatttattttttctcttttcctctcccctttccctatgtttcccygctttctacttaactttttagacatgcacatagaactgtttactttccccccaccagacagtcccttcgggcgagttcatctaactatgtgctccacgagggatctctccttgagacttgacagttgatttgcagacaaaagtatgccctcatggaactctcacctccaggggttccccttagacctcacatccattaggaggggatgtggaaaggatgcccacgtggccacttttacaactgctgtcctgctcatttccttccctactttataaaacgttcactttctgctccaaagatgaagtgtcacgttggaaggcaggatgctttgtgccccttccagcaagctaacttccaaataaattctctatttttatatcagaccttgttcttgttaattagactttacatgaagtgagcaactaagcttttctgttacaagacttcatgcccacagatacattcaagtcccaggtggaaggatgatctrgatyaggcaaggtgctgaccatgggaacaggagacagtcaagggaatctgaggaagcacatgtttgtgtccaatatagtcccctccttgtgccactcagatgtgctcatgccctccaactgtggctggttttataagcagatgccttgtgtagttgcacggggtcttgtgcttgaggggctttttgcttggattaatgttctgcacttgcatttttatttttcagacagcggatamtcctccactgaagagggaatagttctgcagtaattccctaggggtttgctttctcctctcctacgggcttgatggagacaggcacagagtcctrtgatgcccacgttgcatgcctctagcagctttgaattctgctggatcatctggcacaatgggccgagcaggttgggccagaccctgtatctgctgtagagatattatatgttctggattccacttgaaaccaggagtctttgcattcattctgtaacccatctggttttggcagaggctaggtaggttaactgaacagggatttaaaaaggactttattaacacatcagagcaatatcctctactgtggtatttttggactccaaaatccctagaggctcaataaacgccgtgcttctcttttagtgataggaagtatataggaagccatttaccttaaacaggatgtttctgctcggcatggtggttcacgcctgtaataccagcactttgggagaccaacgcaggcagatcactggaggccaggagtttgagactagcctgagcaacatggtgaaaccccatctctacttaaaaaaaaatacaaaaaaakttagccaggcatggtggccaatgcccgtaaacccagctactcaggaggctgaaggatttgaattgattgaacccaggaggcgaagtttgcagtgagccrggattgcaacactgcattccggcctgggcaacagagcgagactctatctcaaatataaatwaatwaattaattaattgatttttcaacatgtggaccaggaatatgggayccctgaaaacaatatctgcgttggtgttctctaaatattttcaggcatgtctctttcttctgatattttatttctatttaatgtttaagtattttactataattaggtaactttccatttcctggttattgtaccaattaccgtaacrttattaatatattaaattaacatgatgttttccaaaatgtaaattaaactgagagcagaagtgacaaagccctgacataaaacagtgaagcagtgctcttgtttttaccacacaaaggccaattgttttaatctgctgacccacccatgggtgtaaaataagaaacattcactaaatcaagagccacatgcaaactgccaggagctctgctctgctcagggaagataccacatcctagagagcatttgtaagtagtgatttaaatttatggaaatctgcattcattttatagtgtatctggttttggtagaggccagataggttaagtggataggcatataaaaagactaccatcccctgcaactttcaagtgttttgtcatggtagtgatcaattccattccttggagaatgtgattattatttttcaatcattgttgccagtggaggagaatttcacaggcttccccttggttctgctctaataatgtccctgactctacaggtcaggaagaaagtgagagtcctgccagctgccatgtgtgtccattacacattcaagaagaggcaataacggcaaactgattagatccaccttggkatggacatgagtcaaaactctaggtagcatctgaccttcaaaactccctctgcaggctgggtatgatggctcatgcccgcagtccccgcacttttggaggcggaggtggraatatctcttgaggcccagagttgcagaccaccttgggctacacagtgacagcctgtctgtacaaaaactaaaaaacagaaaaaacaacaacaaaaaattagtttggcatggtggtactcacctgtagtcccagttacccagaaagatgagacaggagactcctttggacctataaccaatatgcgagtccgttgctggccgcatgcagtgtccagttaacaaaagtgaggtctggtacaaaagtaatgaatttattccaaacctagcttggggaaggagcacaaagtgtcttgcctttaagtgtaccacttcacctttggagcagaaagcagacacttttataaggtaaggagggatactgagcaagggtagagggtcctcatgcaggcttggtgccttatctatcagacagttgaattggtgccttcctgtgcagaagtaacttgtaaaagtggccaagtgggtatgctttcaatatgcccttctgttgggtgaaagtcctcaggcaactcccagagtggagcacagtctggaagttccaagtccatttcctggaggtaaacattccttggtgggtgtgctttggtctgcaaattgactgtcaattctcagaagagatctgtcttgctgcacatagttagaagaacgtgccctgcagggaatgtctagtgagtgggggtgaaaggttatatttgcatttatgaagggctaagcaggaaacagggaacaaaaggaaaggggagataagagaaaataataataaaaaaatagtaactcattccctgtttcttagaaaaaatggggcactctgttacaaacccaggaattcaaggctgtagtgagttatgatttgccactgtactacatacctcctaagtgaaggattgagactgtgtatctaaaaaacccaaatgcaaataacacacacacaaaaagaaaattttaaaaaatctcccacttcatctcatggactgcagtgtcttttgagtacccagatattactgttagttcaggctctgttggagtggccaatatctggtttactggaggcaatttggtacgagtctgcagcaacttcaagtctaacctcctcagaagaaagaattcaactgaggggcataaggcggaaaaagagactgagggaagtttctgagcagcaatggaagtttattaaaaagatttagagcaggaaagaaaggaaagtacacttggaagagaccacagtgggcattttggaggtcaagtgcagtgttagacctttgacttgtggttttatatgttggtatacttctggggtcttgtgttccttttcccacgattcttcccttagggtcttgtgttccttttcccatgattcagccccttagggtgggctgctcacatgtgtggtggcctgctaacactttggaggtgagcatgygcagtgtgtttactggagttgtacacatgcttgcatgaggcattcttcccttttttggtggaatgcccccagaaggttgttttctaccsttttctctcttaacacgtatgcctcagcctactcgccctmttcctgagctgctgactagcaattttaagcatctttacttattgtgaaattgcctctccctggtgcctgtgagcaattatcatttttagagaggcagtgtgacaactgccaggccatcacctgatggccacctgacattcctggtgggtggtgagagccttcttctgccccgctcatgcctgactaactatctactgtaagagccctatacctaaaagtctcagatggtgtggatgtgtgtcctttcctctgggtactgttatctgggaaatggctacaggtctttgagaaagcaccgtatgaatacgtcctgaatattcttgtggtgaattttcagcatccttttcaaggggacttacactttccttcaattattgaattcttgttctcggaattggctcagtcctkacaacaggttgaggttctttgattttccacttcaaaggctgacctcaggaatcagtttttcagcctttgaagtgaaaaggcttgctcttggtttataagtatttttcaaagtatgaagcctctttaactattggcttatgaactcattccaagaagctgatgctgtcatcagttcattgattctgacatttgcaagatcaccagagagtctatgttcccaaggttagtcatcatgttgcatgctctattagctgcatygaacttagtttatttagatttcaggatgctgccctctcctgattttatccttatccactgggcactacttctcaatctcctttgctagttctcttttgtctctaaactgaaaatatcagactgcccaaggtctcaattcttcaatctctacaatgatgcctgttgtgttggtgatctcatgtaatctctttactgacaatgtagccaagtgattcaacagacaggaataaggmtgattatccatttatattatttatttattcacgcatgttggcatatagcacattatgtaaatatttttccttcaaatgtcaaatgtacattttgaagtaacagtaccagggtggatgctgtggcttaagcctgtaattgagcaccttgggaggcttrggcrggcagatttcttgagcccaattattggagaccaacctrggaaacatggtgaaacccagtctctagtaaaaatacaacaattagccaggtatagtggtgtccacctgtagtyctagctacttgggaggccaaggtgggaaacagattgaggctgggagctatagattgcagttagccaatctcaaaccactgcactccagtttaggctccagagtgagaccatgtctcaaaaaataaaaatctagggagaatcaataatatttttgcttgaatttccactaaatgagattgagggtagcccagcatctaatttagttttatttaaaatagtaattttaatatcaatagattgataggcaggggattattattattatagacataatgatctaagtagagaaatacacagatagaattatggttgattaacccacttgtattacttgcaattgtacagttagtatgttttagtatcttagttactaatctcactttttacatttagctctataatcaattaaatatgagttattttttgtgtatggtgtgaaataagaatagaaatttatctttatgcatgtggatattcartgttctcrgtatcatttgttgaaaaaatgattaattcctattgaactgcartggtaccatttttgaaatcaattaccatcaatgtcagtgttaatttctggactctcagttgtgtttcattgttcttttgtctactgtaatgccagtaccacagaatyctgattagtgcagctttgtagttagctttgaaaccagaaagtgtaatcctccaaatgtgttattttatcaagatttattttggtgatctggtcactgggtattttcagatatattttaggactggtttttcactttttgcaaaacaggcttgttgggatttgatagggattgcactgagtatrtaagttgacccttcacctgcaaagactctccttgtgctggatttcagttcagctggccctccttgcttgtacaactctgtgatgaattgaatatataattttkgccttttattactcttatcctagttgttgcagaaggatatcttgcctttctgaaccttctgtattctgctcaaaaatggaagttctcagctagrtgcagttcacgcctgtatccaagcattttgggagaccaaggtgggaagatcrtatgagcccatgttttcaagaccatactgggcaacatagggagaccccatttctacaaaaaaactgaaaaattagctggctgtgttggtgcacrcccatagtcacagctactccagaagctgaggtgggaggatctcttgagcccaggagtacaaagctgwagtgaactaccactgcactccagcctaggcgacagagcaacatcctttctcaaaacaaaaaaggaaaagtggaagttttcactggtatcttttaagtatcaagtaacacagaatcraaagaataactaataatcctcggttcctgcctgcactgaacatgtaaaattgaaagcagttatacatatactatactagcacctcataaggactacccagagtattattatcatctgcgttttatacataattatactgaggtagagagaattcgtaaaatggagtctcagatcatagctatataaagcagaaaatctggcttcctgtcctggcagactgactccaagatcttctcctagaaacaattatactataacaactggaaagaaataatatccaatattgaagaccgatttttaacatctattcatcttaaaccattaaataataaaaaatacattagagaraaataaaagtgaaaattyacatacagagaagtgtaggctcttcaatggaatacacatgttttttaagtgcccaaggaatatttacaaaattgctaaatattttrattaaacaattcatatttaaatattaactagactcaagaaaatgacttactcaaaagcctaagcatgagacacaagtttataaatattgaaaatgggctgaaaacatgattgggaaattagggctatttcaacktggatgacctrcctgaaattcattttccattttggaaattacaggacamtaattcctcccatccatgaggagcatgtatgtgtgtgggcacataagtttgtgttaatgagcttgttaagaataaagttatacaaaagtattagttagcagcaaccagattttaaggaatgttggccttcctgggcttcccaagaaaaccttgragtcttttaataagaaaactttggattctgtctacataaatctgacattgaaaaaataaattcacagtggtcatgattctggttatgaccaagttccatatgacagtttagacatccaatgtaggaattaygwgttgggttttaaaatttccataacaactgacattgctgaacacaaattatggagaggttaaacaaggaaaaatattgcaaaacaatgaaggaraatatgtctgtatttgcatgctagcaaatgagaattcacctttcacttcaacaacagcatgaaaaatttcatcttatagccaggacatagtgtttgaatagaaatttaattgagctgttttgggaattattgtgttctccataaagacagcctcaractcatccattagcacaccctggtgctttcctgtttgacactggtcagagaaygtaaaaggaaaaagaacattactgcacattcagaaatcaggtgcacatagaatttaaggtcaggaccttacagagaatcttgtccagtgataatasgcctgccttaaaaaaattcagacatggtaggtttattaccaatctttttttgtgctagtaatggtagaatttattttttcctgtggacacctacgttaaacttatagactacttttacattttaacatttttttcctttgagttcttttaggagttgttaaacaatcctgaaatttcccttacaatatgctacaaactaatcataatttctcaaattcatttgacataatgattgattaaagaaatatgtgtagtataattacacctgctcataacaagagtatttgaaacttcaagaaaaaatagagaaattaataaagaaatatgaataaatatatggaatatataattcattcttaataaatgtgcatgaaatcagtcatgtaattaaaaagcaacataattttttgaactaaaaatacattctgaattataatagaaaaatgtttctaaaatgttaactttaataatagtgtatgtaaatatcagtgtaaaatttaatctgatgttactaattttggaaaggatatgacacaatagaaattttcatacactactcttaggattataaagtacaattactttggctgaatatggcattacctgattaaggcgaagtattttttattgtaccacactttagaatgtggtaaaatraaacaatatcaagtaaatcattgggaatrtgttggttttaagttattcttgatgaaatattacctgagggtgtttgtctagrcctgatactgagaataatataagaattataaggccatgaagaaaarttaaaatagtgttctcccatygccctgaattccagcacttaggaaacatgattgaagtcacatttacagaataaaatagtcccttttagctgacatcaacatcatcatcaatcatctacacctatctcattaaatgatttatttttcattgtacatgattttgataatgtctaagacatttttaaaagattatcattttgggaaatttgcattagtaaaagyaaagytcaagtcaagctgaatacatttagatttagaaattaagtgaagtttagtttaaaatgcattgcttaagcaagtaattgtagatgaccttaaactaatccattgaakgctataagaaagagtttgattttagtgtaaataaaattccttaattagaaaggcaattaaactgtttcatgatcaagctcttattcctaaagagaggattttagattaaataaatcaaacagaagtaagccctcacatcttctctrtctcgcttgggtaatgatggagttcaaagtcacagagccccatttctacaacataaacaaagtaaaaattagttcataaaatagaatgatktagttgtggtttagggactattttttatttattggaattgcattttgagatccaaagctgcttattgaatttccatatgaggagagtttgtgtgaggacccagcaacagacaagctgttttccagaaaaagctactcacatcaaattaatatccrgtttctttaaaattgcaggaacatggctagaccaagcttttattctattatctgaccagagttgggaatagaagaaaattgttactattttcatggctagagtactaacaactccagaaaaatacaaggctggagggtragagacaytgacgctayggtcagaatatctaacatacttctggagttctggaggattagagatgagaaatggggcaaaagcaatgtttgggaaatttttccaaaaatgatgaaatgtatatatttccatctctatatatttaggagccatcaaattttggacaagataactaaaaaatttaaaataaaatgacacaggayatcaaagaccaatagaaaatctgaaaagtagctagaggtgaaaggtagattatgttaaaaagagccacattctaaataacaaactgattttcaacagaaaatatgaaagcgggaattcaatggaatcatatcttcagtgtgtttccaaggaacagtagacttttatagacagaaattaaaaatgatattttttcagataaaatataaactaccaaaaatacaaaattgagcatgcaagaaggaataaaaattaatgaaaatgataaatatgtacataattataagtgaatgtttaccatctaaaataatagtatcttcttgttggactaaaggtgtaattgataagatatatgcaaatagtaataaagagactggagttacagaaataaatttagttaaagtattttttggacttttctatgtctgtgggcagaatttgtacatcttaatcaaggaccctataattctatacctaggcatatatgcaaaggaattgtagcaaatgtatatgaaagaatgctcatagtagcattattcataatagttcataaaagaagctgtcyaartatatatcaactaaggatagataattatagtaaattcayaaaattaaacaatatagagaaatgaaaagaaataaatcacatgtacatgcatctgtctgattaaatttcagattcataatgttaagtccaggaagccatgaataagaacatataggattgcacctatacacagttcaaagcaggccaaaccaagctattgagtttagggttgcataccttgttgataaagtataaagaaaatcaaggaaatgatcatcacaaataatggatattgcttacctcaggagatatgaagaaaggtatagaggcttggaaagtgtcatggaggtggaactaggctgtttgcagtgttccttgtcttgccctacatgatggttactcgactgtttatgatacattgctctatttcccagttttccagttttgttttggcacatttctatgtatgcattataattttaatataaaaattttgaattaggagaaatgtctcatagaaattattaatcttctcattacgtactaaggggaaaagaaactayttatatgcattcttatacaactctagagagttgaagtagaaactttcttattttagttacaacttgtagaaatttgacatcatgtcacctgccaaccccrtatttttccgtagctttatttcagtttttttctttcagctttaattatgcacctcacatgacaaaactttgatattcctcatctatttttcccttggcttcaggattcttgacacaacaagggtagacatatttcccactctcttggcttagcaaagtatttctatcatttagcatcattttaaaaagaaacttctccaaaactacattagatatttatatctcacatgtctttagattccattttcctaagctgggtttgggtggatcactctggtaatwtgagatgggccatgttctgcatcttgaagttagagtttggccaatttaggctacatctggagggggkgatctcattctcattctgcttctgggaatggtgtactagtgtggggatgtgcttgtggtaaatggagaagagcaagaaactccaatgtggaagccatctcaaagacgtatacaaaatttactaatttccagttcatcaaagcaaattacatgagtgagctcagattccaaggtcaaggtagtcaccctgcctatggcaggaggacactgcaagataatatatcaaaggatgagggagtcaagagtatttacaaaacagctgaatagtttaattaaataattaatatttaaacattaaatagacttgagagtaactttaccaaaggcctaagcatgagaaatatgtttgataaatattattctggtctgaaaaccctgagtgggaaaacagaactaattccacctggatgaccttctggaaactcattttttcatttttttaaattaaaagaaaataattccttccaaccccaatgggtttaagtgtgtgtttttgtgtttatgagcttgttaacaataaagtcatataaaagtattggttagcagcaacctgattttaaggcgtattggccttcttgtggttcccaagaaaaccttggatgattttgataaaaggtttgggttctgtatatttaaatctagcattaaaaaataaatccatatttatacgatcctaggtatgaccaagctcttttaacartttagacatttactgtatgacatatgtattgggttttaaaatttccctatgaaacaactgaaaatgctgaatacaaattatggagaggttaaacaaggaaaaacattgcaaaacaatgaaaaagaatatgtctttttttgcatactagcaaacgggaattcrcctttcacttcaacatcasttttaaaaatttcagcgtatagcaagaacagacagtggaataggattcaatttcagctattttgggaataagaaaattttccataaatgcagcattgaactcatccattagcatatgctggtgcttttctgttgacattagtcaaataatttagaagcacaaagaatattattacacatttaggaatgaagtgtatatccaatttaaggtctagatattaaaggaatcacaatctgtgttattaggcctgcatttttcctttctttttgtctcttcagacatgttaaaatttctacttatcattttgtcaactctgtgtgtttgcattcgttcttggaaatttgtctccacaaaaatgttaaaattagcaggcttgstggtgcatgcctgtagttccagttacttggcaagctgaggcaggaaggcaagagtatcacttgtgtccaggagttcaagactacrgcgaggtatgattgtgccactgcactccagcttgggtgagagagcaagagcctgtctcagaaaaaaaaaaaaaaaaaaagaaaaggagaaaagaaatggaagttttcactggcaccttctaaatatctagtaacacaggatcaaatcagtaactaaccatctttgttttttcctgtcccagacaggtaaaatggaaagcagttatacaaatgctatactaactcctcacaaagactacccaaagataatattatcatctgtgttttttggtgatcatactgaggcagagagcagttgtgaaatggagtctcagaatcgtcgstatatgaagcagaaaaactggtttcctctcttggcagtctgactccaagatctcttagaaacaattatactgtaaaaacctgaaaaagaagtaaaaaacaagattggagactaatactaacatctattcttcttaatagcataatcaaaaataaattaaacagaaaaataaaagtgaatattcataccaagggaagtctagagtcttcagtggaaaatacatattttttaataagtgcccaaggaatattttaaaaattgctgaatattttaattaaacaattcatatttaaatattagctagattcgagagaataacttattcaaaagcttaagcaygagagataagtttataaatattgaaaattgactgaaaagggtgagagggaaaatagggctatttcaacctggacgacttgcctgaaattgrttttccattttggaaattacagcacaataattcctcccatccatgaggggcgtgtatgcatgtgtgtgtttgtgttaatgagcttgttaacaatagacttatacaaacatattagcagcaagcagattttaaagagtattggcctttttgcactttccaagaaaaccttggattcttttgataagaaaactttggattctgtttacataaatctgacatttaaaaaatcaatccacagtggtcatgattctagttacaacaaagttccttttaacaatttagatatccaatgtaggaactatgtgttgctttttaaaatttccctaacaactgacattgctgaacacaaattatggagaggttaaacaaggaaaagtactacaaaacaaggaaacagaatatgtctttatttgcatgctagcaaatgagaactcatttttcacttcaacatcagtatgaaaaatttcatcttatagccaggacatagtgtttgaatagaagttaatttgaactgttttagaaattatcatgttttccataaagacagcattgaattcattcattagcatgccctggtgctttcctgtttgacactggtcagagaatttaaaaagaacaagagcgttaatgcacattcagaaatcaggtgcacatagaatttaatgtcaggaccttaaagggaatcttatccaatgatattaggcctgccttaaaaagaattcagacatgatatgttgataccaatcatgttttccatactggtaatggtagaatttgtgttttaccatggacagctattattaaacttatagactatttttatattttaatattttttctttgtttccttttaggagttgttaaacaatcctgaaatttcccctacaatatgccatgaactaatcatattttctcaaagtcatttgacgtaatgattgattaaaggaaatatctccagtataattacacttgttcataacaaaaaagtatttgaaacttcaagaaaaaattagaaaaattaataatgaaatatgaacaaataaatgtatgaaatatataattaatccctaataaatgtgcatgaaattatagtcatagaattaagagtgatgtaatttttcaactaaagatgcattctgaattataatagaaaaaggtttgtaaaatgttaagtttaayaatattttatttatttttgagacagtctcacttcgtggtctaggttggagtgcagtggtgtgatctcagctcaccgcaacctccgcctccgggttcactcaattctcctgcctcagcctcctgaatagctgggattacaggtgtgcatcaccacaccaggctaatttttgtatttttagtattttttgtattttagtattttttcaccatcttggccaggctggccttgaactccatacctgaggttattcacccaccttggcttcccaaagtgctgggattacaggcgtgagccaccgtgcctggccaagtttaattatattttatataaatatgaaagtgcaaaaattactctactaattttggagagcatatgaagcagtgggaattttcatacactgctcctaggattataaatyagtgcaattactttgtctgagtgtgacattatttgaataagatgaaggatcacatcctaagacccaggatttgcwctcatatcagaatacatatacaagtatatatcgctgagttttaatagctaaagttgagaagtctcccaaatgaccatcagtaataaaatggataaataaattatgacatacttacagaatgctatacagcaatcaaaatgaacaaactagagggacatgtttacaaagaatatatatgaaaaggaaagtgaataaatttgatttacatggatagcatagtaatatatacagatataatagtaattattaacatcaaaaacattcaatataatcacatttatatgaaatttgcaagaatatttttgtatttttgcaaataaattcttataattgcttataaaagaaattataaattcttataactccttaccaaagaaattataacattttataaaagaaattataacttctcataaaagraattttattttaagtttttataattcttataatttgaaataaattcttataatttattacattggtggcaaaactgtaaagcraaacatataagtgattatcataactgggatacttgggagggaggaaacaaaagggaaatcatatcaacaagaaagcmtatatggggaatgtcttcattgctggcaaattctactttttgacgaaagtgtggaatatgagtgttaatgttacattcttttttccttttactgtgcatttaggttttattgctttccctacatatgttaggttcccgaataatgaaaatattttaaaagcagaaatattaagtaaattaatgaatataaaactaggctgaaacaatatattcttacatgtaccatcgtaattagagttttgctgaataaagaatacagcattatagtagtaagaaatagggataaaattttatacttttaaaaattaatttaaaaaagaaagatataagcaggaagtgtacatccacattcttaatgctaatcttaatttgaaacaatagattttgaacaactatattgcaatagacttttttcttgtttccaatttaattattcatgatacacgtttcaaattggcagcaattagggaatttttcataaggtacaaatattaaagtatgtaggactatagatattaagtgtataggacaatttttgctacatttatccctaaatgaaataattatactcatgttgttcccattcaaagatcacaatactatgcatgtgcacagcatatgtgttggggaaaatattttgttactataaatttttcaactgtattagagaagaaaacatagaaagataactgttaagctataaaacatatttagtgtaatctttgagtgtgcttgtgtatatgtagtattactttgactgctatagtaaaataacccagatttagtgacagtagctgagattgtaaataagcagttgagagaattttgcctgctaatgatactattaaaagataaaatacagtttgtatgctatataattgtatagaggatttgtatatatgaagttcatatgaaagtacagtgaaaattaaacagcccaaaggagaatactctttgttgtagggcacttttgtcatgattttcagaatgtggtaaaagaaaaaaaaatagccagtaaatcattggaaatacattggttttaacttattcttaatgaaatactgtctgaggatctttgtctgtgcctgatgctgaraataatataagaaacaagttcatgagcccatcaccctgaaacgyagcacttagaaaacatgattgaagtcacatttatagaagagcatggccccttttaactgacattatcatcatcaccaatcatcatctatatctatctcattaaatgatttatttttgaaatgtttacataaataatttggataatgtctaataaatgtttaaaagattattattatgggaaagttagattagaaaatggaaaatttcaagttgaaccaaatacatttttaagtatagtttagtttaaaatacattgcttaagcaaatcattatagataaccttaaactgatcttaggaacactataggaaagatttagttgcggtgttaataaaattccttaattagaaagataaataagccacttcatgatcaagctcttacttctaaagtgaaggttttattttatttattttttaacctttccacattttattgacaaagaattaatagtataaattacgtttatattgcaaagtttatttatggaaatttgatacgtgtacttctactcctttttacaccttacatgaatatttaaataattgatttataacactccctgatgccaggtaaagtaaagcctaatcgcagttcagaaactcacatgtacaacaaatttaactttctggatatttttaaaactcagcttaatttccctaggtgctccrttaacctgatggcagaaattaaatcttaagcaactctgggttctcccacaagcacactttgcttcagagttgtgytgaagttttgaggaggatgggaggaggcaaggaggtgtccagtcctttgtgcatctatcccctggcattctcccatcctgccccaagtcatcagcccacacaggttgctggcacatytaaagtgagaattttaggactaaataaatcaaatagaagtaagccctcacatcttctatatctcacctgatagtgaagaagtttgaaggtacagagctccacttctgctaataaaaaaagagtaaaatttaatttgtaaaatagaatggtgtagctagggttgaggtgctataatttatttattggaatggcatcttgagatccagcacagctcattgaatttccctgtggggagagtttgtggtgaagrctcatcaacagacaagctgctatccccmccyaaaaaaaaaarctactaacatcacatcaatttccaggttcttccaacttgcggaaggatgtgtagaccaagcttttattctattttgtgaccaaagtcttgggaaaagaagaaaattgttagcattttcatgtcaagcatacgaaaaacaaaaaaacaaagccaaccaactgaacaaagaacccaactttttttaaaaaacttggtgrtaagagtrctttgttctgcttctccatagataatgatttatagaaggagaacaaaatataatttctgctactaaaacaataatagcaaaaaataaataatcaatattgagaatccaatagacagagttaacaaccagttagacatagaagagagaattagtgaattggaagacaactataaagaaagaagcctaaagagaccacaagacaaagaatgccaagctaagaggataagaggcattgatgctacaatcagagcatctaacatacttctggatttctggaagattaaaagggataaaatagggcagaatcaatgttgtggagattttcccaaaagtgataaaakgtattaatccatatatttttagtaaccatcaaaggtcagacaagataactaaaaacaaattaacataaaatgtcacaagacatcaaagaccagtagaaaatctgaaaagtagccagaggaaaagatagattattttaaaaggaacaactttctaaatgacaacctgattttcaacagaaaaatggaaagtagaattcaatggaatcatgtctttagtgtgtttcaaaagaatagaggaccttcataaacagaaatccaaatgatatttttcagataaaaaatattgaaaatacaaggttaagcatgcaagaaggaataaaaattaacagaaatgataaatatgtgcataattctaaatgaatgttgactgaataaaataatagcgtcttgctgagttaaatatattattgataagatatatgcaaatagcrataaagagactggaggtaaaggtgacaggaacaaatttagataaattattttttgcacttttctatgtctgtgaggataatttgaacaccacatttaatgaccccataataggaattgcatcaaatgatatgtgaaataatgctgatagtagtattattcataatagctcaaaaatagactgcccaaatatatattaactaaggatgattgaatgatatgaaagattacagtaaatccatacagtggaacagtatatagaggtgaaaagaaatgaatcacatgtacatgcaactatgtaactaaatttcagaaacatgatatctagtgcaagaagccatgaacaagaagaacacacaggactgcacctatacacagttcaaagcaggacagaccaagctgtggagtttagggttgtgaacctagytggtaaagtataaagaaattcaagcaaatgatcatcatagattatgaatattgcttatctcaggagatgtgaataaaggtttaggggcttggaaagtggcctggaagtggacctagtctgtttgcagtgttccatgtcttatcctgcatratggttacataagtgtttatgatacattgctcttacctatttttgttttggcccatttctaagtgtgcattataattttatttaaaaaattacaaattgggagaaatgtcacgtaaaaattattaattgctctgctcattatatacctagggggaaaatccaccatttacrtacattcttatacaactcaagagagctaaagtgaattcttattttagttgcaaaatggagaaatttgagatgctgttacctacagcctccagatctttccaaaagttttcttctagttttagatattcacctcatattacaaaaactttgatatttccaacctatttttcctttggctcctgaatttctgacacaacaagggygcacatatttctcaaactcttggattagcagagtacctatatcacttagctttttctgcaaaagaaacttctccaaaaccacattagatatttatatctcacatgtttttggattctgttttcttaagctggggtttggtggatggctctggtgatttgagatggtccaagttttgcctcttggatctagttagagtttggccgatttaaggctggatcaggcaggrgccatatgattccatgagttactcattcttattctgggaacagtgtgttagtgtggacatgttctcattataaaccggaaaggaacaagaaagcctaatgtggaggtcatctcaaatttcgatgtaaagtgtagtaattttctgttcatcaaagcaaattacatgatcgaactcagagccctagtgcaaggttgtcactatgcctgtggtgggaggacactgcaaaattatgtgacaaaggtctggtactcaggaatgtttacaagcttgcaggtagcattaccaaaagcctaagcatgagagatatgtttcatgaatattattcattggctgaaaatctggcatgggaaaaataggactaattccaccaggacgagctcctggawactcattttccatgtcataagttacaagaaagcaattccttycatccttgaagagtgaaagtgtgtgtgtgtctgtgtgtgtgtttatgagcttgttaatagtgatgccatatagaagtattggttaacagcaaccaaattataaggagtattggctttcctgtggtttccaagaaaatcttrggtgattttgataaaaagtttagattytgtgtatttaaatctggctttaaaaataaatccrtagtgattttgatcctagatttcaccaggctcttttaacaatatattttttgtgtcatctatgtactgggtattaaaatttcccyaacaactgaagggctgaacacaaattatggaaaggtgaaacaaggaaaaaattgcaaagcaatgaaagaggatatgtctttatttgaatgctagcaaatgagaattcagctttcccttcaacatcagtatgaaaaatttcagcctatagcaagaatagagactttatgaataagaattaatttgagttgttttgggactaacagtatttcccataaaggcagcattgaactcattcattagtttaagctggtgcttttctgttgacattgttcacagaatttaaaagtataaagaatgttattgracattcaggaatcaagtgcatatttaayttaaagtcttgaatatcagaggagtcaccatcagtgacattaggcctgaattttttacttgcttttttgtttagacatgatgagttttctacacattgttttttccattctagtagtggttgcatttattcttggaaattttgccaatggctttatagcactgataaatttcattgcctgggtcaagagacaaaagatctcctcagctgatcaaattattgctgctctggcrgtctccagagttggtttgctctgggtaatattattacattggtattcaactgtgttgaatccaacttcatctaatttaraagtaataatttttatttctaatgcytgggcagtaaccaatcatttcagcatctggcttgctactagcctcagcatattttatttgctcaagatcgtcaatttctccagacttatttttcatcacttaaaaaggaaggctaagagtgtagttctggtgatagtgttggggtctttgttctttttggtttgtcamcttgtgatgaaamacacgtatataaatgtgtggacagaagaatgtgaaggaaacgtaacttggaagatcaaactgaggaatgcaatgcacctttccaacttgactgtagccatgctagcaaacttgataccattcactctgaccctgatatcttttctgctgttaatctactctctgtgtaaacatctgaagaagatgcagctccatggcaaaggatctcaagatcccagcaccaagatccacataaaagctctgcaaactgtgacctccttcctcrtattacttgccatttactttctgtgtctaatcatatcgttttggaattytaagatgckaccaaaagaaattgtcttaatgctttgccaagcttttggaatcatatatccatcattccactcattcattctgatttgggggaacaagacgctaaagcagacctttctttcagttttgtggcaggtgacttgctgggcaaaaggacagaaccagtcaactccatagattcacaagaggygcattgtgtgttttctagcagaaaacaaattgatggtgtctggaacattttatatttcccacaagtttttccgtagtctatgtatttgagtaatttccaaaagttgacatagaaaagtcttttacctaagtttattatataaaagtatatatatataatatacatttgcgtgtgtgtgtatgtctgaatgtatatgaaaatttaatatttaccataacatacctttaatcaacttttcatataaactgttcagttataccaaagtaggataagaaatttctcagaattatgaacccatgtgtatttcacacatttttttatatgatatttcatttgaggaatttatgatctctatttataattaagaactgacagcttatatcagaaaatcattgctgtttttcgttgtaaaatcattgctgtttttcgttgtaatttgtatcacgtatatgtaccatagtgtgtttaactgtttaactatcattgtttgaacctctaattttttggatggtaaggacatttaattctaaatcgatgagaatgtgtctttggggtaggtttttttgttttttttttaatcatgaattctttttttcttttttttgagatggagtcttgccctgttgtccaggctggaatgcagtagcacaatcttggctcaccacaacgttcacctctggggttcaagtgatttccatgcgtcagcctcctgagtggctgggactccaggcatgcgctaccacacgtggctaattttttgtatttttctttttttttttagtagagatggggtttcaccatgctggccaggctggtctcgaactcttgacctcaagtgatccactgcctcagcctcccaaagtgctgggattatagacattcatgatgaattcttattttatgtttaatataaagcaaatacaattattgttagataacaatgcacaaaataaaattcaagggtgaaaaatatatctagtgtacatttttatgtgtatcaaaagcaatactgaggaatattatatttaatatagtatgttaatagcttagaaaaaatcatttctataaaaaggatgaagaaacatgatcatgagctcttttcagtgctgttataagtttccatacgcaattagaaaagtcatctcttccagtttttgaattaaacaaaaacctttttgaagttgagatctgatgttatatatttcagttttttgtctaagccacctctgagctcctgaattgtcaatttcctcctttatcttccatccttaaaattcctcaaaaagctcaaattttccttactttaaaaagaagctcaatctaaagagggtatagaaactatggcatctatgaaatctatatattaatgataggaratgtcttaaagatrtgttttattataatcttggtgtaaataatgaaatgagagaaagtgtgttgacatattcactaatagcaagttctattacaagaagaaaatgtataacctagttcaacagctaaattctgtgtgactgtattaatttctggtgttatgcaattttaacaatattatctaaaccttaagataaatcatctccacatctgatttgtttgtttatcatatatcttacctggtacaatgtaaataccataaaagtagagatcatatagatcttgcttactgtagactcccargacataaagatagcacatagaataggtattgaaaaatgatactttgatgaacaagttaattggtgaatgaatgaatatgaactatattggggtggtgaaccaatgaaaatgtaacacatcacaaaatctacagttgggtgcacatttctgttctggtttcagattgaagttacaggattatccaagaagaagaaraatttctcagagcaaaagtttggctattccacaattctaggggaaatrtcactataatatagcagtgatgcagctataycagatgtgtgacacaaagacaaagtggaaaataaaaagatggcatttattacaatactttttactaagcatataaaagatttttgtataagtgcacatatcttttctattgcgaaygatatatttatattgtggtatttctagctggttattatataaacaaaaatgacatttcatttaaaaaatttagttaccaactatcttactaaaatataatctttatttagtatttttaatatcctttctaaatgaccactttaatcaccatattataaactgatggaaaaatgaatgaataataattataacactgaatgaatatcttatcaggggtctagaagtagagcaaatgtctgatattaaagtgatgacatttatttggaaggaggtccactgcagaaatggctgggacatgtggaaattgagtcaagagaagatgtgacactatgtgctgtaatgtgtgatatgactctgctgacgaccacttcacaatgatgtgagagagacagcatggtggttatcagatgcatgcacttggctcccaggactttttcagaagggctgcgagaggacaacacagccagcatyagcccatggaagcaacagaggacggagaatatatctgctcagctgtcttctgtcttctatttcccactggccagggtttccctgaggcagaactaccatctctgctgttctgctttccatcatccaatcymttgatggaggttatgaaagtcagacctcatgcccacaatgtggtgatccattcaagtcccaaatggaagggtgatgtgggtcaggcaaggtgctgaccaggggaataggagacagtcaagtaaatctgaggaagcacatgtttgtgtcccatgcagtccactccttgtkccattcagatgtgctcatgccctccaatcatggctgactatgagcatataatttccactgttgcacagggtcttgtgcttagagacgcacacgcttaraagggctttatacatgggttaattttctgcacctgctgttttgtttttgagacagagggcactcctctgctaaagagggaatggtcttgcactaattggctaggggtttgctctcccctctcctgtgggcttgtgagaagcatgcacagagtcttataatgcccactatgcatgcatgcctctagcgggtttgaattctgctggattatctgtcacaatgagcacagcagcttggactagagcctacatttgctagaggcattttttgttctagttccacttgagaccagtagcctttggcaacttcattagtgaatcagagcagtatcctcaaatgtggaatacgttggctcccaaatcccagtaggcccaacaaatattgtgtctcatttttagtgacaggaaatagatgtatagagagcaacatgctgtttactttaaaagggtgtttcagcatgtggactaggagcactggacccctaaaatcatcatctatgttataggtcactgaatcttcttgttcatctttcttcttctggtatttagttctgttcaatgttatggtattttactatatttgagaaactcatcacttcctgcttatgggtaacagttaatgcaatattattaatatattgagttagcatgatgttttgcaaaatgccaattaaaytgaaaacagaagtgasrtagccatgacataaaacagtgaagcagtgcttttgttcttacctcaccaaaacaaatcattttgattttctctcccaaysgatgtagattaaaaagcattcaccaaatcaaacgcctcatacaaagaaccagaaaccatgttttctcagtgaaggtaccacatcctagagagcatctgcaagtgtgatttaagtttatgctaatgtgcattcatctgataatccatctggctttggcagaagccagataggttaacwgaatagggatcaaaaatggacaaccacctcctggaacttttgagttttttgtcatgtcggtgaccaattctattccttggacaatgcggttagtatgttttactcattttcttgccagaagaggagaattwccgaggactctttttggtcctacttacagtaatgtcccttaatatacaggtctgraagcaatgtgagagttctgctagctgttgaaactgttaatttcatttaacattctggaagagataataaatataaacccattacatccaccttaggttgaacatgagccaaagctttatgcagcatctgactttcaaaaactcatactccaggmctggtgaggtggctcacacctgtaatccaaacaatttgggaggctgaggtgggaggagcacttgaggccaggagttscagatcagcctgggcaagacagcaagaccctgtttgttaawgaaaataaactgattgtagtactgcgtgcctgtagttccaactacccaggaagttctggcagggggatcagtttagcccaggaatttgagtctgcagtaagctatgattgtgccatttcactmcagcctgggctgcactctagcctgggcaaccaaacaagactctgtctctaaaaacaaaaaaaaacgaacaaccraaaacaaagcctcccactccattctgtgaaacacagtgtctttttttagttctcaaatattattagtgttagttcaggccccatgtttaaaattctgagagtatggatatatgtcctttcctctgggtactgttatggctacaggtgaaatggctacaggtgcttgagaaagggtcaagtgaatatttcctgaatatttttgtggtgaatcttcagtgttgtttaccgagggcatgtaagctttccttcaatcattgaactctgcttctctgaactggctcagtccagagaactggctaagggtttttgattttcaatgtcaaaggctgacctcaggagtcagcttttgcaactcttgtcccctcttggtttataattatttagcaaagtatgaggcctcttcaactatyggtcyatcaacccatttaaatgaggctgttactgtcaccactccattaaatctgacatttgcaagatcaccgataagtctgtgttgccaatggttagttttcatgttgcatgctctatgagcagcactgaacstrgtttatttgcatttcaggatgctgccctctcctgattttatccttgttcactggcacaatttcttagtctcctttgctagttcttcctcttgtctgtaaactgaaaatatcagattgcccaaggtctaaattcttcaatctctaatcaattatgtctggtttttttggtgatctcatgcagtctccttacagataatgtagccacatggttcaatagagaggaataaggctgattattcatatatgttatttatttatatacatatagttacatatatcaaattatrtaaccctttttttcaaatgtcaaagttacatttaaaagtmacaatactaaaaatctrtggagaaggtyggagcatcaataatgtttttacttgaatttctgctaaatcagagtgatggtgaccagatagctaattaagttttatttaaaatagccatgtagattgataggcaggggattatcattatagaaaaaaatgatataagtaaggaaatatacagatagaataatgattgattaacccattttgacttattgtacttggtacagttaatgtcttagtatctcagtaatctstttttatatttttctctatgatcaattaattatgagttaatttttatatatggtatgaaataatrgtctacactcatgtttttatcattctgtttttactcccacttcttaggtaagttcatctagtcataaccttagttactttctgtgtgctgttgatgccaatatttaattcttcagctcagaagtcaaycctggtctctagaatcctttctctaagaagtcatttgacatcttcatttggatgtcktaacaagaacttgaactaacatgtccaaatcaaaatagtgatcttccctctagtctccagmgttgtttcttctatagcctttccctcttctgttaatgaccacttcagtctttcagatgcttagaccaaaaacacggagttaacattttctctctttcagaactcatctctaaggcatcagcaaattttgttggttctaccctcttgttggttctaccctcaaaaacatacagaatccaatcccttgtcatcacttttgccatactcatctaaactgctgccatacctagccaagataattgccatcaactcctaattattctttctagttctgcacatcattttctcctgatgtactctcaagrtagcagccaaagagagcctatgaagatkcaaatttgatcatgccattcttcagctttagatttttcagtggcttctcatctcattagagtaaggccaaaatccttacaaagtcctataatcatttgaatratcggattttgtctgcctgtctgtcctaaaatgcctggctatcccatgctagcaacactggactttgtgtaatttcttgaatgtaccaagaattgcctcagggacttcgtacttgtgtcccttcttctcggaatgctctttctcagaaatcaacactaaacactatcactcatcaaacatcactgaatcattgaggcctccttgatttgatctttgtatatggtgataaataggcatctagtttcatttttctgcaaatggatatccaattttcccagcaccatttagtgaagagactgtcctttccccagagtatgttcttgscacctttgtcatgagttctctataggtgtggatttgtttccacattctctattcyatttcgctgctctatgtgtctgtttttatgccagtaccatgctgttttggttactatagytctgtartatactttgaagtcaggtratgtgattcctccagttttgttctttttgctcaggataactttggctattctgagacatccgtatattttcagaagccattaaaatttagatgagataactaaaaccaattaaaaacaaatgccacaggatatcaaagaccaatcgaaaatctgaaaagtaggtagaggaaaaastttatgtaaaaagaaacaactgtctaaatgacaatcttattttcaacagacaaaattgaagctagaattcaatggaatcatgtcttcagtgtgtttcaaaaccawagcggrctttaacaaatagaaattcaaaagaatattttttagataaaaggaaaattactaaaaatataamgctgaacatgcatgaaggaataataaataatagaagtggtaaatatgtgcataagtctaaataaattttgactgtataaagtgrtggtgtctttttgggttaagtatttaataagatatatagaaatagccatatatagtctgtaagtaaaggtatcaaaaagwgaatttagttaatttaaattyggaattttctatgtctgtgaagagaatttgaaagctatatttgatgaccctgtaattmtctttctatgtatatatccaaaggaaatgaatcaaatgatatatgaaagaatggtcatactagaattattcataactcttcaaaaaagaaaccccccaaatatgtatcaactaaagatgaatgaatcattacaacacattcatacaatggaataatatagagaagtgaaaagaaatgaatcacataaagatgcaagtatgtgagtaaatttcagaaacgtaaaggtgagtccaagaagccatgaacaggaacatacaggactacacctacatatggcttaaaggtttaaagtaggyaaaaccgtatcataragtttagggttgcatacctagttgttaatgtataaagaaaatcaaggccaggcgcgrtggctcacgcctgtaatcccagcactttgggaggccgaggcgggtggatcacctgaggtcaggagttcaagaccaacctggccaacatggcaaaaccctgtctgtactaaaaatacaaaaagttagctgggtgtggtggcatgcgcctgtagtcccagctacttggaaggctgagggaggagaattgcttgaacccgggaggtggaggttgcagtgagctgagatcgcgccactgcactcctgcctgggtgatagagcgagactctgtctcaaaaaaaaagaaaatcraggaaatgatcattctaaattatggctattgctctcctcagggtatgtgaagaaaggtgtaggggcttggagagtggcatggaggtggacmtaggctatttgcaatgtgacatgttttgccctgcttgatggttgcatgagtgtttatgacacattgctatgtttaccatcttagttttcacccatttctaagtgtgcattataattgtatttaaaaattattaactggaaaaatgctccataaagaatattaattattctgctcattgtataccttgcaaaaaattcaccatttatacacatttttatacaactcttagagagttgaagtaggaactttattttagctgcaacatatggaaatttcagatgatgctacctgcagcacacaaatcctttcaaacatttttttattacctttaattatctacctcacrtgacaaaactttgccactccccatctatttttcttttggctcctgaattcctgacaaaacaggggcaaatatatttccccacactcttggtgtagcatagtagctgtaccagttaggtttttctactagagaaaccctccaaaactacgttagatatttttatctcatatatctttggattcaggttttctaagctgggtttggtggatagctctggtgacttgagatgggccaagttctgcatcttggagctagttagactttggccaatttaggatggatcaagtgcaggcaaactgactccattagttttcattctcattctgaaaacagtgtactagccaggtgataatctcatgatcaatggaaaagagcaagaaaccccaatatggaagccatctcaaacctcggtgtgaaatctaccaattttctgttcatcaaagaaagttgtgtgagtgagctccgagtccaggggacagataatcamcctgcttatggtgggaggatactgcaaaattatgtgtcrtagggtgtggtactcaggaatatttacaaaattgttgaacattttaattaaataataaatacttaaacattaaatagacttgagagtaagtttaccaaatgcttaagcatgaaagatatgtttgatgtttgatacatttttttggggggggtctgaaaaccctcagttttcactgggaaaataggactaatttcacgtggatggcctccaggagacttacttcccattttggaaagtataagaaaataattccttccatctcttaggggtgtcacagtctctctctctctctctctctctctttctgtgtttgtatctatttatgaacatggtaacaataaattcacacaaaagtattgggttagcagcaaccagattttaaggtgttttggtcttcttatggttcccaagaaaaccttggatgattttgatttaaaagtttggattctgtctgtttaaatgtagcataaatagtaaatccgttatggtggtgatcctagttatgactaaggtcttttaaagaacttagacatttactgtatgaacgatggactcgggggtaaaatttccctatctaacagctgaagttgctgaacacaaattacgtatcggttaaacaaggaaaacattgcaaaatattgaaagagaatatgtctttatttgcatgctggtaaatgaaaatttaggtttcacttcaacttcattatgaataattcaagcccatcacaagaacggacattgaatgaatgagttaatttgagctgttttgaaaataagaatgttttccrtaaagatgacatcaaactcatccattagcataagctggtactttcttgtttgacactggtcacagtrtttaaaagtaaaaagaatgttactgcacattcagaaatcagatgcacataaaatttaaggtcagagtattaaagaaatcacaaccagtgatattaggcttgcattttctttctttttttctgctcagatatgataacttttctatacatttttttttcaattctaataatggttttatttgttctcggaaactttgccaatggcttcatagcactggtaaatttcattgactgggtgaagagaaaaaagatctcctcagctgaccaaattctcactgctctggcggtctccagaattggtttgctctgggcattattattaaattggtatttaactgtgttgaatccagctttttatagtgtagaattaagaattacttcttataatgcctgggttgtaaccaaccatttcagcatgtggcttgctgctaacctcagcatattttatttgctcaagattgccaatttctccaaccttctttttcttcatttaaagaggagagttaggartgtcattctggtgatactgttggggactttgatatttttggtttgtcatcttcttgtggcaaacatggatgagagtatgtgggcagaagaatatgaaggaaacatgactgggaagatgaaattgaggaatacagtacatctttcatatttgactgtaactaccctatggagcttcataccctttactctgtccctgatatcttttctgatgctaatctgttctctgtrtaaacatctcaagaagatgcagctccatggagaaggatcgcaagatctcagcaccaaggtccacataaaagctttgcaaactctgatctccttcctcttgttatgtgccattttctttctattcctaatcgtttcggtttggagtcctaggaggctgcggaatgacccrgttgtcatggttagcaaggctgttggaaacatatatcttgcattcgactcattcatcctaatttggagaaccaagaagctaaaacacacctttcttttgattttgtgtcagattaggtgctgagtaaaagacctgaaactctcaactctctagattcacaagtgggacattgtgtgtgtattctaggagaaaacaaactgatagtgtctggaacattttatactttttactgttttttctgtagtgtatgtttttgagtattttctgaaagcatacctagaaaagtcttttacctaaagttagtctaaaagtgtatctatgtgtgtgcatctgtatatgaaagacttaaaagacattgacaataacataatgttaatcatattttcacaagatgccaaattatagaaaatatggtaagaagtttttcagaatcatgaacccatgtatatttcacatatacatttcatattatcatgtttcacttgaaaactgtgtgatctttacttataattgttaagaagtgacacattatctcaaaatctttgctcttttccactgatttttaccacacatatgtaccacagtgtgcttaaacatctaaattttttgatagtaagcacactcaattctaaatcaataatgaggtttcatytttggggtagtttttatttcatcatgaattctaattttatgtttagtttatagccagcataattattttcagaaaaagatgcacagaataatattcaaggatgacaaatatatttagaacacattttgtatatgtctaccataaacagtactgaggaataatagacttaatacaaatatgtgaacatttgagaaaaaagtcatttctataataaggatgaagaaagaaacaccgygatgacttatgttgtcataagtctcaacatgcagttagaaaagtcatttcttccagtttttgagttaaagaaaaccttttttgaagttgagatctgatgtcaagtatttcaggttttttttttctaaaccacctcagagtccctgaattgccaatgatctcctctatcttccatacttgaaattctttttaaacttcacataaaagaacttgagtcttccctaccttagaaaaatactctatgtaaaaatastatagaaattataaaaatcatttgaattaaactttttgcaaatgttaaaatggcatctatgaaatctatgtattaatgatagaaaacatctaaaatatatgttgtattataatctagttgcaaataatacaatgagacagtgtgttgatatattcagtaatagcaagttctattataggaagaaaatgtataacatcattaaacaattaaattctataarctgtattaattcttggagttatgaaattttaacaatattatctaaaccttgggacaaatcatctctacatctgatttagttatttgt[450 bp omitted]tatctttgcatacaatttttcagttgtgaatgatatatttgtattgtgatatttccagctggttagtgtataaacaaaaatggcatttcattaaaaaaaactgagttagttaccaactaccttactaaaacgtgacttttatagaatattttaaaaccctttctaaatgaacatttaaattgccatattaaaaacccacagaaaaatgcataaataacaattataacactaaacgagtatcttasccttgggtgtctagaactagagccaatgtctgatgttaaagtgataacatttatttggaagataagtccagggcagcaatggccaggacatgtggaaattgaggcaaagcaaatgtgaaaccatgtcttgtgatgtatgatatgactctgctgatgaccacttcacaatgagatgagagagacagcatggtggtcatcagatgcgtggacttgactcccagtacttttccagaagggctgcaaggggaaaccacagccggcattagtccacggaagagaaagagaagagaanatgtatctgctcagctgtcttctgtcttctatttcccattggccagggtttccctgaggcagaactaccatctctgctgttctgcgttccatcatccagtcccttggtggtagttatgaaagccaaacctcatgcccccagtgtggtgttccattgaagtcccaaatggaaggatgatctggatcaagcaaggtgctgaccaagaaaagagaagacagtcaagataatctgaggaaggatatgtttgtgggcaatactgtccactccttgtgcaactcagattggctcatgccctccaatcatggctggctttataggcatatgacttcacagttgcacagggtcttgtgcttagaagtgcttatgcttagaggggctttatgcttggattaatcttctgcacttgctgttttgtttttcagacagaaggtagtcctctgctggagaaggaatagtcttccactaattcgctaggagtttgctctccccactcctatgggcttgtgagaggcatgcacagagtcctataatgcccactatgcatgcctgtagcaactttgaattctgttacatcatctggcacaatggccaagcaacttgggccagactctatatctgctatagagcccgtttttgtttcgggtttgacttgagacaagcagcccttgcaaactcctttagtgagtcagagaaatatccttaaatgtggtatatgttgaattcaaaaccccaataagcccccataaaactgtatttcccttttagtgataggaartatatatatatagggcaacatgccatttactgtaaaaaggatgttttgacaaaaggaccagaagcattggacccctataaacttcatctatgttataggtctttgaatctgctgaagtttatgtctcttcttccagtattttacttctgttcaatgttataatattttactatacttaaggaacttgccacttcctgcttatgggtaccactttatgtaatattattaatatattgaattaacatgatgttttgcaaaatgtcaattaaactgaaagcagaagtgacagccctgacagaaaacagtgaagcagtgttcttgtttttaccacaccaaagcaaattgttttgattttcctccacaatgtgtgtagattaaaaagcattagctaaatcaaaagccgcatacaaagtgctggaaaccacattctgctcagtgaagataccacatcctagagcgaatgtgcaagtgtgacttaagtttatgctaatgtgcattcatcctataatccatctggttttgacagaggccagttaggttaactgaataaagatataaaatggacgaccgccccctggaacttttgagttttttgttgtggcagcgaccaattctgtttcctggagaatgcagttattatgttttattcattttattgccaggaaagtagaatttcagaagcctccccttggtcctgcttacaataatgtcccttggtatacaggtcaggaagaaatgtaagagtcctgacagctgttgaacctgtcaacttcamttacactttcaggaaggggtaactacgatgaactcattagaacccctttgggttggacatgggccaaagctctatgtaccatctgatcttcaaaaactcatactccagtcctattgaggcagctcatacctgtaatcctaataatttaggaggccgaagtgggaggatcactttaggctgagagtttcagatcagccttggcaacayagtaagaatctrtaaaaaaaaaaaaaaaaattagttgtttgtggtagtgtgtgcctgtagttacagctacccagaagactcaggcaggaggattgctttagcccaggaattcgagtttgcagtgagctatgatggtgtcattgcactccagcctgggcaatcaagcaagatcttgtctctaaaaagaaacaaacaaaaacaacaaacaaaagcccaaaaagggcctggtgcggtggctcatgcctgtaatcccagcactttgggtggstgagtggttggatcacttgaggtcaggagttcgagatcagcctggccaacatggtgaaaccccacctctactaaaaatacaaaaattagccaggtgtggtggtgttgcacctgtaatccaagccacttgggaggctgaggcatgagaatcacttgaacccgggaggcagaggttgcagtgagctgagatcatgccactgaactccagcctgggcgacagagcgagtctccacctcaaaaaaaaaaaaaaaaaaatccagaagtaaaaatttgccaccgtatcccatggaccactgtgtcttttggggtacccagatattagtgttagttcaggctccaaacttaaaagtctcarataatatggacgtgtgttctgttctctgaggactgttttctggggaatagctacaggtctttgagaaagcaacatatgatacatcctgagtgttcttgcagtgcattttcaatgtccatcatcaagaggacttaagattcccttcaatcattgaattctgcttctctgaattggctcagccctgagaactggctgagggttttccattttcaatgttaaaggctgacctcaggaatcagctttttcaactctttccccctcttggtttataattatttagcaaagtatgaagcctcttcaactattggcctatcaacccatttcaataaggctgttgtcaccacttcattgaatctgacatttggaagatcaccagggagtctgtgttgccartggtcggtcttcatgttgcatgctctgtgagcagtactgaatatagtttatttgcattccaggatgctgccctctcctgattttttccttatttactgggcaccacttctcagtctcctttgctagttctctcttgtctctaaattgaaaatatcacactgcccaaggtctcagttcttcaacctttaatcaatcgggcttgttttgttggtgatctcatggagtctccttactgataatgtagccaaatggttcaatagagaggaataaggctgattattcatatgtatttatatatattatttatttatgtacatctatttacatatttctcattatataaagcttttttcttcaaatgtcagttacatttaaaagtaacatgaccaaaaatctagggagaatgtgggaggatcaataatgttttcacttgagtttctgcctattcagagtgatagtgactcagtatctaatttagttttatttaaaatagcaatgtaaatattgatagattgataggcaggggataatcattatggacataatgatctaagtaaagaaatacatagatagaattatgattgattaacccattttttatttcttgcatttggtacagttagtgtctcagtatcgcagtaatcatagttcttaagtttttgctccatgatcaatgaattatgagttaatttttgtgtgtggtataaaataagggtctaaatttatgttttttctttctcttttggctcttactttttaggtaagttcatctggtcatggccttactttctgtgtgctgatgatgtgaacatttaatccttcagctcagaacccaaccctggtctccagaatcctttctctaatagcatatttgacatcttcatttggatgtctgacaagaacttagaactaagttgtctaaaccaaattactcatctttccttccatccccaaatctgtttctcctacagtctttccttttgttaatgaagacttcagactttcagatatttagacaaaaaacatagagtccacgttttctctccttcacatctcatctcagcaaattttatagactctgtcttcaaaaacatacagaatccaatcccttgtcgtcacttctgccatactcatctaaatttctgcatttcttgccaagataattgctatcaactcctaataattttttctagttctgcacattcccctgatgtattctcaatgtagcagccagagagagcctgcaaaagtgcaaatttgatcatgctgttcttctgctccagatttttcagtggcttctcaactcattcagagtaaggccaaaatccttacgaagtcctataatcatttgaatgatctgtttttgtctgcctgtctgtcctaaaacacacctggctcatcccatgctagcaacattggcctttgtgtcacttcttgaatatgccaagcattgcctcagggacttcatacttgtgtcctttcttcttggaatgctctttctcagatatcaacactaaacactaccactcctcaaatatcactaaatcactaaatcaatcctgccttatttaaagagaaatctcacttctctctgcagttttaaattttttttagattttattttaggttcagaggtatatgtgcaggtttgttatataagtaaattgcatggcatgggaayttgctgtatagattatttcatcactggggtgataagcagagtacctgataggtaactttttgatcctcacccccctcctgccctccgtcttcaagtgggccctggtgtctgtagctcccttctttgtgtccatatgtatttaatgtttagctcccacttgtaagtgagaacatgtggtacttgctttgctgtttctgttttacattcccaccagcagtatraaagcattccctttcatcacaaccttgacagagtctgtttttgtttgtttgtttgtttgtttgttttgtaataggcattctgaggggtgtgagaggttatctcrttgtggttttgatttgcatttctttaatgattcattcatattgagcattttttcatatgcttgttggctgtgtgtatgtcttcacttgaaaattgtctatgccttttattcatttttaaatggaggtgtttgttttttgctcgcaaaatcaagttccttatagattctgaataggactttgtcagatgcatagttagcaaaatattttctcccattctgcaggttgtctgtttactctgttgataatttmttttcttgtgcagaaactctttagtttaattaagtttcatttatcaatttctgtttttgttgcaattgcttttggcatctttgtcatgaactctttgccaggtcctatgtccagaaaggtatttcctaggttatttttcaggtgttatttttctttttacagttttaggttttacattttagtatttaatccagcttgctttgatttttgtatatgtattaggaaagtatccagtttgaatcttctgcatgtgactagccagttatctcagcattatttgttgaatagggggtctgtccccattgcttgtttttcttaactttgttgaagatcagatggctgtaggtgggtggcattatttctgggctctctattccatttccttggtctatgtgcctgtttttgtaccattgccatgctgctttggttactgttgccttgcagtrtggttcaaagttaggtaakgtgcctccagcttgttctttttccttgggattgccatggctatttgggctctttcttttttttttttttttattccatatgaactttaaaatagtttttttctactttggtgaagaatgtcactggtagtttgtcagaaatagcactgaatctgtaaattgctttaggcagcatgggcattttagcagtattgattctttctatccatgagctcggaatctttttccacttgtctgtgtcatatttgatttctgtgagcaatgttttgtaatactctttgtagcgatatttcacctccctggtcagctgtattcctctatatgttgtattcctttgctgctattgtgaaagggattgctttctttatttgtctctgtttggatgttgttgatatataggaatgttactaatttttgtacattgatttttgtatcctgagaatttgctgagtttgtttgtaagatcaaggagattttgggcaaatactgttgggatttctaggtataggattacattgtctgcaaacagggatagtttgacttcttctcttcctacttagatgacttttatttctttctgttgcctgattgctttggccaggacttccagtaattgattaagagtggtgagggaagatatccttgtcttgttcctatcttccaggggaatacttccagttttgctcattcggtatgatgtggctttgtttgtcataggtggtgcttattattgtgaagtatataccttcaattcctagtttgttgagagtttttaatatgaagagatgttgaatttattgaaagccttttctgcatctatcgagatgataatgcgattttcgttaattagttctgcttatgtgatgaagcacacttattgatctgcatatgctgaaacaaccttgtatgttagtgataaagcctacttgattatggtggattagctttttgatgtgctgctggattcagtttgctagtattttttgagtactttttcatctgtgtttattaaggatattggtctgaagttttctattttttgttgtgtctctgaaaagtttaggtattagggtgctgctggctttatagaatgagttatggaggagtcccttttcctcagtttcttagaataggttctgtataaatcataccagtgctttgttatacatttgatagaattcagctgtgaatctgtctggtcctgggctttttttggttggcaggcttcttattactgattcaattttggaactcatcatcggtttatttagggatgcaatttcttcttagttcagtcttggaggttgtatatgcccrggaatttatgcatttcttctaggttttctagcttgtatgcatagaggtgttgatagtagtttgtgaaggttgtttgcatttcagtggggtcagtggtaatgtcccctttgtcatttctgaaagtgttcatttgtatattctctcttttttctttatcattgtggctagtgttctatctatcttaatttaaaaaaaaaaaactcctcagcccactgatcttttgtatgattttatgcattgcaatttccttcacttcagctctgatgttggttattccttgtcttctgttagctttggcattggtttgctcatggttgtctaggtctttttgttgggatgttaggttgttaatttgagatctttctaacttttcaatgtgggcatttagtgctacaaactttcctcttaacactgccttagctatatcccagaaattctggtatgttgtatcttttttctcattagtttcaaagaatttcttggtttctgccttaatttcatatgtacccaaaattcattcaggagagggttgtttaatttccatgtaattatatggttttaagctattgtcttagtatttacttacatttttatagggctgtgrtccaagaacgtgactggtatattttttgttgttttgtatttgctaggaattgttttatgttagattgtgtggttcattttagattacatgccatgtacagatgagaagaatgtgtgttctgttcttttggggtgaactgttctgtggtggtctattaggttcrtttggtcaagtgtttagttcagattctgagtacctttgtcagttttctgtcttgatcatctgtctaatgctgtctgtggggtgttgaattctcccactagtgttgtgtgtttatctaagtcttttcataggtctctaagaacttgcattatgaatctgggtgttcctatgttggctgcatatatattcagaatagttaggtcttctcgtgaattgagtcttttactttacataatgcccttccttgtcttttttgatctttgttgatttaaagactttttttatgaaattagaatagtaactctgtttttttttttctattttttatttgcttggtagatttttcttcattcctttacttcgagcctatgcggtatcattacacgtgagatgggtctcttaaggacagcataccattaggctacgcttttttatccaacctgccactctttgctctttaactggggcaattagcctttttacattcgaggttagtgttgatatgtgaagatttgattgtttcatcatgttgttagctggttattatgcagattgggttgtgtggttactttatagtgttactggtctatgtacttaagtgtatttgtgttgtcagtgaagatcttttctttccatgtttagtactcccttcaggaccccttgtgaggcacggctggtggtaatgaaatcccttagcatttgcttgtctgaaaagatcttatttccccttcacttatgaagcttagtttgggtggatacgaaattcttgattaaaaattctttttaaaaaacaaaactgctgaatgtaagcccccattctctttctgtttgtagggcttctactaaaaggtccattgttagcctgatggggttccctttgtaggtgatctgtcctttctcttccagttgactttagcattttttcttttattttgagcttggagaagctgatgactatgtgccttggggatggtcttcttgtgagtttttagttcagtcagatcagtttggttccttcgttgattctttccccagcttgctcaattatgccgtgaatactttccattgtgttctgaaattcttgatgttagtttttcagttctgtcagaacacttttttttcttttttaaaataaccgttttgtatttcaacttctgcatcattttattgcattccttaaaaactttggatttggtttttactttctcctgaatctcattgatcttcattcccatccatattctgaattctatttctgtcatttctgccttttcagcctggtcaagaaccattgctgctgaactagtgtggttgtttggaggtaagaagacattctctggcttttcgtgttgccagagttcttgtgctaattctttctcatctgtgtgggctgatgttccttgaatctttgaaattgctgtactttggatgggttctttttttttcttttatcttctttgatacccttgggggtttgatttcggaataaggtgggtttcatttactagctttgtttatggtagattttgggggtgccaaggatcagctcagcactcccgcgctgaatgccgtaactctgggaggctagtattgggcccctggctttgctctctttccccttaaggttgggaatctgctatgctggaagggctattgtgttcctggattgctggttacgatactctgaaggatggtgccagcctaagcactttgttgggcagtggcattgtggctcatccttgttcacacatgccagcagcatcagtagtgtggcagagtacacactygtagactggggtggggtgcaggtggatccaaggctgctagcctctatatggacattggcagtagcctaaattcatctttatgcatgagaatattcattttgtctagcatcatttattgataaaaatgattcttatttaattgaaatggtatggtttttgaaattagctgataataaatgttgttactaatttgtggactcttaattgtgtttcattattcttgtctatagtattaaaaatgccagtgtcctgatgattagtccagcttttagcaaactttgaaatgagaaactgtaatcccccyactttgttctttttaaattatttctctaggtgctcttgtcacttggcatttccagatacattttaggagtagttttttatggtctaccaaaaaagcccgccagaatttgatagagattgcattaaatatataagttgactcttcacctmtaaagactctccttgtgctggattttagtttagctggccctccttgtttgcacagctctccgatgaattgaaaatataattttggccttttatttatcttatcctagctgctgcagaagaatattttgcctgctggaacctgctgtatctactcaagagtggaagttttcacaggtaacttctacatatcaagtaacacaggatcaaatgaaaacctagcaacacttggtttctgcctgtatcagacaggtgaaattgcaagcagttatacaagtagtgtactaacttctcataaagcctactcaaggagggtattrttattgtgtgcgttttacagatggctatcctaaggctgatagtagttgtaaaatatagtctaagttcatatytatatgaaacagagtatctgggtttctgtcctggccatcagacttgaagatcatttcttagaaacaattatattatcaaaactgaaaagaaatacaatccaaggttggagtcttattttagcatctattaatcttaagccattaagtaatcaaaaataaattaaaaagaaaaaaatatmttcaaatatcacatgtagagaagtctagtttcttcagtggaaaacacatgttttttaagtgctcaaggaatatttacaaaattgcttaatatttttaattaaataattaatatttaaagacttaatagacccaaaaggataacttacttatagacctaagcatgagagatcagtttgataaatattgaaaatgggctaaaaagcatgagtgggaaaataaggacttttcaacctacatgacctccctgaaatttattcttcattttgaaaattataggacaataatttctcccatccatgtggtgtgtgtgtgggcgggcggggggggtgggttgtggtgctttgtacgtgttaattggcttgttaccaataaggttatacagaggtattagcagcaaccagattttaaagagtactggccttcctggggttcccaaaaaaatcttgaatgcatttgataggaaaagttggattctgtctacataaatctggtactgaggaaaacaaattcactttggccatgattctagttacgaccaaactcccttcaaaaatgtagatatccaatatataatctatgtattgggttttaaaattttcctaacaactgatgttgctgaacaaaaattatggagaagttaaagagggaaaaaattgcaaaacaatgaaagagaatatgtcttcatttgcatgcttgcaartgaraaatcagcttttacttcaacgtcattatgaaaaattttattcaaattttttcaaaagaaaaaatagaaagaacastgtatgaatagtagttaacttgagctgttctgagaataacatattttccataaagacagcattgaactcatctataagcatgtgctggtgctttactgcttgacattggtcacacarctgaatttaaaagcatcaaaaatattagtgcacattcagaattcaggtacacatagagtttaaggtcaggaccttaagggggatcatgcccagtgatattagacttgcctttttttaaggtgtgtttgttcagttcatgggaagtttactaccaatcatttttttccatactagtaatggtrgaatttgtattttcccatgayacctatattaaatgtataaacatttttatatttcaacactttgtatgagtcctttcaggrcctgttaaacactccaaatttcccttgcaayatgccaataactaatcatattttctcaaaatgatctgacataatgtttgactgaaggcatatctctggtataattctatttgctgatatcaaatgagaatttgaaacttcatgaaaaatgattagaaaatttaataatagaatacgaataagtgcataaaatatacaattcattcttgagaaatgtgtataaaatcacaatcatagaatgataaaagagtaatatgtaatttttgaactaaagttacgttttaaaattgaatagaaaaagaattataaaatgttaagtttaataatttttatataaatataaaagtgtgaaaattattctgatattactcattttgaaaagaacaagaagtaatgagaattttcaaacactgctcctagaagtataaattratataattctttggcttagtatggcattatctgatgaagatgaaggagcacatcttaagactcagtacaggtactcttaccagaaaatgtatacacacacatgaatatcactgtgttttcatagctaaagttgagaagtttctcaaatgtcyatcagtgataaaatagataaataaattatggcatacctatataatagtatagtactatacagtaatcaaaatgaaccaactagagagacatgtttacaaraaatgtatataacaaagaaaataaacaaatttgagctgattagataatactcacaagtgtaagaggatctatcmatagtgaaaaacattcattttaattccatttatataaagttttcaaaaatatatctttaatacattgcaatttattacattggtgacaaaactctaaagtgaaacatatgagtgactattacaacaatatggatagtagggaggaggaaaacaagaggagaatgggatcaacagaaggcatatatggggagtgtctggatggctggaaaattcyattttttgaccaagatgtggtaaacacggggagtaaagttataaytttttctcttactgtgcttttaggttttgttgctttctgtctgtatgctrtgttccacaataataaaaatatttaaaaggcaaaaaaagtaaaataatgaatataaaattacactgaaactacatattctcatagatagaaytgtaattattagagtttttgctgaataaagtcaaatagactattatagtagttataaacrcaagttaaaattttagggccgggcaaagtggctcacgcctgtaatcccagcactttgggtggctgagcgggtggatcacctgaggtcaggtgttcaagaccagcctggccaacatggtgaaagcccgtatctactagaaaatayaaaaaattagctgrttrtggtggcgggctcctgtaatcccaactactagggaggctgaggcaggagaatcgcttcaacctgggaggcggaggttgtagtgggctgagattgtgccattgcactccagcctgggcaacaagaatgaaactccatctcaaaaaygaaaaaaaaaaacaaaaaaacttttctttaattttaaaaataatatataagcaagaactataaattcaaattcttaatgctaatcttaatttgaaacatcaaattttgaatattgatacattgctggacaccttttgttcttatttccaatttatttacaatgcacaaagtgacagaaattactgaattttcaataaattatggtactgtagatattaaattatacrgatgattatccctaaatttatccttaaataaaataatttcagtcatattgttaccattcaaaaatcayagtatgtgcacacatatrtsttggaaaaaatattttgttgctataattttttggctctctattagagaaaaaaccagaaagttaaatgtgttaaagtgtaaaacttacttagtataatctttgggtatgtttttgtatgtgtagtgctgcattgcttgctataataaaatactccaagggaccaggtgcagtggctcaygtctgtaatcccaacactttgggaggccgatacaggcagatcacctgaggtcaggagttcaagactagcctggccaacatggcaaaaccccatctctgctwaaaaatacaaaaattagccgggtgtggtggtggatgcctttaatcccagctactcaggaggctgatgcaaggagaattgcttgaacctgggagtcagaggttgcagtgagccgagattgtaccatggcactctagcctgrgcaacagagtgagactccatctcaaaataaaataaaataaaatactccatatttcatcacagtagctgagaatgyaaataaccatttgaaagaatttggcttgctaatgatgctattgatacatatgataaattttaygtactgtataattgcacagagtatttgtacatgttcatatgaaaatgcaaaaaaacaaaaaamcaraaaaaccaaagagcaggtgctatttgctggaagwcatgtttgctatgatttttagaatttaataaaagaaaaaaaatagctagcaaacttttggaaatatgttggtttaaagttgtcattgatgaaatactatgtgaaggtgataggagcaggaggctgggaaattctagacagaaaagggcgggtcctcagctaaagccccactctcaagccaaatagactgagactgtggcccaaagggagtacttctatccctgttttcccactcaaatgttgcctttttkggcctgccccacccctcatcctatgcccataaaaccccaggctccaccggtagtgagaagtggctgaagatcgagaggagaagcagctcaatgttgtagactatggtgggacgttggagagaagtggcttgacttcagagggacaggttgaaggcgtgactttcgagaagagtctggctggagacagccggacttcaggggaagattaccttcctgcttcacattccctttccagctccccttcctgctgagagtcacttccatcaaaataaaatctccctcatttmccattctccaattcggttgtgcaacctcatttttcttggaagctggacaagagctcaggagccaggaatgcagatacgaaaagttgttamactgaacctctgcccttgctggcaagaggcagccgcctcaagcgaaaaggcaaagggcccactgagctactaacacttaagacgtctgcagatagcagagctaaaagagcactgtaacaccctccccctcgaggtttcaggggtgcgggcaccccccyagatgctgctgcggggcctgcacagaatttgttcctgctggcatccaaaagtgctcctgcacctgttcacctgtgtgctccctcccatgagggctgggcgcagtgggtcccagcgagtggatttcacccctgccagccctaaagcagctggctggttctagcgtcagtgagccccagttccctcccatgaaggggtaagggaaatgtcctccatcaaaggtattattycagtctaagccctgatgctgagaataatatgagaatcataaagccaggagaaagaataattgkgttatcccattaycctgaattgtagcacttagaaaaatgaatggtcacatttattagcyagcagtctaccttgtagctatcatcatcatctctatctacatctatcccattaaataatttactttttgaaatatrtacattcataaattggataatgcctacgtaatttaaawaaasaatatcattatgggcaagttacrttagtaaacggtaaagttcaagtcaagctaaatacatttagatttagaaattaagtttagtttagtttaaaatacattgcttaagaaaatagttatttatggatgaccttaaactaatccaaggaacactataataaasatttagtttttaacgtaaatacaattcttcaatcagagagataaaccatttcatgatcaatctattatttttgtttattatttttattatttatttatttttcttttgagacggagtctygctctctagcccaggctggagtgcagtggckccatctcagctcaytgcaacctccgcctcttgggttcaaacgattctcctgcctcagcctcctgagtagctgagatgacaggcacgtgccaccacaccctaatctcttatttttaaaaagaggattttaggactaaacaaatcaaatgtaagtttcccctcacctctttgatctctcacttgrgtaatgatgcagtttgaaggcaaagagccccatttctacattataagcaaaataaaagttaattcatggaatacaatggtgtatttgtaattgaggtactatattttatttattggaatggcattttgagatccagtgctgttcattgmatttccctgtaaggagagtttgtggtttggactcatcaagctgctatgccaaaaacaaaacaaaacaaaacaaaacaaaaagctaatcacatgaaatcaatttcctgtttcttccaacttgcaggataaggcctagacgaagcttttattgtattgtgtgacccmagtgttgggaaaagtagaaaattgttaccagatgtgaagaaacatttaggggcttgaaaagcagcatggaggtggacctaggctctttgcaatgttccacgtcttgccttatttgatggttacatgagtgtttataatacattgctgtgtttaccatttttattttgactcatttctaagtgtgcattataattttatttgaaaattatttattaggagaagtgcaccataaaaattattgattactctgctcattatatacctaggaaaaaattcaccatttatatatctttacatacaactctaagagagttgaagtgggaactttattttagttacaacatgtagaaataagagaagacgctacctgaagtacccagatctttccaaaggtttttttctacttttttttttttttttttttgagacggagtcttgctctgtcgcccaggctggagtgcggtggcgccatctccgctcactgcaagctccgcctccggggttcacaccattctcctgcctcagcctcccragtagctgggactacaggtgcccgccaccasgcctggctaattttttgtattttttgtagagacggggtttcaccgtgttagccaggatggtctcgatcccctgatctcttgatctgcccacctcagcctcccaaagtgctgggattacaggcgtgagccaccgcgcccagcctctacctttaattatctaccttgcatgacaaaactttgccrttccttatctatttttcttttggctcctctattcctgacacaacaagggtggacatatttcccacacgcttggtttwgcagagtacctatatcagttaggtttttctgccagagaaacctctccaacactacattacatattgatatctcacatgtctttggattcagtttttctaagctgggtttgctggatggctctggtgatatgagatgggccaagttctgcatcttggaattagttagagtttggacaawgtaggctggatcaggcarggacaaactgactccattattttctcattctccttctgggaacagagtagtagccaggcaatgttctcataataaacagaaaaggaaaagaaactccartgtggaaaccatctcaaacctctgtgtgaagtctaccaattttctgttaatcaaagcaagctatgtgagtgtactcagagtccaggggcaaggtagtcaccctgtgtgtggtgggaaaatactgcaagattatatgtcaaataatgggatactcaggaatatttacaaaaatgttgaatattttaatgaaataacaaatatttagacattcaatagacttgagagtaactttaccaagggtctaagtatgagagatatgtttaatatatttttatgggctgaaaaccctgagtgggaaaataggactaatttcaccaggatgacctcctggaaatgcattttccattttggaaattattttaaaagttcattttttctggatgggtatgtgtatgtgtgtgtgtctgtctatgtgtgtatgttttatgagcttgttaacactaatgtcatacaaaagtactggttagcaggaataagattttaaggtgtattggcattcccatggttcccaagaaaattttcgatgactttgattaaaaagtttggattttgtctatttaaatctagcataaaaattggtcatggtgatgatcctagttatractaatctccctttaagatttaggcatttactgtgtgaaatatgtggcacattttccataacaaacagctaaagttactgaacacaaattatggaaaggtgaaatgaggaaaacattgcaaaacactgaaagagaatatgtctttatttgcatgctggcaaatgaaaattccggtttcacttctacttcagtatctaacaagtctctaacaagaacagacattgaatgaatgaattaagttgagctgtttgaaaattagaatgttttccataaatacattattgaactatcaattagcataaactgctactttcttgtttgacactggtcacagtatttgaaagtaaaaagaatgttactgcacattcagaaatcaggtscacataaaatttaaggtcaggatattaaaggatcacagccagtgctgttaggccttcrtttattctatctttttgtctgttcagacatgataacttttctacccatcattttttccattctagtagtggttacatttgttcttgggaattttgctaatggcttcatagtgttggtaaattscattgagtgggtcaagagacaaaagatctcctttgctgaccaaattctcactgctctggcrgtctccagagttggtttgctctgggtaatattattacattggtatgcaactgttttgaatccaggttcatatagtttaggagtaagaattactactattaatgcctgggctgtaaccaaccatttcagcatctgggttgctactagcctcagcatattttatttsctcaagattgccaatttctccaactttatttttcttcacttaaaaaggagaattaagagtgtcattccagtgatactattggggtctttgttatttttggtttgtcatcttgttgtggtaaacatggatgagagtatgtggacaaaagaatatgaaggaaacgtgagttgggagatcaaattgagtgatccgacgcacctttcagatatgactgtaaccacgcttgcaaacttaataccctttactctgtccctgttatcttttctgctcttaatctgttctttgtgtaaacatctcaagaagatgcagytccatggcaaaggatctccagattccaayaccaaggtccacataaaagctttgcaaacggtgacctccttcctcttgttatttgctgtttactttctgtccctaatsacatcgatttggaattttaggaggaggctgtagaacgaacctgtcctcatgctcrgccaaactactgcaattatatacccttcatttcattcattcatcctaatttggggaagcaagaagctgaaacagacctttcttttgattttgtgtcagattaagtgctgagtaaaagacctgaaactctcaaatttctagattcacaagtgggacatcgtgtgtctccaagagaaaacaaactgatgttgtctggaacattttatactttccactggtttttctgtattgtatgtttttgagtaatttccaaaagtatatctagaaaagtcttttacctaaagttagtctaaaaagtatctatatatgcatgtgtatgtgtatatgaaacacttaagagagagtggcaataacataatcattttttacaaactgccaaattatagaaaatattgtaagaaatttttcagaatcatgaagccatgtgtattcacaatacagttcatattatcatgtttcatttgaaaaatttatgatctctatttataattgttaagaacttacagcttatttcacaaaatcattgctcttttccactgttatttgtaccatacgtatgtaccatastgtgcttaaacgtgattatttgaacgtctagttttttggatggtatgmgcattctaatctaaatcaataatgaagttttatctttggggtagtttttgttkcataatgaattctaattttatgtttaatttaaagcaaacaattattgttagaaaactatgcacaaaataaaattcaaggatgaaaaatatatttggaatacattttgtatatgtctaccatcatcagtactgaggaatattagattttatacaaatatgtgaacaactgagaaaaaagtcatatctgtaatagggatgaagaaagaaacacaatgctgacctcttaastgctgtcataagtctccatatacaggtagaaaagtcatttcttccagtttttgaggtaaagaaaaccttttttgaaattgagatcggataccaaatatttccgtttctttcctaaactgcttcagagcccctaaattgccgattctctccactatcttccacatttaaaaatctttttaaamatcacataaatgaactcaaatctttattacttgaaaaaatactccatgtaaaaatagtatagaaattatgaaaatcatttgaattatactttctgcaaattctaaaatgacgtctatgacatctatgtattgatgataggaaatgacttaaatatatgttttattataatctagttgcaaataatgcagtgagagaaagtgtgttgacatattcagtgatagcaagttctattataggaaaaaatgtataacgtcattaaacaagtaaattctacagactgtatcaattctcggagttatgaaattttaacaatgttatctaaaccttgagataaatcatttgatttagttatttgtttgtttattatatatctttcctggtacaacgtaagcaccataaaagcagagaccctggtcggggtcggtggctcacgcctataatcccagcactttgagaggccgaggtgggcggatcacgaggtcaggagatcaagaccgtcctggctaacgctgtgaaacccggtctctgctaaaaatacaaaaaaattagcagggygtggtggcgggagcctgtagtcccagctactcgggaggctgaggcaggagaatggcatgaacccaggaggcggagcttgcagkgagcsgagatsgcgccactgcactccagcctgggcgacagagcgagactccgtctcaaaaaacaacaacaacaaaaaacagagatcctgcagaccttgcttattgttgactgccaggacctaaaagatcacataaaaaatagatagccaaaaatattttgaagaacaaatgagttagtgaatagagtaataaattacatgtcttggggtggtgaaccagtgaaaatgaarcatcacaaaatctacagttgcatgaatttgcctattctggtttctggttgagatgacagaattatctaagaagaagcatttttcagagtaaaagtgtggttattccatacttgcaggggaaatatcgctatatatagccttgatgcagctatatcagactaaaaacatggagataaggtggaacatcaaaatcacatggcacccactacaataccttcaaaacagcatataaaagacttttggatatttgtatatattttctcgattgtgaatgatatatttgtattctgatatttctagctggttattatgtaaaaaatgcatttcaattttaaaaattgagttagttatgaattaccttactaaaatgtgatttttatataatatttttaatatcctttctaaatgaacattttaattgccatattataaaatcacagaaaagtgagtgaaaaataaattataccactgaatgaatatcttagctttggaggtctagaactagagccagtgtctgatattaaagtgataacatttctttggaaggtaagtccagggcagcaatggcagggacgcgtggaaattgaggcaagagcacgtggaaagtgaggcaagagcagatgtgaaagaacgtgttgggatgtattgtaacaatgtgttgtgtgtatgtgactctgttgtggcaacttcattataaggtgagagagacagcatggtggtcatcagatgcatgcacytggaccccagtacttttccggaaaggctacaaggggaataccacagccagcattagtccatggaagcgagagaggagggagaatgtatctgttcagctgtcttctgtcttccattttccattggccagggtttccctgaggcggaactaccatctctgctgttctgctttccatcatccagtccgttggtggctgttatgaaagacagacctcaggcccacagtgtggtgttccattcaaggaaggatggtaggatgatctggatcaggcaaggtgctggcctagagaataagtgacagttaagggaatctgaggaagcacatgtttaagtccaatactgtctactccttgtaccactcaratttgctcatgtcttccaatcatggctggctttatgggcatatgatttccactgttgcacagggtcttgtgcttagaggcgctcatgcttagaggggcaatcattagtcttcctgttgcatgctgtattagcagcaatgaacctggtttatttgggggatgctgccatcttctgattttatcattgttcgctgggcacctcttctcaatctcctttgctggttctttctcttgtctctaatcttctgcaactgctgttttgtttttgagacagagggcactcctctgctgaagagggaatggtcttgcactaattccctaggagttttctctcccctctcctgtggatttgtcagagacttggacagagtcctgtaatgcccactatgcatgcctctagcatgtttgaattctgctggatcatctggcacaacgggcagagcagcttaggccagaccctatagctgttatggaacccttttttgttctggtttccacttgagaccaatggcctttggaaactccattagtgagtcagagcaatatcctcaaatgaggaatatgttgactccaaaatcccaataggcccaaaaaacactgtgcctcttttttagtgagaagaattatgtatcaggaaacatgccgtttactttaaaaaggatgttttgacacaaggaccaggagcatggacctgtaaaaacaccatctatgttataagttcctgaatctgctgaggtttatgtctctcttcttctgatattttacttctgttcaaagtaatactattttactatatttaaggaacttgccacttcctgcttatgaataccaattaaagtaatattattaatatattgagttagcatgatgttttgcaaaatgccaattaaactgaaaacagaagtgacacagctctgacataaaacagtgaagcagtgcttttgttcttaccccaacaaacaaattgttttgattttctctcacaaagggtgtagatttaaaaacattcgccaaatcaaaagccacatacaaagtaccagaaaccacgttctgctcagtgaaggtaccacatcctagagagcatctgcaagtgcgatttaagtttatgctaatgtgcattcatctgataatccatctggttttggcagaggccagataggttaactgaatagggatataaaatgtactaccacccccagtgttcattatcaagaggacttaagcttcctttcagtcgtttatctctgcttctgtgaattggctcagtcctgagaactggctgagggtctttgatttgtcatatcagtgcctgacctcaggactcagctttttcaactctgttttcctcttgatttatagttatttagcaaagtatgaagcctcttcaactattggcctatcagcccaatccaatgaggctgttgctgtcaccacttcattaaatctgacatttgttaagatcaccagtgagtgcgtgttgccaatggttagtcttcatgttgcatgctctattagcaacattggacatggtttactggggggatgctgccctcttctgattttattgttgttcactgggcacctcttctcaatctcctttgctagttctttctcttgcctctaaactgaaaatgtcacactgccgaaggtctcaattcttcaatctttaatcaatcagacttgttttgttggtgatctcatgcagtctccttactgataatgtagccaaatggttcaatagagaggaataaggctgattattcatctatatattcatatatatcattttaatatagcattgcagatattggcagattgatatgtggggaattttaattatatgatgatctatatataattagataatgatataagtgaagaaatacatagatagaattatggtttactaacccatttttgatttcttgcgttttgtacaatgtctcagtatctgttagtatcttatttcttaagtttttttctctatgatcaattacttatgagttaatttttgtgtacagtataaaataagggtctaaatttacgtttttttccttctcttttaactcccacttcttaggtaagttcatctactcatggccttacttattttctgtgtgctgatgatgccaacatttaatctttcagctgagatctcaacgctggtctccggaatcctttctctratagactatttgacatcttcatttggatgcctaacaggaacttgaactaacatgtccaaatcaaaatactgctcttcccccaattgtcagatttgtttcttctacagtctttccctcttctgctaatgaccacttcagactttcagatgcttagactaaaaaaaaatggagtcaatattttctctctttcagaacctatctttaaggcatcagcaaattttgttgactctaccctcaaaaacmtacagaatccaatcccttgtcatcactctgccatactagtctaaactgctgcatatcttgccaggatatttgccatgagtttctaattattctttctagttctgcacatccttttatcctgatgtaytctcaaggtggcagccagagagaacctgtaaaaacgcaaatttgatcatgccattcttctcctccagatttttcagtggctttcatctaattcagagtaaaggccaaatccttacraagtcttataatcatttgaatgatctgattttgtctgcctgtgtgccctaaaacacctggctcatcccatgctaacaacactggcctttgtgtcacttcttgaatatgccaagcattgcctcagggacttcatacttgtgtcccttcttcttggattgctctttctcagatatcaacactgaacgttatcactcctcagatatcattgaatcattgaggcctccaatactaccttatttaaagataaatctcatttcactttgcagtttttttttctttttttagcttttattttagattctggggtacatgtgcaggtttgttatgtaactaaattgcatgtctcaggcactttgtgtacagattattttgtcactcgggtgggaagcagagtacctgataggtatctcttttatcttcactctcctccttctctctgttcacatagaccgtggtgtctgtcgttcccttctttgtgtccatctgtactcaatgtttagcacccacttataagtgagaacatgtggtatttgttttctgtttccatgtttattggcttaggataatggcctccagctccacccatattgctacatcatcttgtttttttctaatgactgcatagtattccatggtgtgtatgtaccatattttctttatccagtctactatttatgggcagttaggtttattccatgtctttgctattatgaatagttctgtcatgaatattttcatgcatgtgtctttatggtagaacaatttatatttctctggatatatatccaataatggaattgctggtttgaatggtaattctgtgttaagttctttggaaaattgccatgctgatttccacaatggctggactaatttacctccccaccagcagtgtgaaagcattccctttcaccacaatcttgccagaatctgttgttttttgggggttttagtaatagctattctgactggtatgagatagtatctcattgtggttttgaatcacatttctttaatgattagttatattgagcattttttcatatgtttgttggctgagtgtatgtcttcacttgaaaattgttcatgtcctttatcaaatttttaatggtggtatttgttttttgcttgtaaatgtaaattccttatatgttccggatattacgcctttgtcatttgcatagtttacgaaatattttctcccattctgcaggttgtctgtttactctgttgatagtttcttttcttgtgcagaagctcttcagtttaatgaggttccacttttcaatttttgtttctgttgcaattgattttggtgtctttgccatgaaatctttgccaggtcctatgcaggaatggtgtttactaggttatttttccrttttttaaaaaaatagttttaggttttacattttattatttaacccagcttgcattgagttttgtgtatgtataagaaaggtgtccagtttccatcttctgcacatggctatccagttatcccagcaccatttatagagcagggagtctctcctcatggcttgtttttgttaactttgttgaagattagatggttgtaggtgggtggcattatttctcgggtctctattctgttcccttggtctacgtgcctgtttttgtaccactaccatgctgttttagtctctgtatccttgtagtatggttcagtcaggtaatgttatacttcctgctttgttctttttgtttggtattgccttggctatttgggctttttttttttcattcccagtgaattttaaaatagtttgtttctaattttgtgaagaatatcaatgataatttgacaggaatagcattgaatctataaattggtttgggcagtatgggcatttaaacaatattgattcttcccatccatgcacctggaacgttttcccgtttgtccatgtcttattggatttaattgaacagtctcttgtaatactctttgtagagatatttcacctccctggtcagctgtattcctatgtattttattttttgggactattgtgaaagggattgccttcttgatttgtctttgcttgaattttgttgctataggaatgctactaatttttgtacattgattttgtatcctgggaatttgctgagtttgtttatcagaccaaggagattttggccagaaactgtggggatttctaggtataaagtcacattatctgcgaacagggataatttgacttcttctcttctattgggatgccttttatttatttctcttcctgattgctttgaccaggacttccagtactgttgaataagagtggtgagagaggacacccttgtcttgttcctgttttcaaggggtaatgcttccagttttgcccatttagtatgatattggctgtgggtttgtcatgggtggctcttattattgtgaagtatatatcttcaatgtctagtttgttgagagtttttaatatgaagagacattgaattttattgaaagccttttctgcatctattgagatagtaatgtggtttttgttagtttcacttatgtgatgaatcacatatattgatttacatgtgtttaaccaaacttgtatcccagtgataaagcctgcttgattatggtggattagctttttgatgtgctgctggattcaacttgctggcattttgtggagtgttttttttaaatctatgtttattgaggttgttttcttttattgttgtgtctctgcctggttttggtatcagggtgatattarccttgtagaatgagttagcgtggagtttcttttcctcagttttttagagtaggtttagtgtgaatagtaccagttctttatacacatggtggaattctgctgagaatctatcaggtcctaggctttttttgtttgtttgtctggtaggctttttattactctttcaatttggaacttgttattggtttgctcagggattcaatttcttactgattcagtcttgaaaggttgtacatatccagcagtttatccatttcttctaggttttctagcttgtgggcatagaggtgttgacagtagtttgggaggattgtttgtatttcagtggggtcagtggtaatatccacttkgtcatttttgattgggtttatttggatcttctctcttttttttctttattagtckggttaggggtctatcatattaattttttaaaaacatcaaatcctggattcactgaccttttgtatgttttttttaatcacaatttccttcagttcagctctgattttggttatttattgtcttttgctagctttggcattggtttgctcttgtttgtttagtttctcttgtgaagttatgttattaatttgagatcattctaactttttgatgtgagtgtttattgctacgaactttcctcttaacactgccttatccatatcccagagattctggtatgttgtatctttgttctcattatgttcaaaaaatttcttgatttctgccttaatttcaatatgtacccaaaagtcattcaggagagggttgtttaatttctatgtaattatatggttttaaggtattttcttagtatttatttatatttttattgtgctgtggtccaagaatgtggttggtatggttttctttttttcatatttgctaggaattgttttatgttaggttgtgtggctgattttagattatatgccatgtgcagatgagaagaatgtgtattctgttgttttggggtgaactgttttgtggatgtctattaggttcatttggttaagtgtctatttcaggtcctgaataactttgttagttttctgccttgatgttctgtctagtgctgttggtggggtgttgaaatctcttgctattattgtgtgattttctaaatcttttaataggtctctgagaacttgctttctgaatctgggtgttcttttgtcaggtgcatatacatttagaatagtaatgtcttcctggtgaattgagcctttttcaattatgcaatgcccttctgtttcttcttgatctttgctggttaaagacagttttgtatgaaagtagattatcaaggtcaggtgccatggctcagacttgtaataccagcacttcaggaggctgaggtgggtggatcacttgaccccaggagtttgagaccagcctgagcaacatggcaaaatcctgtctctatcaagaaaaaaacaaatacaaaaattagccagtcatggtggtgcacacatgtggtcccaggtacttgcaaggctgagttgggaggatttcttgagaccaggaggtagaggttgtggtaggctgagattgcgccactgcactatggcctgggcaacagagtgagaccctgactcaaaacaaacaaacaaacaaaaagaagttagaatagcaaccctgcttctattttccatttgcttggtagatttttctccatcttttaaatttgagcttatgggtatcactgcatgtaagtgagtctcttgaagacactataccattgcgtcttgcttctttatccaaattgcctctatgtgccttttagttggggtgtttaacctgtttacattcgaggttagtattgatatgtgggaatttgatcctttcattatgttgttagctgcttatcatgcagactggtttctgtggttactttatagtatactggtctatggccttaagtgtgattttgttatggctgataatgatctttcttttctatgattagcaatccattcaggacctcttgtgaggtgggtctggtggtaatcaaatcccttagcatttgtttgtctgaaaaagatcctatttctccttcacttatgaagtttagtttggctggatatgaaattcttggtcggacattctttttcaaaaaatttctgaatatgagcccccatctcttcctggttgtagagtttctgctaacaggtccactgttagctcaatgctgttccctttgtaggtgacctgccctttctctctagatgcctatggcactttttctttcattttcgccttggagaatctgatgactatgtgtcttgggtatattcttcttgtgtagtatttcgtaggggttctctgcatttcctgaatttgaatgctggcctctctaacaaggttgaggaaatttttatggactatatcctgaaataggttttccaagttgtttgccttctattcctgtatttcatggatgccaatgagtcatatatttagtctgttaacaaaatattatatttcttggaggttttgtgcattcttcttcattatttttctttatttttgcctgactgagtaatttcagaggactactcttgagctctgagattctttccccagctttgttgattctgttgttaacacttgcattagtattccaaaattcgtgaagtgatgttttcagctctatcagatcagttggattttttcttaaaatgaccattttgtttgtgtcttctgtatcattttatggcgttcctcagaatctttggattgtgttttgactttctcctgaatttcattgatctttgttcctatccatggtctgaatcatatttctgccttttcagcatgggagggaactagcgtggtcatttggaggtaagaagatactctggctttttgagttgccacagttattgtgctgattctttctcatctctgtgggctgatattcttcagtcttcgaagttgccattctttggatttttttttttctgtttttatcttctttgacacactttggggtttcactgtggattccatcaaatgagtttgtttctggtagattttaggggggaaaagatttctaactctaagtctggggtctagttttggacaccggactttgttctctggcacctcaacattgggaatctgctgtgctggaagggacattgtgttcctgaattgctggccacaacactctgaaggatggtaccagccaaagctcttcattgaatagtgacagtgtaacgcaagcttgttaacacatgccagcagcagcagtgtggcagggtataggctcttggaccgggatggggtgcaggctggcccaaggctgccagcttccatgcgggcattggcagtagcctaaattcatctttatgcatgtggatatttaattttcccagaatcatttgttgagaaaaatgattaattcctattgaattgcaattgtatgattttaaaaatcagctgaccatgaatgtcattactaatttctggacagtcaattgtgtttcattgttctttttgtctctcatagtgcaattaccacagtgtcttgatttagtccagtaaacttgcagtaaactttgaaatgagaaactaatcctccaactttgtatttaaaaaaaaattattttattggcctaatcacttggcatttccaggcatatttttggagtagttttacattttctgcagaaaaagctttctgtgacgtgatgagggttgcattataaattgctcttcacacgtaaagactcgccttgtgctggatttcatttcaggtggtccttattgcttgcaagctctttgatgaatacaaacataattttggcccctttatttatcttatgctagttgttgcagaaggacatcttgctttcttgaacctattasatctattcaaaagtggaagttttcacaggtaacctctctgtatcaagtaacacaagatcaaataaaacacgagcaatccttgtttcgtgcctgaaccagacaggtgatattgaaatcagttatacaaatgtgtactaactcttcataaagactatccaaagagggtattattatcatctgcatttaatagatagctatcctaaggctgttgtaaaatagattctcggatcatacctatatgaagcagagaactggatttcctttcctggcagtctgactccaagatcctttcttagaaacaattatactgtaaaaactgagaatgaataaaacccaacattggagactgattttaacatctgttaatcttaaaccattaaataataaaaataagttaaaatgaaagaaaaatatccaaatattcatatacagagaagtcaatattcttcaatcgaaaacacattttttaagtgctcaaggaatatttacaaaaatgctgaatatttaattaaataattcatatttgtatatcaaattgacttaagagaatgacttccttaaaagcctaaggatgcgagatcagttcgataaatattgaaaatgggctgaaaattatgagtaggaaaatagggccatttcaacctgcatgtgacatccctaaaatttattttccattttggaaactgtaggacaaaaactattcccattcatgtggggtatatgtatatgtgtatgggtgtatatgtcttcccaagaaaatcttgaatgcttttgataggaaaaatttagattctgtttacatgtatctggtattgagaaaaataaattaacagcagtcatgatacaagttatgatcaagcttccttcagaaatttagacatccaatatatgatctatgtattgggtttaaaaatttccatagcaagtgatgttgctgaacacaaattatgactacacgaggaaaatattgcaaaacagtgaaagagaatatgtcttcatttgcatgcttgcaaatgagaaatcagcttttacttcmaaattattatgaaaaaagcctatagcaagaagagacgttgtttaaatagtaggtaatttgagccgttttgaaaattacattttttccataaaggcagcattgaactcatccattagtatgccctagcgctttcctatttgacattggtcccagaattgaatttagaagaaccaagaattttactgmacattcagaaatcaggatcgcagagagtttaagatcaagaccttaaaggggatcatgaccagtgatactgggcttgcccttttttaatgtgtgtttgttcagacatgggaagtttactaccaatcttttttttttccaaactagtaatgatagaatttgtattttcctatgatgcctatattaaatgtataatcattttaatattttaacacttttttaatgagttctttcaagggttgttaaacaatctaaacaatctaattttcccttacaatatgctgatagctaatcatattttctcaaagtcatttgacataatgtttgattgaagaaaatatctctggtatgactctacttgctgataacaaaagagaatttgaaacttcaagaaaaaagattagaaaagttaacaacataatacaaataagtatattaaatatataatttattcttaagaaatgtatatgaaatcagagtcgtagaatgaaaaaagagtaatatgtaatttttaaactacagttacatttcaaatgtgaatttaaaytgtaaaatgttaagtttaataatattttatataaatataaaagtgcaaaaattattctttgatgtttctaattttgaaaagggcatgaggcactgacaattttcagacacttctcctaggattatcaattgaaagaattcctttggctgagtatgacataatctgattatgatggaggatcacctcataagacccaatatttgtactcctactggaatacatatgaaaaaagtgtgtatcactgtgttttaatagctcaagttgagaagtctcccaaatgtccatcagtgataaaatgataaataaattatggcatacttatgcggtagagtactatacagcaattaaaaagcaaaccagagtgacatgtttacaaagaatttatataacaaagaaaatgaacaaatttgagctaaatagctaatacagatgtgagaggaattatcaatattgaaaaaatattcaatataattcaatttatatgaagtttgcaaaaatatattttaatacattgtaatttattacattggtggcaaaactctaaaacgaaacatataagtgattatcataacaactgggatatgtgggaggaagaaaactaaagagaaacaatatcaacaagaaggtatatatggggagtgtctggatttttggcaaattttattttttggccaagatgtagtaaacatgggagataaacttataattttttccctaactgtgtatttaagttttgttacttttcataactatgttatgttcgacaatagtaaaaatatttaaaaatcagaaaataaagtaaaataataaaaaattaagccaaaactacatatgtgcatagatacaatggtattataattatcatgtttttcttaacaaagaagcatagtgcattatggtagtaagaaatacaagttaaaattataagcttttctttaaattaatttttaaaagaaggtataatctagaaatgtaaatttaaattcttaatgctaatcttggacaaagcctccaggagcaactgaaaacctctctgccactggcctctgcagtagaactgcccttgccactcttggactaatgaaggagcaaagatcctaagtgccttatccatacctccaacaagatgcagtcaacccaaggagagaaacccagttagacttccatgggtcccacaaatgcacaaaccctccatcttgggctgactgcactgagtgtttgctgacctgcatctctctgggatggaacccccagaggttgactcttggccacaaccactactaagatctcttcagtgctacctctaaactgggaaaggaatataaacactgagattccaccagggctgcagttggcagctcaggaatgccaagttttgaactgtagccaggactgaagggcacaaggaacctacatcttcagaacactgagagggaacatggctgcaactgtgaggaaacataggggaaacatataattgagcaacagtctatcaactgaccaataagcataagtgtcacctgctggattacaccccaaaacttcaacaccaaaaatgcctcactaacataaccccctttgaagccagagacacaaagtcagcttcaaataaataccctacacaaaggctctccctggtgaaaacatccagaaaggaagtctatttactgtgcctaatatacactgcagttaaagaaacacccacatacagagatgagaaagaacaaatgcaataactcaaatggccagaatatcatatttcctccaaaagactacagcagttttccaacaagagttcttaacaaggttgaactggctagaatgacagaatacagtatatggcagaaacaaagattattgagatttgggaggaagacaaaacccaatccaaggaaaataagaatcacaataatgtgatacaggagctgaaggatgaaataaccagtattagaaagaatttaatgggtctgacagagctgaataacgcaatacaagaatctcacaatgcaatcacaaggattatcagcagaatatactagtctgagggaagagtttcagaacttgaagactggttttctgaaataatacagtcagacaaaaataaagaaaaagcataaaaagaaatgaacaaaacccctgagaagtatgggattataaaaagaggttaaatctgtaaatcactggaatccctgaaagggagagccagaaagcaaacaacttggaaagtatatttcagaatatcattcatgaactctttcccaaccttgctagagaggccaacagacatattcaggaaatacagagaactcatgcaagattctacacaagatcatctccaagatatataatcatcagatttcccaagattgaaataaaagaaagaatgttaaaggcagccagagagaaagggcaggtcacgtacaaagggatttctatcacggtaacagcagatctgtcagctgagttcttacaaattagaagagattggaggcctatattcaacattcttaaagaaaaaaatcttcagccaagaatttcatatccaaccaaattaagctttttaagtgaaggagaaggaagatttttttcaggtaagcaaatgttgagggaatttattatcaccagawctgccttacaagagatcttgaaagcggcacttagtatagaaaagaacaccactaccagctaataaaaaaaaccctgaaacacagagaccagtgtcactgtaaagcaacaacacaaacaagacaacataataacaagctaacagcacaatgacaggatcaaatccacacatatcaatattaatcttgaatgtaaatgggctaaatgacacaattaaatggcacagaatggcaagcaggataaaaaagcaagacccaatggtattctgtcttcaagagacccgtctcaaatttaatgacactcataggctcaaaataaataaatggagaaaaatctaccaagcaaatggaaaacagaaaaaaggggggttgcaatcctaatttcagacaaaacaagtttcaaacaaatgaaagttttttaaaaaaaagacaagcaaggatataacataatggtaaagtattcaatttaacaagaagacctaacaatcccaaatagatatgcacccaatacaggaatgtctggattcatgaggcaagttcttagagacctacaaatagacatacactcccacccaataatagtgagtgacatcaacactccactgacagtattagatcatacaggcagaaaattaatgaagatatttaggacctaaacttagcattggaccaaatggatctggtagacctttacagaagtgtccatccccaaataagagaatatacattcttttcatagccacayggcacatactctataatcaaccacataattggatataaaacaatcctcaacaaatgtaaaataaccaaaatcataccaaacacactctcaggccacagtgcaataaaaataaaagtcaacacaatgaaaattattaaagcatacaattacatggaaattaaacatcatgctcctggatgacttttagataaatttaagtctgaaatcaagaagttctataaaaataataagaacaaagatacaacaaaccagaatctctgagacacaactaaggcagtagtaagagggaaattcatagcactaaatgcccacatcaaaaagtttgtaaggcctcaaattaacaatctaaattcaaaattgaaagaattagagaaaaaagaacaaatcaaccccgaagctagcagaagataaggaataacacaaatcagagctgaactgaaggaaattaagacacaaaaaaccattcaaaagatcaatgaatttgggagttggaattaaaaataattataaaataggccactaggtagactaattaagaagaaaagagagaagatccaaataaacacaattagaaatgatttaaaggaatgttattacttaccctacagaaatggaaacagccatcagaaccactgtaaacacctctgtgcagacaaactagaaaacctagaagagatagataaattcctggacacatacaccctccctgctgctggaagtcagagaccccaaayggagggaccagctgaagccatggcagaagaacataaattgtgaagatttcatggacatttattagttccccaaattaatacttttataatttcttatgcctgtctttactgcaatctctgaacataaattgtgaagatttcatggacacttatcacttccccaatcaatacctttgtgatttcctatgcctgtctttacgttaatctcttaatcccatcatyttcataagctgaggaggatgtatgttgcctcaggaccctgtgatgattgcattaactgcacaaattgtagagcctgtgtgtttgaacaatatgaaatctgggcaccttgaaaaaagaacaggataacagcaatgtttagggaaaaagggagataaccttaacctctgactgctggttagctaggtggaacagagccatatttctcttctttcaaaagcaaatggagaaatatcactgaattctttttctcagcaaggaacatccctgagaaagagaatgtgtccctgaggggaggcctctgaaatggccgctttggggacggctgtcttttacagtcttagctgagggatgaaataagctctggtctcccgtagcactcccaggcttattaggatgaggaaattcctgcctaataaattttggtcaaaccggttgtctgctctcaaaccctgyctcctgataagatgttatccatgacaattcatgcccgaaacttcattagcaattttaattttgccccggtcttgtggtcctgtgatctcgccctgcctccatttgccttttgatattttattacctwgtgaagcatgtgatctctgtgacccacaccctatttgtacactccctccccttttgaaaatcactaataagaacttgctggttttatggcttagggggcatcactgaacctgccaacatgtgatgtctcccccagacaccagctttaaaatttctctcttttgtactctgtctttttatttctcagactggctgacacttagggaaaatagaaaagaacctaagtgaaatatcgggggtgaatttcacccgatactcccaagactgaaccaggaagaaatttgttccctgcacagaccaataatgaactccaaaattgaatcagtaataaatagcctatgaacccaaaaaagcccaagacctgctggattcacagccaaattctaccaggtgtacaaagaagagctgttaccatttttacagaaactaatccaaaaagtttaggaggacttctctttaattcattgtatgaggccagcatcatcttgataccaaaacctggcagagacacaacagcaacagaaaattacagaccaaaatccttgatggacatcgatgcaaaaatcctcaacaaaacctttgcaaactgaatccacaagcccatcaaaaagctaatccaccatgatcaaataggcctcatcctggcatgcaaagttagttcaacatacaaaaatcaataaatatgattcatcacataaacagaactaaagacaaaaaccacatgactgtctcaataaatgcagaaaaggcttttgataaaaattcaacatcccttcatgttaaactatttcaaaaaattagatattgaaggaacatactaaaaataataagagccatctatgataaacccacacccaacatcatactgaatgggcaaaagctggaagcattcctcttgaaaaccagcaacaggaaacgattccctctgtcaccatttcttttcaacatagtattggaagtcctggccagagcaatcaggtaagagaaagaaataaaggacgcccaaaaaaccatagagtatgtcaaactgtttgcagttgacatattctctatctacaaaaccccatagtcttggctcaaaagctccttcatctgataaacaacttcagaaaagttgcaggatacaaaatcaatgtacaaaaatcacttgtattcctataaaccaacaacaatcaaatcaggaaggcaatcccattcacaattgccacacacacaaaaaatacctaggaatacagcaaacgagggaagtgaaaaatttacacaataagaattataaaaaaacttcccaaaaagatcagagaagacacaaacaaatgggaaaacatcccatgttcatggatacaaagaatcaattattaaaatggctgtactgcccaaaggaatgtacagattcaatgttattcctatcaaactaccaatgagattcttcacagaactggaaaaatttattttacaatttatatggaaccaaaaaagagccctaatagttaaagtaatactaagtgaaaacaacagagctaacaaagctagaggaatcacattacccaacttcaaactatgttacagagctacagtgaccaatatagcatggtactggcataaaaacaggtacatacaccaatggaacagaatagagatcccagaaataaggccacacatttatgactatctaatctttgacaaaactgacaaaaacaagctatgggaacaagacttcgtatttaataaatagcactgggataactggctagctatctgcagaagatcaaatctgaaattcttccctgtaccatataaaaaaatcaagtcaaaatggattaaagacctaaatgtaaaaagaaacctgtaaaagccctggaagacaacctaggcaataccatcctggacctaggaatgagcaaagatttcatggcaaagacatcaaaagcaatcaaacaaaaacaaaaattgacaaatgggatcctattaaacttaagagcccctgcacaagaaaagaaaatatcaacagagtaaatcgacaacctacagaatgaaagaaaatatttgcaaacaatgcatctgacaaaggccttatatccaacatctataaggaacttgaatttacaagagaaaaacaaccacattaaaaagtgggcaaaagacctgaacagacacttctcaaaagaagacgtacatgtgaccaagaagcatgtgaataaaaacttaacatcactgatcattagagaaatccaaatcaaaaccacaatgaggtaccatctcacaccagtcagaatggctattactaaaatgtgaaaaacaatcagctccatcatggtggatgggaggcaggactaaattgcagttctgacttggaaagacagaggagcttgtgaaggcttgcatcatgaattttagctccagaaagactgcagaaaaaaatcaggaaatgcgagaggacccacaggttttctgaagaaagtgggctgctcctgcagaacctgggagacaccccaaatactgtgaaggcccaaattgcagaagtgggaaagggagatcctctgcccccaaacacaacctcccctgggaaaactgaaggtctattttatgggaaaagattacaaccttacctggagctgagtyaatttagagagctgagcaaaatacaggaatagagggagcagtagaaaaggccctgtgagctcgctgggtcctcaagcaggctattcctgtgtggcatcacaaagatcctttgggagggtgacaagagggaaatgccacagagagaaggaaatcaccagctgaattttggaacaatttgaagtcatcaagaagcctcctggccagaactgagggaagagttcaaatccattgtgcagactaaataggcaggggaagaactaaagtcctactttctttcacagctaggaggtgggtagcctgtggcaagttctcagccctgcttgccgactgtctggaaacagacagggtgccattggggaggcatggtgggagtgagaccagccctttggattgcatgggagctgggtcaggcctgtgactgccagcgttctctcacttccacgacaacctgcatgactcagcagaggcagcttccttctaggtgcataactccattaacctggaaacctcagccccatcccccctagcagccacagcaggagagagtgagtctgagctcagacatgcttagctctgccccacctgatggtacttccctacccaccctggtattctgagcacaaagggcataaactcttgagagttctagtgacttacccactgccggtgcctcttcatactatcacagctgatgctctctagaaagaactacctcctggtaggaggccaaccacacaaaaatagagcattaaacycccaaagctaagaaccctcacagagtccatttcacccccctgccacctccaccagaacaggtgctggtatccacagttgagagaccaacagatggtttacatcacaggactctgtgcagacaaccccaatatcagcctggagcctggtggactttcttggtgactagatccagaagagagataacaattactacagctcagctgtcaggaagccacatccataggaaaaaagggagaatactacatcaaagaaacaccctctggaacaaaaaagtctaaacaacagccttcagccctagatcttttctctgatagagccyacccaaatgaggaggagccagaaaaccaactctggtaatatgacaaaacaaggctctttaacactccccaaacatcacactagctcaccagcaatggatccaaaccaagaagaaatccctgatttacctgaaaaaaaattcaggaggttagttattaagctaatcagaaaggcaccagagaaaagtgaagcccaatgcaaggaaatccaaaaatatgatacaagaagtgaagggagaaatattcaaataaattttaataawawaataataaattttaataataaataaataataaattttaataataaataaattcaaacatttgatacagttagtacataaattttgatgcataaaaaagttaaaatgaaacacactaatctgttctgtatacacctaaatgtaactttgacactgaaatggattaagacactgctcttctctgaggaactgagtttttattctaatttctggatgtagtgtgtgggaattattatttttgctgctctttttctgaaaaagattgcctttccctaagagctgttgttccaatgaaaacctagtgttttcaacccagcatgaatgatgcaagtgctgaggtcctttgggcgagaccctctggggttattgtagctctcactggagacgtgagctctgctctcttttcaaagtatccatgaagtctcaacagaacccaccacacaaccccccacccaccatggtagtttgtctttctctttgtcytctttcccaacctcatctttattgcctggatatagcgaggccagggtaaccttcttgtctctatgtggatagtacgtttgtacttctagccttgggatttttccttaatatttgtccatgctagctgagtttgccttttcaatagctctcttgactaaatatacggtaatttccaagatattttggttttattttattttatttttgcttagctttgcttcaggggactgaaggtgagggatcagttcttcatagtggaacaccttacatctttctctgccatctttgacgtttatgaggcatatttttctactttgtttggtagctgttgctgaatttgtttcattggtgctttgctcactttacttacttttttagctattgaagaagaatgactgtatcatgctgctgatttccccgtcttggctagacagtatgtcatcctttatctacattggtccctgtagtgaggatcatggagtagatgttgctgggagagtgagtatatgtgaaaaaaatgtgaaggtatttggtgctgatgaarcaatatgccctactgggcaggggagaggcacagaataagaattcttgccatgtggatgaactcattcaaacacaatgactgctttrtgagacaatagatagatttctacctcttctcacatgtacagagaaaatatttccaaagtctccggaatatttacatgtattactatttaatataaacttgcaagtctttttaaatgtgtttaaaactatcacagtactaaacatgaactagatgcataataaatgctgaaagtaaaaagcctgaattatttaagtgaaaagagaaaaagatttagatcccaaataaatgtatgcgtttgtgtgtttgtgtgtgtgcgcgcatgtttgctgggcatgtacttgtaaaaagtaaaataatagaaaagtattattcttggtacccagcattctaggaataatgtcttccacaagattattagaaaactctgctactttgtaggaggagctttggataactatgaataagtccctttacagacttaactttaaaaaaccatctgatttttctttaytttctttatttttattgtaaattgacatattttacttgcatacatttatgaggtatcaggtgttgttatgatttatgamtactatgtggaataattaaatgaaactaattaacgtattcaaatgataataaatataacagataacaggtaacaaatatttttttatggtgagaatatttgaaagttactttttcagcaattttgtaatgtacaatacactattattaaccatattcacaatgctgttcaatagatctcagaaaagcagaacaaaacttattcctcttgtctaactgaggttctgtaaactttcaccatcatctccccatttttctccacccaaacacggaagtatgtaaaaattctcagtgcttacaaagtttcatataccaatttttgtaatgatacttccccagaactcaatttgacagactgaagtatgtagataagacaaaaaaaaaaaaaaaaaacacacaaaccaatgaaaataaatatgtccttatttgcatgtttacaaatgagaattcagtgtttcctttctcaccagctacaaaagacttcagcctactgtgtataaggcacacagcatctggatgaagctcagctgagctgtctggggaaatacagagatttttatgaagagagctttaaacccagccattagcaaatctggatggttgctggtttaacattccctttttaaagggaatatattattgaattttcaagaatcagatatacatagcattttagatgaatgcattaaraagtcttcagcagtgatattagacattggggcatgctcttacaggcaatgggtggtgtcataaagagcatatttacattcgttttaattgtggaatttataattggaaatttaggaaatagtttcatagcactggtgaactgtattgactgggtcaagggwagaaagatctcttcggttgatcggatcctcactgctttggcaatctctcgaattagcctggtttggttaatattcggaagctggtgtgtgtctgtgtttttcccagctttatttgccactgaaaaaatgttcagaatgcttactaatatctggacagtgatcaatcattttagtgtctggttagctacaggcctcggtactttttattttctcaagatagccaatttttctaactctrtttttctctacctaaagtggagrgttaaaaaggtggttttggtgctgcttcttgtgacttcggtcttcttgtttttaaatattgcactgataaacatccatataaatgccagtatcaatggatacagaagaaacaagacttgcagttctgattcaagtaactttacaygattttccagtcttattgtattaaccagcactgtgttcattttcataccctttactttgtccctggcaatgtttcttctcytcatcttctccatgtggaaacatcgcaagaagatgcagcacactgtcaaaatatccggagacgccagcaccaaagcccacagaggagttaaaagtgtgatcactttcttcctactctatgccattttctctctgtcttttttcatatcagtttggacctctgaaaggttggaggaaaatctaattattctttcccaggtgatgggaatggcttatccttcatgtcactcatgtgttctgattcttggaaacaagaagctgagacaggcctctctgtcagtgctactgtggctgaggtacatgttcaaagatggggagccctcaggtcacaaagaatttagagaatcatcttgaatatattagaaaaaaaatagctcctaagaaattcttgtatgttatataaatttatacttccttaagattctttcattgtgtataactttgtgaattttacaaagatrtgcttggaatcaacaccatccaaacatatcacaaattaggatatatgaaagtatgtatattaccatacagagaagaatgcgaatactataaagagttcttatacaaacagataatatagattttgtatcaatcattcaccttttttgagatttttaaatgagaaaacctataatgtataaaatacatgtgtgtatgtatgtatgtgacacagttactaaaaataggcttcttaaacttacatctcaatctggtagataaagtacataaaagaatatggaattttagtacctatattaagtgtttttawtttttgtataatatttagtacctgattagcgtgtatgcaaaaaastaatttgcttcgtttgttgaattagaagccagctgccttactaaactaccacatttgctttgctcattctcttggctttgcagatagaaaattatatcatctgcatatagtgacttataatgattattttacttctccattttactacttgtaattcttttttggtatcagttgtataatgaaatggtttgaacattcaaagtgttaagtaatcctgatcgtaactgctgtctttgcaaatggagtgttttctagtgttttaacaataaacgtaatactgactctagctttgagataaattcttttaaaaatattmttcagggagaatatttgtttcctatcttcctgtgtatagtattgtaataaaatctctgttaaaaactatcaaattttttgctgtttattaagatgatcatattttccctctcctctgaccaattaaaataatgatacttgttaatggtggtacataaaacaatgacatgtcttctagtctatgcattctagatttaataaaatacaatatacatattcatacacacgcacgcacacacacacacasagagagagagagagagagagagagaaataaaattgcaaccttagaggcaaatgggaattcagaaagcagctgcaaggtagtgagaggtaatctccaaaaggggaagataatcccagtttgaataacatgaaaaattgtgtcaaagaactgtatgccagaagacagttgattcattttttcaagggctaaggaatgtaaccgtaatcctgaattctttgctaaaaatttgttctggggtttgaattaaataataacattcccctctccccttaaaaaaagatgagggctgtttactaaacatacstccttactgaaaatgctaataaccaatctgcttcagaaagactgttatggactgacttgtttgtctccaaaatccatgtgttgaagcccacactctcaatgtgactgtatttggatataaggcttttaagtaggtagttaaggttaaattaggccatacagtgaggccgyagtacaataggactggtgtctttataaaaagaggaagaaacaggcatctgtgggcacagagaaaacacaatgatgtatgattccatttatataccattctagaatatggaaagtaatctatagtgactgaaagcagatccatggttgcctggtaactgggggtttgataaagaatgggcagtggtaagttggaggaataacacaggaacataaaggaaagttttgggggtactatatatgtttgttacctgattatagtgatggtttcacatgtgatgagtatcacatggtgagacactcatgaaattgtacactttatatctgtacaacttattgcatgtcaagtatacctcaagtggcatattagaaacaaytcaggaggaaaactgcacataagtatgcattcttagaaagcttctctttgcaactttggaagaatcaaatattattatttcctattcttattttttgatcttagcctgggccttatgtttactggaataaaatatgtaggaattcttgttgtcttatctaccttactggtttgtcttccccagtagtaagtttttaagggaagaaagctgcaggggtgtgtgtatgtgtgtgggggcggggtggtgggagggataggagagcaatagcagagagctcctctgaagtgagttctagctttcctggagcctaggttctgcttcatcatcgaatgccccatgaaaattcagtttcagagcctactccattaccccattttcattcttgtaggaattggtgtgttcctcagattcagctcaatatcctggaagatgccaagcctgtaatgtccatcctacctctgcctgggtcatgtgttggcgctcctatccttgaaagttttttcttaaaatttcccatttttgcctgcttaactcctcaatctggatccctccaaattcgaggatcatatagacaacattacagatctttgctgatgtagtttattgctctctattgatttaaaaattttcttgaagaaataagaatatattgggatttaactccaccgtgttgtttagcaaacctatacttacttactttggagtaagatttaacagccatagaacagatgttgctcagcagaggtgtggggaagctgaataaaacccaacctttgataactctaggggagtgggtattactgagtagaggagaagtacaaaatgaggacaattcatgctctgcagatgttcctctgcattctcaatattgtccctatctggctttaacaaagaggctgctgtgtgggattaatatagagttctatcagttttcataagccctgtaaatggttctcaaatgttcctggatattttcagttaagtattagagaatatcaagggtaattatgtttttaaaatattttgatatataatattttttaatgtcaggataagcttaataaatattaatgaaggaagcaagaattaattattagaaaatcgaagattttgaatccatgtgatttcctgagccctatattcttattgccaaaaagacagcagtcattcctggacaataatcctataaggttattctgcaaagtgtgtgtatacgggaacttgcaaacaattaattgataaataaatgtaaattatcagcactcagcattcaggagttatggctcctctggattcattcagtaaatttcaatgctttgaattataagagctttggataaactatgaaaatatcccctcagtcttccctcagcattcctcagtggagatgattttagtgctcaatatactccatctactaatttacatatttgctatatgttatacttctatccattgaattttaatgcaattgataacaattaaaattaataagcaaattgtgaagagattagataaagcaaacatgcacaatgatgcagagaattgtctttatttgtttattaacaatgagaattcagttttttctttcatcatgaagtatgagaaatttcactttatgttaagaacatacagtatctggatcagaatgcagatagctgtctggggcaaaataatctttttgtgaaaaaagctatgtgcccattcattagtacaccttagtgctttctactttcatattgagcctatagttttttttttaaaggaagaaattaactgcacatccaattaataagtatgtataacaggtacatgtgatagatgaagaaattgtcagcgttgcatttagacattggagctctctctttgcagccatgctaaatgccttgtatagtatcctcattataataataaatatataattcctaattggaattttggggaatggattcataacactggtgaacggaattgactgggtcaagatgtgaaagagatcttcgaatcctcacagctttgactatctccagaatttgtctgatttcggtaataatggtgagatggtttatagaggagctgtagttatctttacagatgagcagaaagaaagccagagctgcaaactcttgtggtgaagagaatacatcactagggggaacccatccctgggaaagaagctgttcttaaaatcagaagtggaaataacttagagtaaaataatcagatgcttgctatcacaatggcattaaaaattcgaagactaggccttttggttcctttgtgaataatcattttcttattatatttactagctggtcattgtgtaatcacaaagattctttagaagttgaattaataaacggctattgtattaaattttattttaattacaatggttttccttcctttccttttttacctgagtagaatctcttgttattttctggacagaaaaacagatctgcatgtggtggtaattttastccttccatttgaatatatgtatctctgttatgtgcttgtttatctaatattaaataaaattattcacttyctaattatccacaacattgacaagctttttctttgtgccttttyattagataatttttcagggtgttgcagatacacrtaaggttagcagctactttgaggtacaccattttaatcatggtcagaaggctaatcaaaaaagtattttacaagaattgttttttaaaaaatatattaaatattatcaaagacaacgttggcatcttttgagatggtcatatttttttttcctctgctgacttcattatccaaaacaaataatgracattccttaacattcctrgaatcaagtctgcttggtcatttaactcatatatcactttaatttgttttaaattatttaaagtgagatttatagttattactgttagagtagtcatatcaaaaaattttttttcaagaacttggggtatttctcttcttttcagcattttgtataaatcagcatactaaaggactgcctgttaatgaggaatcttccatgaaggtgcttttgggaggagtgaattctctattaaatttcatcatattttacttagatattaactactataatgagtttaatatatttttaaggtcattttgtatataagtcactccatattgtrtatctgtaaaaactgtgttcagtttttcatgtttgcttttcagaatgtaggaaaaactcatcttttaaaacacttgtttaagctttacctgattactctgaagattatctgtttcccttattcttccagaattttcacaatcttttgccaattttattggattttcaagaagttattactgttagttcaaaatttatgaatcatttcttctcattcatttaatcttttaaattttcattaattcttatttctgttctcccaagtgtattttgtctctcttttttaattatttgagctcattgcttacttttttttcaatactcctggttgcattataaagtcatcaatttctaaaatgttttctgactattgtgtaaatcaagtcacatcaattttcacacgcaattgcccttcaaattatgctgccgccttgatgaaatccattcaggttttcttaagaatggtaagaatcataggcagggacagaactgatcagtgataaaataggggaaaataggtctagtggcttctggggaatacaggcatagaaccatactcactttcctagaaaacaaaataagttactctcaaacttgttaaagtttctctcagcttctgggactttctttcattggtcctgttttgcttacattcataagctgactagactatcaggaaatgacctgaaaataattgtgcaatttaaattcgagctaagaagacagagaaggaaagaaacagtggaactccttccccaggcagatgacttaataaggataaggaggaaagaagcttgctggaaacatcaaggagaaggggtcctggatgttcttacaatgtgaacatgggtctcagattccagagtcccaaacactcagaaggagatgctataatcagaaattgcaagctgattattttattggtatattgaagttagagcatgatcacattatgtttcaaggcatttgaaacactgtcatcttcttattcacttcctgaaaaagacaaggaagattataggcaagacttgacatggcaggaaatgtstaatacctcattggtttactgcggtgaggaagatgcaaaaccatccttttgccctctatcccttctacagcccccctccttaatatcattttctttgttcacactttctatgccattgcacgtaatgtgctttaaactgttgcttagatgaggacgaaaaacgattattgttaggttgttcatgctttgtggctgttggatacgttaagggttattttcagaaagatggggactgcaacatatcctgtaatagggacagtgtgaaagcagccttaatgttcagtgacaaggattggttaagtaaattayggaaaaaccaaacaatagcatcatatataattgtaaaaaaaaaaactaaccaataaacactgaagagatctaaataaactcatgtgaaagctaagaaataaatttttccaataagtaagacacagaactgaatataaagtgtggtattagtggtgggaaaattatatatagttatgtagcaataaatatttcaaagaggagtttccaaacagtaaaaagtgggagttttggtaagggtagaggggaggagaaatgaattgctatttagcttggtacatgtctattcagtgagattagtttttgttagcttaagcatgtatgactttaaatgtgaaatgtgttttaaaaaatgagataccatttaacagctaaaagtccaaggaccatttagcaggaatactggacttgaaatgctagtgtgaggcaggactgagcctgtcctgaacaaggagtgttcaggtaaaactttaaataaatgggagtctttgagtttgaggaaaggaaacagagtgccaaagggagaacatgattctatgtcctcattcccaaccctatttaagagaggtaatttgaagatagtgattctcaaaattggaattgccttcaagagattgtttaaaaacaagatcttgctaccttatcccagaatatttgaacaaaactcatgagaaatgtgttccaggacacggaaatattaacagcttttcaatagattcactggcacaatgaagttggagaactgtagcagttggagcctttgatggataataaactggaatcatacctrtcattgaatcctagattactgaggagactgcccctgtggaggtccttgtgggcggcccccttggggaggtggtccctggggctttccaggaggaggtgggggaggaccttgctgatggcctccctgttggggtggtccttgtggccttcctcgaggaggacggggatggcctccctgttggggtggtccttgtggccttccttgaggaggagggggatggcctccctgttggggtggtccttgtggctttccctgaggaggtggtggaccttgttgctgctggcctccttgttggggtggtccctgctgagggccatcattctggttcccatcaccagcagagggttgagattgctgtcctcccaaaggtggtccctgacgctcctcatctatgaactgctcagagtctcctccatctgtgtgagttgaaacaagaagagctgagctcatgctggaaaaccctcctgtcttcatayctctctgtcttcaccacacggccggcccctctctscctgacctgcctctcaactcccaacctccccccttcccaaggcttcctaattagaactcctcttaatccacattagggtggtgaaaaatcaaatttctttactcatggtccccagaatcaaggttgggagaaaactgtttatatctctggggcactgatattagccaattcctgacaaggatgataagaagacactggagaactgatcaatttttcagggaaaaatggagacagagtttactgagaatttattgggatttacctgatattaccaagggaacgtcttcttggctgacatctagaaaagaagtacaggatgatgggaaaagttactgcatgaatcattcagagctcatagtgttctacgaggataaaggacctctgatcacaccctgtgcatcccctttgagatctcatcagccactctctgatgctaccggaagtggaagaagatgtaagggaaagcaggattgttactacactgagygtcaaccaggaactcaacatagaagggcccctgtttgtcctctcatgattccttaagccttagtgcttatttagttaaagggctcttgagtatttcaatgaaatatttggggatccttctgccctctttcatctgtaaatatgttgtttatgtttgcaagctttctcaacaggagccaccagacatagccacttagatacaatcttacaaatgcccgtcccagcacattaaaatactacatgcaggagagaaaaaaatgacaatatttcactctggtgattctctaactctatgtagacagaggcaagtgtttacccaattctctgcctnagcaatagctctgacatgtgtttatctmcttcatggatrctcatccactgtccagcaaggccaccatcatccctgtctactgggatcagtatagkatcttcacagctgcacttccctgaatctgtcttgcattctccayatccttcccagcagtcccatgtctctataaatgcaaatctcactctctcactcccccggtacaaattctttattgggttctatttgtgcaatcaataaattatgaggtcttgatgaggaatgaaggcacaacaggtcttctgatccttggcatgagaactcttcagtcctatctgttttctcatcctcctctcttccctccactttccccctctatagcattcgcccgtaaaccccaatcagagtcacaatatcttcccccaattcggcttaccttcatctaagtcctgagctgagctgaaggccagcagggccactgacagsagaatyagaagcatcttgcagaaggctctggtgtcactcccaactttatgctgggagaaacgtgtcagctccctttataaagacaagcaggacaatggcgcatttgagctccctaccaggtgggcctcctcgcctcagagactgggttctgctttgcttacttcaggtcaagtgtatccctcatttcttytgggactctagcctagcaggaagggttggggaggatrttgtttgtggctaatttctaaaaggtacaactatgacttggacaaatgttttgacggaactgtgtccaagcaatcagcacagtgtcaggattgaactttagacatcatttgtttttcaatctgtttggaaagactgctattctgctttccactgtgcttttcatttstgtgtatgtgagtttgtgtgggtgtgtcagggggttgggcagcaatcctacagctaacagtgaagacggtcaatatgtctgactcttttgatagcctatttccatctctcatgatgtgtgtgcatggatatttgtatatttagctaaatttttcatgtaatagagatgctttctgcttatccgtgagttgtgtgaggacagcacactgctgggtacacatagrtgacagaaggctgccccgcagcctcctcatgctacaggaaatttccaaactctgtgaatctcactacactcaggcaagcgttggtgctgtacaatacaggaaagctaaaaaatttgtattttaaaaaatatctttagggattattaaagcaaaactgaacacagaaaccaccaaggaatttctagacctaaacaaactgaaacatggttcccaaagtgagccacacgatgtcatgtagctaagacctccactttctccagaatattctatagaattcatcatctactttatttcttctaacaaataccgtagtcttcaccactaataactaagtggccatacttatatattcaacttgatgatttgtaatgcctgttcaagcctcaaatgccttgattggtcttctgttttttactcagtatttatgtcaccagtttcatcagagttttctttcacaaagatgattttttctatgatattctaatactaattctttctcattctctttcttacattcatttgttgatattttatatgctgagactaccttgtcgtttgtaattttcttcctatatagtttttttctccccacatgacttgtgggagatgacatttatttaatcttctaagcaatggtgtatggtactcctcactatctttattttcatttttgtctctacaattggacaataaactattaagtttctgaaaaatcyttccagggtcctggattggtactcctcttctcagctgctgattgctctgtgatacctagaaattccctgttcctcaattcataaaatatactactcggtatcaccagctgcactttccatttcagaccttgtgtaggccttgtgtaatttttcactttttgtgcacggctagtgtttatttgaggatagcttggttggaggcatggctgagaggccatgtgacagaaaatcataaagacaaggccctagacagatgtgcatgggtggatcctgtactgtgcatacgagggtctggtctggcccttctgaagagttgcagataacaaaacaagaaggcttcctaatagattagatttttctacagacaacaatgttctcataagggacccaggcagactgatattttccctgaaataaatatagacatatttgaagtgggaatgcattcttaattggcaattcttctctggccctgtggaaactggatcagttttagctgggcttgatgggttgtatcttaggcacagggtaggtgcttaagccaagcagctcccartgggttactggrattattttctttggtttcaccagatactgttttccattagacctggagatgagcagtcctgccttggtgatttcaggtcaaccatcatgtcaaaaaggaaggccagagaaagggaacaaagaggggtgccagacagatattgcctgatgatgtgggtaacggagaaagctgcaagcctggtgaaagacagatttctccttggcagcagagtacaggaaragaacaggaaatgctcctaaaggtygctcagctcaggtcccttccatgaccttctccaatgtcaacaatcagcaaaagagactagcatatcaagaaagtataaataccagctatgctctcaccagccaaatcaaaagaaggggtgatggaagagctgaaagggacactgtctgggagtgagtgtgggtgaaagggagaagtaggactgctgcaggagcttgggcacctagagtgggtggcagccgtcaacaacacaattcccttctactatggatgttcacattctgaggtcctgaagcatcagtcttcaacatatgaaattttaggattcatctttcataacacatcccaactttttctctgttactcacaggtgtttacctagtggttcaaaaatcctcactccctccaggcactacccattagcttatctaatttcttccaccttcaaaatacatctcaaatgtgtccacttgcatgatctttactagaagcttgttgttcrgcccacartgctctctcctggaggtctttaacagcctcgacctggtcctggtaacattcttcccccagtacatcccatatcagttccctcacgacaatcagagtgatcatttaaaagtagaaattagatcatatcacccttgtgcttcaaaccccttgtttttccttctggacttayaataaggtccaaatttcatgactcagctctttcacacccacatgactaaatcttttttgaagacccggaagctctctgaatggaatataaagtaggatcttcttcaacttcaccttgctctagtttgcctggaatactgaaggatggtttgccaggaaagatgaacattggcagaggggataaacttctccgagagtgagtgaattgcattgagttgcttgtctggcagtttatgtacattggaagaattattgtattcactgtatcaactaagcagtctgataatacagttagcaaataaacacaatggtctctgagacttcaactttgctttgacttgtctaaaaactttggtttcactatcatggtaatcatctatattttttaatttgatgttgatgacctattaatatatattatacatttcacaattaattatcatatttctattctttccacctatcctagccaaattggttataatagaaaacatttttaaacatttactatgttccacttaatcatcaaaaccattatattagggacatatgattgttatcattaccttagttttatagatgacatgacttaggtacataacaatgttcttataaaggtattaagtggaatagaaggcagtcagtactcagagtttagtgtgcaccactactcacttgctattcatttattcatttcattattacaatatgagaaggaatgaggttcagaaaagaaacataagttctgttattaggagattatcaaggttaagctttcctaagactttaacaggtgaggtgaaaaatatatttttcctgaggaaataagtttgttttaaatcataagcacatttacgtaggcttccattcacctgttttcctccttgccttcatataaagatactcatacaaatttattcgttttttgtgattatgaaaacccagtcaatgtagatcctttatgtgctttcttaatacaagccacatgcatttttctgctgagccatattagcattggcaaaacttgagcctgtcctttgaaatgaaccaaaaatgttgattctcatcacaatgaatgtaaaattttagaagtccaagagagagactggcctgagatttgtgtatgaagggataaatttgtataccacttgcacagatttcagtcttctgcctgagagtgcccctgtgtcctggccccagagctggtgttaccaaaacaggtccgggtcattgatattattactaaggtgttatctgagctcatggtctcatgaccaagaaaattaaggagtgtggacacaaaagggtgaggttggagcaaaagtttaataagtgaaagaagaaagctctctgcagtggagaggggagtcagagtggattgccacttttacagttgaatccacaagcttttatgagaaactgctctccaacacattcaaaagctagcagacagcaagaaacaactaagatcagagcagaattgaaggagatagagacacaaaacacccttcaagaaatccatgaatccaggagttggtttttttgaaaagatcaacaaaattgatagaccagtagcaagactaataaagaagaaaagagagaaaaatcaaatagaccccccaaaaaatgataaaggggatatcaccactgattccacagaaatacaaactaccatcagagaaaactataaacacctctatgcaaataaactagaaaatctagaagaaatggatacattcctcgacacatacaccctcccaagactaaaccaggaagaatttgaatccctgagtataccactaacaggctctgaaattgaggcaataattaatagcctaccaaccaaaaaaagtccaggaccagacggaatcacagccgaattctaccagagttacaaggaggagctggtaccattccttctgaaactattccaatcagtagaaaaagagggaatcctccctatgtcagccattgagttggatcattgtagatgttcatcccatttgagccttcagatgactgtggtcccatcccttatctgatggcaactacatgaaataccacaatgagagactatccactaagtccaggcaattcacagaatcgtgaggaaaaaagtaataaactgctgttttaagcctgcaatttggggaatgatttgttatataaaaatagaaacttagaatagatggagaaatgaggctgggctccgtgtctcacgcctgtaatcccagcactttgggaggccgaggcgggtggatcatgaggtcaggagatggagaccatcctggctaacacggtgaaaccccgtctctattaaaaatacaaaaaattagctgggcgtggtggcaggcgcctgtagtcccagctactcgggaggctgaggcaggagaatggcgtgaacccaggaggcggagcttgccgtgagctgagatcgcactccagcctgggcgacagagcgagactccgtctcaaaaaaaaaaaaaaaaaaaaaaacagatggagaaatgaataaaaagaacttatcactttaatctcaaagcaaaaaaagagtgaaaagagagtgataactagcaaaattttaataagacagtaaaagcaagttcaatgttatcagaaatgttcatgaatttaaataaatttgcttgatctatcaaaagacagagaataaataagaaaacaaaacacgactatgttctgctttcaagaggcatacctaaagcagaaaaccacagtgacagaaaataaatgggtagaatctaccactaactaatgagcacagtaactgctacttatgcctaatgtctattatcctatcatttgttggtgatagaatcacactattcccttggacaatttgtgccacaaaaactttcctatgtattttttagttatgtgaaagatagatgctcttccacatgcatatattcaattgcttgtttatatttgtcatatttaactgaattataactaataatcacataacatttaaagtaaacaacagtaacagttaaagacaggtgattacagagtagtaagaataaaacaattcatcgaaggctgggcatgttggctcacgcctgtaattccagcactttgggaggccaaggcgggcagatcacctgaggtcaggagttcaagaccagcctggccaatgtggtgaaacccccatctctactaaaaatacaaaaaaattagctgtgcatggtggcgtgtgcctgtaatcccagctactcaggagactgaggaaggagaattacttgaacctgggaggcagaggtggcactgagccaagatcacaccattgaactccagcctgggcaacaagagcaaaactctgtctcaaaaaaaaaaaaaagggccgggcgcrgtggctcacgcctgtaatcccagcactttgggaggccgaggcgggtggatcatgaggtcaggagatcgagaccatcctggctaacaaggtgaaaccccgtttctactaaaaatacaaaaaattagccgggcgcggtggcgggcgcctgtagtcccagctactcgggaggctgaggcaggagaatggcgtgaacccgggaagcggagcttgcagtgagccgagatygcgccactgcagtccgcagtccggcctgggcgacagagcgagactccgtctcaaaaaaaaraaaaagaaaaaattcatggaaaagatgcaataatcatgaatttggacatacctaacaatgcattacgtaaatagataaagcagaagcctcacaaacagaaactgaagaatccacaaataataagaatgtaagacacacttaataaactgccatatcaagcagaagaaagaatgatatggaatattttaagaatgcaattagcaaaaattaattcaatacttttatgtagaaatctgtacttgacagaaatctggacacaaacattcaaatacacatgaaacatttacacacctaaaccatgtacactataacaaagaacagattccatggaataagtattacgtagaatgtaaagtagtaaaatgttaaatcaatcaaaaaagtttgaaaattgaactattctctataactgagaaaaagatgaacatttctacataaaagataaatgtttagaactcagcaacgaaaaagcttttcacaatcaaaatgaaaaaaccrgctaaagctaagaatcsatatccattagtacatgytttataaaaamgttttccagatgaatgaggcacatattcaccttcagttaagaaaaatgaacaacagaaaaatttaaagaagggtgaataagttaagaaggagctaatatgtaccttgcgcttacttagtacatggtactgttctaggtggtttaggtgtgctatttattttatatttattcctaaaaacagtctcattccctttggtttttaaagaatcagaggcatgacagggtgctgtggcacctgcctgtaatccccgaacattgggaggtcaagacaggtggatgcttgagttcaggagttcgagacaagcctgggcaatatggtgagaccccactgccctctacaaacaatacaaaaattagccgggtatggtggtgcacctttgtagtcccagctactagggaggctgaggtggaaggatcacttgagcctgcgaggtcaaaactacagtgagccaagatcgcaccactgcactccagccccgggtgacagcgtgagaccttgtctcaaaaactaaacaaacaaaaatccaagggatagcaaggttaagtaaatttcccaagtcatagactcagcaaaaggaaaagttagaatttgtctgaagggcagtaattatgcttttggatgtcaaccaaaatcaaagtagtaaataaataaatgaatgaataaataaatagaaaatcaaaatataatagacaatggtagtacaaccaaaatcttttaaagattaggaaattcaaaagtctgatggtactgatcaagaaatacgagaagcagaaaaattgatgaaatgtagaaaatactaaatagcagagctttatataatcaaagttctaaataattttattccaaaatttaaaaactcagttgaaattgccaagtttttaaaaagcataggttaacaaaaatttatattagtagtaaaaaactttaataaatcaacaatttcaaagattttgaatggactatcaaaatatacacaagatatcaaattcagatggatttataaaaaacttttactaagtttaaaaatgtcataatttttaccttctccaaactacttcagtgaacctaaatgttttattctcatttattttaagaagttaaaaaattattctcaaartgagtaaaaacagtagaggacagcaaataatgagaaggtaggcaattagatacaggcacaaaactgctaaaaaaaagtgtaaaagtaaattagtctcataatatatacttaaaatatattacaaatgaaaagattcattctaagaatttgaagataatttaaaactagaaagtaaataattttaatttacataaaattatctcaacagatgttgcaaaaatgtttaatctaatttaactcctaatcaagataaatacccaaaccaagtttaaatagaagcaacatttaataacttgtatgtctactaaacaaatacagaagcatagttattagtgtaacatagagcttttcatttaatcaagattaagacaaagatacttgtttattgacaatttcgttaggtcatttaactaatacactttgacaaaaatattgttacatagaaatttggatggaaatttaaagaaattatatactaatagtagtaattccacctagataatttaaaaatcaacaggaaaacttttgaaataacacaaatttgataagcttgctgagtacaatatcaatatatatgggctaaaattacacctattcaccagcactggtccattaaaatgtggaattaaaaaaattccctttcttattacaaataagaactatattttgattatgactaagtctcagaaaagtgtttcatgatgttatatattgtgaaattacataactataatactttagtgaaggatttgaactatatagatatgcaaaaattaattttcaaagacattgattatkctcaaattaattcacatattcaatataattctaaccagaatcttaaagaaatttattttcaarttgacaaaacagtcctaaattacacatgaattaagtattcaaaaataattcagacaattcttgaaaaagaaaattaaggtaggggtatccagtagatagcaagacttatttaaattatttatttagtggctcatacttgtaatcccagcatgttgggaggctgagatgggaagatcacttgagttaaggcattcaagacccacttgagcaacacagtgagaccttgtctctaaaagcatcaaaaaagtagctgggtatagtggcaactgtagtcttagctacacagagaatsaaacaggaggattgtttgagcccaggaggtcaaggctgaagtgagccttaattgagccactccagcctgggctacagagcaagactctgtcaggaaaaaaaaaaaaaagattaaaaaawtttttttaatattttttgagacagagcaagaccgtgtctcaaaaaaattattaaaaaaatcaaaacaatgaaggttgtgacacagaaataaaatgtatataataagtaataggtcagcagatcaaactaaagacaggtctggtgagaccagattgtttattcttatcacataggaacctccgtacgtgatagayttggcattagaaatcaacaaaaaaaaaacgtagactgttcaactaatgatattgagacctctgtcatttaatattgggacaaaattgtatttctaactcacaacaaacagaaaaactacattagatgtactatcactttagatttgaaaacaattctttaaaacttttacaagaaaatcaaaataagactctactgcctttaatttgaggaagcacatgtcattaaggaaaagactgatgagttcacatttgctgataaaaataatataatctgtccatcctaagttaggtgtccaacaaatagttacatgtctatcytctcacctttcatgtcctccaacacttctctttaaagagtggcatagaataacatcatgaaagaatgaggaaactccagtgcaacaaaaaaattatagagtttataaatatctttttttgtttacaaatatattgtgtgagatagatttttccatcttaaatatgtgaagaaaaattaaccctgcaataattagtattgtaacaacaatattgcaatttgaaataagacaaatgtgtaacatacttcttcttccaaagtaaataagaggattaaatatagaattgaaaaagtaaacaatcaaacagagaaaataccaagaattgttttgtaatcttgaaagttgggaagacatgtttaaacatgatattaaaggcagagtacatttaaaatgaatgcatttaatagcatgactggaagaatttctgaatgcctcaagaaaataaatataraaaggtaaataatagattaaaaactttaaagtctatttgcaatataaacagtagaaaaaaatttaatacttttactgttttataaaaaagataaaaataattttaaaaaccagattatcatatataaaaaattcagcctcacatttaaacaaaaacgtaagtttagtatagtactatggtaaaatgaataacaagtgctctattttgcatttcaaattggccacattttgcttttgtaaattgttacatagaattataatgtgtgcaaagttacgagcagtctcgtttaatgctagtgagagcttacattggtgcatgcattttgtaggggactttgtcaatattaataaaagtcttaaatgtttatatagattataacctgctttttggacttcacccatttctacgacttcatcttacaaataattggagatttcaccacagagttttgtcttagtccattttatgttgctataaaagaatacctgaagttggataatttatttttttttgcatttttgatcatgtggatcttttaaaaatgtattatttatttatttattaagttctggggtacatgtgcaggatatgcaggtttgttacataggttaatgtgtgccatggtggtttgctgcacctatcaacctatcacctagatattaagcccagcatgcatcaactcttttctctaatgctctcccacccccgtcctgccccaacatgcccgctaagtgttgttcccctccctgtgtccatgtgatctcattgttcacctcccaattataagcgagaacacgtggtgtttggttttctgttcctgcattagtttgctgaggataatggcttccagcttcrtccatgtccctgcaaaggacatgatcttgttcctttttaaggctgcataatattgaagctggacaatctataaagacctaatgtttctgcaggctgggaagttccaaaagcaggcactgatatctgctcagcttctggtgagggctttccagctgtatcttgacatggcagaaggtcaaaggggaaatggacatgtgtgaagaggcaaaacctgaggagccttctgacactgtgaccactcagtcttgcagaaacatttccatgaacacgaattcagtcagaagagaacaagaactgactcagtactgctggttttgagttcattcctgctactgaattcagaaatgtcctgccaatgccattcttcaacatcctgttagtctcctaattggggactgtaatgtgtacataaattgaagtttagggtgaagcaacaagtgaaaacagtgaaaggaaaactgtccgtaactgcatctgagaacactagacttcactgggtattcttttgaatatggaaagttatcacctgtggctcttataaaaaactaaaatatttgttagtatgaaaattgccagctgaatcatttgaaaaatgattgctctgatttcataaagatcaatatgacatgatcctacagaagaactgattttaatgtaattaacaacaaattaacaatgagcaatggaattaatggacatagcaagagagaagtactgaaacaataaatattaaatattaatcccttaattattgtattaatcccttagttgaaaataaaaaaaattataaaattaggaatttttctctctgaagagaagccaggtatagaggaggacattttcatggtggtattaactatggaattcatcactgacttaattggcaaggaacaggatatctgcttcaatgacctcattctcaccagcttatctcatacgtacaaatatatacatatctgtatataygagtctcacccatgtatacatatatttaaatgtatacatatatatgagtctcactgtcacccaggctgactggcagtggcataagcatggctcactgcagcctgggccttccgggctcaagcaatccttccatctcagccttctaagtagctgggactacagatgtgcaccaccatgcccagctattttwtttattttattttattttattttattttatcttattttatagagaggtggtctttttatgttgttcaggctggtctcaaactcctgggctcaagatatcttcccattttggcctcccaaaatgctgggattagaggtgtgagccactgtgcccggctcaaatatatttgttgatgataacactaatccatttctgtggcactttttttcaggtatttatagcaccagtaaaatggggagaatgatagtttgcttgggtttctgaatggtccttttgcatatttgtttaccacctacctctatttttcactgtcttggtgagagcccattccttccaccaactcttttcatagctaacatgacagtttatgtggttgttactgttattttctatggttctctatctgtggcaggtctcccttaaagacaaggaaatgttctgagttgggggaagaatataagtctcattaaaaaagatgtaattttagaactaggaaaaaaagtgtaatcttcaagagattctcatattgtctgtgagctcccatttgtctcataatatgttaaactgcatctctggaacagggtttgatatggtttttctgtgtccccatccaaatctcatcttgaattgtggctcccgtaattcccatgtgtcatggggaggaactcagtgggaggcaactgaatcgtgggcgggtctttcccatgttgttcttatgataatgaataagtaattctcatgagatctgatggttttataaaggggagttgccttgcaaactctctcttgtctgctgccacgtaagatgtccctttcctctttctttgtcttccaccatgattgtgaggcctcctcagccatgtagaactgtgagttcattaaacctctttcctttataaattacttagtcttgtgtatgtctttattagcaacatgagaacagactaatacagggttttagctcaacatgtgttaataaggtcaactaaggcacactaaagttttttaaaagtttatttgcaaatgatggttcataaattggaaagctccaaactgaggtggttccggagctctaccgagggaacgcgatggggatgcttttataggacagacaaagaagaaaagcaaagacaggacagatgaaataaggtaactttatagctaaccaatcaaatgtttggctatcctgttggctgtctttgattggttgagtttaagtttagcaaacaagtcacagtttttgtctagtctgctgcttcttatatttgctgggttttgttgctttttcacccctctgcttttctctctggatttaatatcagatactttgagcattgtaaggcttcattcaggaaaccagatatttaatcactctgccttgatattaccttgtcaaactgaaagagcagtaactgtcagttgaacctttttctgtaaatataatctagtcagaatttttaacatggatgtaacaaccatacccttgagataatcctagtcttaaggctgagtttttttgtttgtttgttttttgtttttttgagacggagtctcactctgtggcccaggctggagtgcagtggcatgatcttggctcactgcaagctctgcctcctgggttcacaccattctcctgcctcagcctcccagtagctgggactacaggtgcccgccaccatgccaggctaattgtttgtattaatagtagagatggggtttcaccgtgttagccagggtggtctygatctcctgaccttgtgatgcacctgccttagcctcccaaagtgctgggattacaggcgtgagccaccgtgcccagccatggctgagttttaaccaggcttagaaactcaaatactattcagtgttgagaagcagttgcctcttccagctctgcaaaatctcaagtttctagactcttctttctgatatatttttttcctgcttgcaaagtagtataaaattgtcagaatcaaaatgaagtcacttgtgttaaaactctgacaaatggagctggagaaggccatgaggggagagttcttaatgtaaatacgacttataacaagagctaccagaaaagactctacaaaacaacaacattgcacaaaggccactgcaaccctacacaaaaagatacttctgcaaggacatctgctcanaacctccttgtctaaccttagacaggtgtcacccttgttcctgatccttggatccaaggttaattatctcaaaacaattatgtaatcttcctcttttagaaatccttgtcttttctaatgtccctgaatanacacataatttactatggcacawgtattctcattgcaatattactcccaaataaatatcattttcttttagagcatctccctctgtttgctatttagctagacagtaggcaattattttctaaagtcaatttttttaattgtcaaatgaaccattaatatattcaattatattttttttctagagttacaaaactttcaaatatgtgatttacctcccacataaccacaggtgactgctatcgaatgttttgccactccctatcttgttttacagtaaacagtaatgttttttcttgccactcactgccaatgaatcaagtattaagccagtgtcacataagttaggtgttttgttttagtaacataccagttcaagaggccagtctcatacttgccaagatagcttagtctatgctgtactaacaagatccccaaakctcagggactccacgtaggagaagtttttgttgtttgtttttgtttttgatttctgttacatgtcctgtgctcatagtggtcacaaaagaatccaggctgatagatggtttattgacccttgtttgagtgtcaaggcaagaagatgagaaatttgcagtcttatagtggtgagtaaatgctctcactctgaagcaacatgtcatttccacaatattttattgaccaaaaatttacataatatacaacttcaagggggagaggggactcctacaagactacatttcttatcctacaaggaataaaatgttagcatatagctctaggtcccattttacgacctctatgctatgtacaagatatatatctaaatcctaataacaaagagaagttaaaagtaaaatttagaaaaatcacaccataaaacactaacawaaataagctaatgtaatcattttaatatatactaaatagattttttttttttgagacggagtctcgctttgtcacccacactggagtgcagtggtgtgatcttggctcactgcaagctccacctcccaggttcctgccattctcttgcctctgcctcccgagtagctgggactacaggtgcctgccaccatgcccggctaattttttgtagttttagtagagacttggtttcaccatgtgttagccatgctggtctcgatctcctgacctcatgatccrcccgcctcggcctcccaaagtgctgggatttcaggcgtgaggctaaatagattttaaggaaaaagacattagaatagataatgtcacctcatgtgagtagaggttatatttgccatgaagatactacaattctaacgctctatgcactcatcagcatggcatcaaaatatgtaaagtaaaagttgacaggacttctaaaagacatagataaacctatactcatagcaggatrgtttaacattaaatctcaagaaataatagaataaaaagacaaaactcagaaaaggtaaataggatttaaataacatgattacaaatagatctagtggatgtatgaaacactgcaccccaaagctacaggatacacattattttcagcaaacacaaaacatttatcaaaattgaccatatatgcataacataaattttagcagagaaaattttatgtaaatggaaactygaacatatattttaaaaatagtctatggtggaagaaaaatcacaataaatttagaaaatatttaaaattaagtataataaaatatagtaaaaccttgtgagaaatgctgaaaaattctaagaggaaaacgtatgccaggaatataacagcaaacatactcaacggaagtaaaaataattaaataacaatataagagatgaaattaatgaaaaataatacatctgaaaagatcgaccaagacagacttgaatagactaacaaaataggcaaacttctggtaagataaatcatgaaaagaaaagcaaataatatgaagaatttaaaggatatattctgttggtattaaaaatttaataagatgatattataatcaaaattacatgaaaacataaataattgaaactgacaaatatctagaaagtcgtaactgccaaaacaagaccagaagaaataggcaacggaatggttccagatcaagatcatagaaatgtatgctcatgtactcaataataagttacatgttaaagaatgttcgtagcatcatcatcatcatagtctccaaactcaaaataaaccaactttgtgtttccactagactagataaattttgaattgtcattccattaatactatacagcaattgaataaatgatctatctctatatgcaacatgattaattttagaaacataatattgatcaaaaatagttaaattcaaaaatattgtgtacagtattattccattcatgtgcaatccaaaaccaggcaaaaccaagctagtgcttagggatacatattcaaattaaaatatacaaagttaaacaataacgtgatttgaattgcagatagttgttacttctggaatgaagataggggttgtgattagaaaggagcaaataaggtgttatggggtttacaaagttctctttcttgccatgggaggcttttaaattagtgtgcactttatactatagcatttaaacttcattaaatgttctatatttgttatatgtaacaataataggcagcaaaaatgaaaaagagaaaagaaatatttctaaacaaatgatatgaggttagctaaatcttaataccaaattctcataggcacaatatgagaaatgaaaattaaatgtcaatattccttaaaaacatagctgcaaatatcctaacacaacgttggcaaactgcatccatcagtgacttaaaaaatactttacatactcaaacctttcattgtttcctcttcctgccctttgcctcattttccttttcagttcagactgctgaaaaagtttttctgtgatgctccctagcatctattctctttctcttatagaagtgagagactacatctctttgattaaattyatatttttaaatgttttctcttatggaaacacaccaggaaaatgcagctcagaaccgcaagcctgttatccattctctatgtctttgtcatgtgttatatcacaagttctaaaaactgtggtattttttcatataccagcaagtacagtaccattcctcaggcctatttgtacagatttgggrtattatcaagttgtgaccggcatccccaaacccttttctctagataggtaggaagaacaccctaaaatgaaaaagtataaaagatctcttcagccctgggtcaagaatgcaaatggaagaccacatgccacatagctacatatttaaaggtcataaatatacaaacctaacaaactgttaaaggagayattttctattctatcttgacaaatataccattataacaacaaaatagaaaatatctacctattttaagttataattgaaacttgcaaatcattaaagatgatgcaattattttgtaaattttttagtactctgtagatcacccaataaagattgcatgagtaataaaatacaaacattcataattcacaaattatatctttattaaataaaaatagctttgtattcatctagctaaatggctacttattatcttataatyaagataaagtgttttatttatattaattttgaattagacaatctttcttgagtctccacgttttcagaattttggtaatccactttttttcggtagtttttgaaagagtggggcggggtgaggaaccttgactcttcacaatgaacacattagtcccygcttatctgcagtttcagtgacccaaggtcaaccacagtccaaaaataggtgtgtacagtacagtaaggtatcttgagagagtgagagacaccacactatatattttaacacatttttttactttttatttttttaatttttatttattttagatacagggtctccctatgttgcccaggccggtctcaaacttttgggctcgagcggtcytcccgcctcaatctcccaaattgctaggattacarggatgagccacaacccctggcaacttttattatagtatattgttttaattgttctattttattattagttatttttgtaatcttttactgtgcttgatttacaaattaaactttatcataggtaggtgaatacaggaaaaaaatatattgtatatagagtttggtactatctgctgttttaggcatccactgggggtcttgggacataggcctcatggataaggggaactagtgtatctatttctttgcttggttttcagttttgcaagttatgatgtaatatagtactgctttctttggtagctgttgctgattttgtaaaatttgtttttttatcacttttaagtttaaaaaagaaatatgaggggaaaagcggataaaatgtgaaggcatttggtgcctatggagggatggtggtgagcactgctaagtagtgatgaggcagggaatgagaaagatggatgctttgtaaaygagtttctctttagtcacagtattgaccagatccagctttagctccacaagaaattgagcactcttttgaaatagcataggtaagtctttgcatattttataaagcttcattggctatgctattagccataaaagcttcatttagctacatattctatgaatcagatttttataatatttgtacctcagaactcaagctggttgaatctaattttctatgctcagacaaggcaaaaaagtacaaaacaatgaaagagaatatatctttatttgcatggttgcaaatgtgagtttaactttgctgcataatcatctatgaaatatttctgcccatggtgaagacataaatatcttagctagggctcagcagagaaattgaagaaaaataaagatatcaccagaacagttatgtgaagatcgatcagcaaactttagagatttctgctttgacgttgagccaacaatgaaagaaggagcagaaaaaggagaaggaagaagaactccactggacactcaaggatgtgaatagcattttagatcagtgaataaccagcagtgacattagacattgaactttctctgttctgacatggaaagtgccctgccgagtatcttcactcttgtaataattgcagaattcataattgggaatttgagcaatggatttatagtactgatcaactgcattgactgggtcagtaaaagagagctgtcctcagtcgataaactcctcattatcttggcaatctccagaattgggctgatctgggaaatattagtaagttggtttttagctctgcattatctagccatatttgtgtctggaacaggattaagaattatgatttttagctggatagtttctaatcrcttcaatctctggcttgctacaatcttcagcatcttttatttgctcaaaatagcgagtttctctagccctgcttttctctatttgaagtggagagtaaacaaagtgattctgatgatactgctaggaaccttggtcttcttatttttaaatctgatacaaataaacatgcatataaaagactggctggaccgatatgaaagaaacacaacttggaatttcagtatgagtgactttgaaacattttcagtgtcggtcaaattcactatgactatgttcagtctaacaccatttactgtggccttcatctcttttctcctgttaattttctccctgcagaaacatctccagaaaatgcaactcaattacaaaggacacagagaccccaggaccaaggtccatacaaatgccttgaaaattgtgatctcattccttttattctatgctagtttctttctatgtgttctcatatcatggatttctgagctgtatcagarcacagtgatctacatgctttgtgagacgattggagtcttctctccttcaagccactcctttcttctgattctaggaaacgctaagttaagacaggcctttcttttggtggcagctaaggtatgggctaaacgatgagaaactcacaatttcataagccattcagaccacagattattgaatattgcagacagaaacaggagtctacaaggagtttaaaagatattttatgcttcccctggtttcttttattgtgaaggtcactgtaaatgttttaaattcttctctataatagcatcttacctaagaatattatgtatttatgacatgtatttctacattattaggaatttgaaacttatttgaggaaattattggcagattctattgtaaattaaaaacatatactacagcatacttagatgttarttgtaaatctacaatcttttgtttggcaatggctcttcaattctaaatcattcattgagatgggtgatttaggtaattattttattatctcaagtactcctatttaaatggtgagctacagataattagaacagttatttggaatagaattagggaagtttggacttgccactattactatactgatgtgttgagagaattgagagggttaaaaagtttaatatgagtaactgccacataaaaagataacggttttttagtaattatattgtatgtatgtgtacatacatattttacattatgccttttaaagtaaatattattgaggtataatttacatataataaaatgcaacatgttagtccacatttcagttagagttttgacaatgtatacacttgtgtgaccacaatgtcagtgccctttgcagtttaccctctcccctccagccctttttcccaagcaactacttatctgcttttggtaacaataagagagtttttgatttctagaattttatgcatctatatatctatagatatagatatatagatgccatatatacacacacacacacacatacagttatagagtgtgtattgttatatgtgaggcttctttaactcagcataatgtttttgaagttcttctgttttgttgtattaatcagtagtttgttcctgagcagtgttcctgagtagtgttggatataccacattaaaaaatttctctttcctgttaatgaacattcaaatggttttcaattattggccattataaataaaactgatatcaacattcatgtatttctcttcttctggatatacaatttcctcactcttgagtaaatacctatgagtaaaaatgtcaaatcatatgataagtgtatgtttaacttaagaaaaaactgccagagttctatagagtggttgcaccatttcatactattgccagcaatatacgagtgtttcagttatttcacattctggccaacagttggtaggtactctgttttgttttctattttggccattctagtcagaatgtaatggcatctcatcatagttttaattcacattttcctaatggctagtgaggctgatgattttttcatatgctttgggtcattcatacaacctctttttatgaaatgtttgtttaaaccttttgccaactacttagcttgattcattgctttctgtttttattactgagttgtaaatgttctttatatagtctctgtattagtccattttcatgctgctgataaagacatactcaagactgggtaacttataaagaaaaagaggtttaattgactgacagttccacatggctggaaaggcctcacaataatggcagagacaaaagtcacgtcttacatggtggcagtgaagasagaatgacagccaagcgaaaggggaaaccccttataaaaacatcaagtttcatgagacttattcactaccatgagaacagtatgggggaaaccacccccatcwttcaattatctcccactgagtccctcccataacacatgggaattatgggagctacaattcaagatgagatttgggtggggacacagcmagaccatatcattctgaatataagttctttatcagacatatgttttataaatattttctgccagccagaggcttgtcatttcattttctttacagtgtctttcaaagagaggacattaaaaacttttaatgaagttcaataatcaactattttcctgtaagaaaattatttttaactttttttgctttcaaaaytcaaagatattttatggawcagttggaataaatatttgcaataaggcacagttatccttgagtataaggacagaaagcctaatttcattttctctgctgtcagaacaggttctttggtgataccacatgcatttttagtaacctgtttcaatagtactatctacttgagcattstcattttctctcttttattttctttttagaaaggacctcccaaatgggtttgcttaaaagttaggtaagtgagaggagtagtatgatcatttttatcattaatttctctgaactctcttgtagtttatttacccaatagcatctttcaatatctgtcagtattttcacctctgcactcatatggtccscacaaaaaacactataatagttaaggactgagtctggagtcagaggtacaattctcaattctatcacttagtagtgttagttaaaattgtatagttcctatttataagtgaaacatgcagtatttggttttctgtttctgcattaattcactcaggacaatggcctttagctgcatccgtgctgctgcaaaggacatgatttcatttttttttaatggctacatagtattctatggtctatatataccacacttttttggtctaatccatttttttttctttgagacagaatcttactctgtttctcaggctgaagtgcagtgacatgatctcagctcactgctgcctccacctcccaggttcaagcgattcttctgcctcagcctcccaagtagctgggattacaggcaggtgccaggacgcccggctratttttgtatttttagtagagacagagtttcaccatgttggccaggctggtcttgaactgctgaccacaggtatctgcccaccttgacctcccaaagtgctgggattacaggcatgagccactgtgcctggcctgtaatccattgttgatgggcacgtaggttgattcccatgcctttgctattgtgaatagtgttccaatgaaattgtgagagtacatgtgtctttctggtagaatgatttattttcttgtgaacagagtgagaggacaacagagtgaaactctgtctcaaaaaaaaaaaaatggattagaccaaaaaagtgtggcgtgcatacaccatactgagtaatgggatgactaggttgaatggtagtttattttaagttctttgagaaatctccaaactgctttctacagtggctgacgtaatttgcatgcycaccaacagggtacaagcgttcccattgctccacagcttcactagcatctgttttttttttttttaactttttgatagtagctattctgactggtgtgagatggtatctctttgtggttttgatttgcgtgtctctaatgattagtgatgttgagccttttaaaatatttgttggctgctcgtatgtcttcttttgaaaagtgcctgttcatgtcttttgctcgtttttaaaggggttatttgttttctgcttgttcaattgtttccattccttatagatttgggatattagacscttgttgcatgcatagtttgcaaatcttacattctataggttgtctgtttactctgttgatagtttatacaatgtgtgcagaaattctttagtttaattaggtcccacttgtcaatttttgttttttgttgcaattgcttttggggacttagtcataaattctttcccaaggccaatgtttagaatggtgtttcctaagttttcttccaggattattgtagtataaagtcttacatttaaatttttgacccatcctgagttaatttttgtatatggtgaaaggtaaaggttcagtttaattattttgcttatggctagccagatatcccagcaccatttactgaatacrgagtcctttccccattgtttatttttgtcarttttgtcaaacatcagatggctgtagttgtgtgtctttatttctgggttctctattctgttccattggtctatgtgtctgtttttataatattaccatgctgttttggttactgtagctttatagtatagtttgaagtcaggtaatgtgattcctctggcttttttctttttgcttagggttgcttttgctatttgggctctttttttggttttatatgaattttaaaatagttttttttttctagttctgtgcaaaatgacattggtagcttgataggaatagagttgaatctgtaaattgctttgggccgtacaaccattttaacaatattcattcttcctatccatgagcatggaatacttttccatttgtttgtgtcatctatgatttctttcagcagtgtttcacagttctctttcacctccttggttagctgtagtcctagttgttttttttttttttttttttttttttttttttttttttttgaggctattgtaaatgggaytgcattcttgatttggctctcagcttgaagatttttattgtatagaaatgctactgatttttgtgaattgatttgtatcctgaaactttacagaagtcctttatctgtgccaggagccttttggcagagtctttagggttttgtatgtatggattcacatcagcaaagagatatagtttgactatggcttttatttttctatttggatgcctttttttttcttgcctgattgtcctggctaggactttcaatactatgttgaataggagtgatgggagtggggacccttttcttgttccagttctcaaggggaatgctttcagtttttgcatgttcagtgtaatgttagctgtagttttgtcataratggctcttattattttgaggtatgttccttcaatgcctaattatttgagcgttttttcaagagtccagaatttccttgttarttttctgcctcaatgatctgtccaatcttctcagtggggtgttgaagtcccccaatattattgagtgggtatctaaatctttttataggtttggaggtacttgtttcatgaatctkggtgctccaatgctgagtgcatgtatatttggggcagttaagtcttcttgttgaattgaacmctttattattatgtagtgcctttctgtgtcatttttttactgttgttggtttaaaatctgttttatcttatataggaatagtgattctttctttttttcttttctatttgtgttacagatccttctacaaccctttactttgagcctaacagtaacattacatgtgagatgggtctcttgaagacagcagaccgatgacttttgttttttattgaatttgtcactctgtgacttttaagtgagggtatttagaccatttacattcaaggctaatattgctatgtgaggttttgattctattttgaagttgttagctgggtgctttgtagtttctattgtgtggtttctttatagggtcttgggctatgtgcttaggtgtgctattttggtagcagattttcatgtttagaactcccttaaggatctcttgtaagactggtccagtggtaataaattcctttaccctttgcttgtctataaaagattttatttctccttcagttataaaggttagtttgatggaatatacaattattggttggaaaattttctttcctttaagaatgctkwaagtaggcctccaatctctcctggcttgtaaggtttctgctgagctatatacttggccttatggggttccctttgtatgtgatctgatctttttctctagctgcctttaagatttttttctttagtgtagaccttggatagtctggcgactatatgctttggtgatgttcatttcctatagcatcagtcaggtgtcctcttgatttcttgtatctgtatgtctacctctctagcaagattagggaaattttcttaaattatttcctcaaatatgttttccaggttattaactatttctccttctttctcaggaatgccagcagtttatgagtttggttgcttcacataatcccatattgctctaagactgtattcatatttttaaattatttttaatttttttttctgggttagttcaaaagaccagttttcaaggtctgaaactcttctgcttggtccagtctatgagagattgtactttatatgaattcaattgtactttataattccttaagtaagtttctcaattccagaagctctgattgatttctttgtaagatgtttatgtcttccttcatttcctggattgctttagaaatctctctgtattcattttcagccttgtcttgcatctcattgagcttccttgcaatctatactttgaattttttatctgtcatatctgagcttttgttttggttagggaccattgctggagaggtactgtgctcctttgatggtgttgatttcattacattcactttttttatggtggtagaattcttgttctctttcctcctcctctggcaatactggcacttctaatttttgtaattatttccataaggtaggatttttttctttatttccctataatattattgttctttttttctttccctttccattccccctccctccttaggaggtatgactttagagaattctgggtaggtcttttgcccagcttctatagccttatgcacttacagrttgcaggttttatattagactgtgcggttcaacctacaagccagtagatggcacttataggtaagagccagttktggacaatgtgatggttatatatttgatccttgtttactggaagaaactctctgttgctgcagataatggtctgactcatggagtacacagtggtgtgaactccctgctcagccttgggggttgtggggagcaaggtgggtggggccagacaaggcaggtccacctataggtcttccaatggcagacacaagcaccaacactgagggagaatctactgagtggctaccaagtgaccagagttctgtctaggggtggagctaggtaaccccctcggctccaagttctttgcacagggatattggagagattggcctaaactcttaatccaggagagtgggggctctgaatacctggaaatctgcctgcttgtggagcagaacccacccccaccaaccaagatttctgcacagggtaaatggggtgactcaggcttcttaactaggcaggcaggtgctcttaawgcttggatatttgcctgggcataaaacagagaggatcagcccwgtacatggatctgtgaacgggaagggtgaggcagcacaggttgccagtctgtgtgagcaggtgctttgaatgctagggtatgcagcagagaggacctccctgcatcaaaatctctgcacaggaagggtaggggaggataggctgctgagccaggtgaatgggtgcttcagatatctagagttctgcctggctgtggagcagagagggccccattgcaccatgacctacgtcaaggaaggttaggtggttcagggtgctgaaccttgctagcaggtgctccaaaatcctgggatctgcctaggcatgaagcagagagggcctccctattctaggatctctgcacaagaagggtggagcagatgaagctgctgaaccaggtgaatgagtgatccaaatgcccagatttctgcctaraggtagagtggaggagagtctgctgcaccacaatcacaggggaacagggtggggtacccagcaatgacacacacagactagttccaagtagctaagctgcctggttgcaagtctcatcacataggataaactggctgtagcagctcccctcctgccccaggcctgtgatgggggatagcacagtttcagtgtttgctgctaaggttttttttccccacaattctggccatggaggtccccaccctgctctaaagcaggtgctccaatatctggcccaagactaaaatgcctgcacagctacgctgctkagttaccaaagaatgattgactttgtggcatctgaattaaaaatggtatcctgctctcagtcctgggtctgagaaaaggcctgaaccttttcccagtgtctttcccttacaatgtctctaagcctttctccaagttatctccagggctttggagaaacaaggtactcttccctctgagcactgggttgctcagatccccagtggaaaggtgagtcacagagggaggctctctgcctctctcacctactggagcttcattcacttttttaactgggtgccatcatgggkgctgtttgcccatgttcccctccctgggatctgtgtgtccttatgattctggtagattcccactttccttcttgaaataaagctcacagagttaacctttatgagactttgttgaaaaatttrtgtaggttggtatttttttcttcttaaatatgtgatgaaaataaacattcaggtcatcccttgctttgtgtgaaagttttaaattaagaattcaatttttaaaaatagacactaagattttctattyctttgtgtgcctgattcagtaatttctttcagggaatttgtccattttatctaatttaattcactgaaataattttataaatattattcctcaatttcttggtctgtttgtgttgstataaaggaatacctgaagctgagtaatttataaataaaagaggtttatttagttcatggttccgcaggctgtacaagaagcatggcattagcatctgcttagtttctgctgagagcttttgtgctgggtcaaaccatggtggagaaggtcaaagcagaagcgggcacatgtgaagagagaataaaccaaaggggcatcctggctttataacaattcactctcatgaaaaacaactcattcccctagaacaaattcagtcttgtgagagtgagaactcactcactacaytgaaaatggtaccaaggcattcatgagggaaccaaccctatgactcaaacacttctcactaagctcaacctcccaacaccactactttggggatcaaatcccaatatgagttctgatggggacaaacaaaccgtgtacaaaccatagcattctgacttggtcccctgaaaactcgtgtccttctcacataaaaaaaaatgtaatctttccatcccaacaatagtcccccaattcttaacacgttgctgcatcaattcaaatgtctgaagtccaaagtctcatttgagactggaagtcaagttccttccagctatgagcctgtgaaatamaaaacaatttatttccttccaagatacagttgttgtacaggcattggatagacattctcattccaaaagggagaaatcagccacaagagaggrgcagtaggcaccacgmaagtacaaaacacagcagggcaggcgttaaatattaacgttctaaaataatctcttttgactgtatgtgctgccttctgggcacatgcctcttctttctgagacttcactcttagtggtctcactctctcatctccgcaacagtcacactgctttccttgttcttcctcagacacactaggtacatccaatgttagcacactgataatgctgttccgtgtgtctggaatgtactttacccagacaaaacatggataatttctttacctactttaggtctttgttcagacatcaccttctcaatgagtccttccctaagcaccttatttaaaatttcaacccctcttctgacatgctttctattgaccctctctacttatatttgcaacttcttataaactatattttatatctgtatgatatatattttattagttatatgtttagagttcatcttttcagaatgtcaacttattaagggcatttaaaaatagttgtatttaatgcttcatcccacctcctagagggctggaacaaagaagatattcaataagacaaataaaataaccctttttcagcatataatattttcctgaatttccctttgtttatttcagtttcagttttgtttgcatttcatgtttgcctatcacaattagcctttcttttagtcatggagttttctttgtgaatttacctagggtgtatcttttggtgggctgtccaactcattcatttctttgactcctcttaggcctatattatatctccattggttttgaatgtcactaaattttggactagctactttgggagggaaatgcagcagttgcattacacaaagaacatgactaattggcctttcctggtttgacctcatcagaattaagattaagttcagctcaacgtatgaaaaaattatagaaaatttatacaagttccccttacactgaggaaaataaagatgctatggatacctttatttgggatagaagagaaaaacagacatggaaattagaaatracaaaatattgataccattcatatgctaaataattctattctgatgctctattgctgcataataaaatcacccagaaacttcatggtgtaaaataacagccattttattgtgcttgttgatatggtttgaatttctgtcctcgcccaaatctcatattgaattgtaacccctaatgttggaggtggggcctggtgggaggtgattggattatggggggcagtttcccccttggtggtggtgtggcaatagtgagtgagtgagttatcacaagatttggttgtttgaaagtgtaaggcacctcccccatctttctcttcctcctgctccaaccatgtgaagatgtatctgatttccccattgccttccrccatctttatacatttcctgaggcctccccagaaacagatgccgccatgcttcctgtacagcctgtgaagccatgagccaattaaacctcttacagaaacccagtttcaggtgtttctttatagcaatgcaagaatagactaattcacttaaagattctgtaggttagggttttgttcaagacatagcagggatggcttctttttgttccagaatgtctaagcctttagccagaaagttatgaacaactgggggcaattcaagtgaccaggggctgaacttatctaaggcggagctgagaaatacatagaaatgtcaatgataggcaatgatagaaatatcccctatgtatgttggctataaaatagtcacacgtggctagtgagcatttgaaatatggttagtaatactgaggctctgtacttttaatcttatttaatttttattaatgtgaatttaaaaagccacgtgtgacatgtggctagtatctaccgtatcagacaggtcaaatatcgctttcttggctcataggtttagtacctggggtaaaaggacgtaaaagctgggctcacgtgggataatgagccagagggcctgcayatggcctctgcatgtgggtttggacattgtgacctcagagtagttggactacttacatgtggcttaggactccaagagtaaatattgcagtgattaagaaaaaactgcatggcttttcatgatttagctttagaattattatagcatttttattagttgaattagtcacaaaccattctagatttaaggacagagtacacagactcctaagatatcaatagaagaagtgccaaagtatgtatcgtatgttttaaaacttgcatactctctctctcttttttttttttttttgagacggatctcactctgtcacccaggctggagtgcagtagtgtgatctcggctcactgcaacatctgcctcctgggttcaagcgattctcctgcctcagcctcccgagtaactgggattacaggagcatgccaccaagcccagctaatttttgtatttttagtagagacagggtttcaccatgttggccaggctggtctcgaactcctgacctcaggtgatccacctgccttggccttccaaagtgctgggattacaggcgtgagccacygtgcctggccaaaaacttccatactctctaaaagatttggtattatatcagagagcagttttctccattttcttaaactttgcatattttataaataatctgcattagtgaggttgataatgaagaaatatgctgatcataaactctaaatatatactgcatttttctatatgggggcttagaatttctagcccagggtggtagatgaatcaaagggatacatcatacaaatgaataacytttaagcaaaagatggcattgtaaaactataaaggagaatctacttcaattttgcatgttaacaaatgagggttcaaatttgaatgcagaactttccatgtaaaatacaaccagagtcaatagtagcagggaatataatatttgccttgaaaatcactagctgataccctcaagggaaaaaaacttgtatattttacaatttagttgaaatctaattttagaacacaccttggatctctccagactacaccaatggccatcaataaaacagaaagaagtcactcctttggatatataaatctataacagtgcagctaggatcaatcagccaatggtgtattgaaggcagagattcactatgtagaggcatgtcaagcatttgggagacactgtttataagaattcttgtagtgtaattcataatggggactgtgggaaattgattcattgtattggttaatatcattgaytgaatcaggaactgaaaggtctccctgattgattttattctcaactgcttggccatctccaggatatgtttcctgtagataacaattttagctacctctttcaatataggctatgagaaaatgcctgattctaagaatcttgcagtaagttttgacattctctggacaggatccagctatttctgcctgtcctgtaccacttgcctcagtgtcttctatttcctcaaggtagccaacttctccaatcccattttcctctggatgaaatggaaaattcacaaggtgcttctctttattgtactagaggcaacgatctctttctgcacaacttccattctgaaggaaataataattaatagtttaatctaagaacgggtaacaataaaaggcaacttgacatttaattatatggataccatgcatgatttcacttctctgtttctccttcagatgatgttcatccttccttttgtggaaacactggcttccattcttctcttaatcctctccttatggagccacaccaggcagatgaagctacatggtatttattccagggatcccagcacagaagcccatgtaaaacctataaaagctataatttcatttctactcctctttattgtgcattatttcatcagtatcatactaacattggcctgtcctcttctagacttcgttgcggcaaggacttttagtagtgtgctggtatttttccatccatctggccattcatttcttctaattttacgggacwgcaaactgaagcaagcttctctctgtgtcctgaagaagatgaagtatgccaaaaaggacataatctctcatttttataaacatgcctgatatgagtgatgatattctcagaaagaaaaaaaggaagaagaacaggagggctacacatttgtttctttcacctacctcttattttctcattatgttctatgatatattgagcattattgaaaatacttgctgatttaaattaagcagaacagattgctaccttgtttgcaccatatatggagattatgtatttartagtaaaattctaatatattgaaaatgcatttttcattaggcactgtgatcaatataatagattactctatctttaaattttattawtatgttgcataagcattagaatagaatagaaatacatcaagaattataatatctatgtatgtgtatagagtgtatataaaatcagatttatatgtacaaacacatagggatttagttcctatcctaaaaatgatgatcaattgataatttaaaactagaaaggaaaactcaaatgaaaatagttagtagagtctacagcttagtgaaaactttgaggatatgaaacaaagtcaattgaaatgtacatcactaagagttatttccaaatataagccctattctgttaatattttcagtcattttcagttaaaaacactaagcaactttgaccatcaaaaatgttacaatcttgaccatctacaacagacttgtactgtagaatctgaatctttggactaacaataaaattttactcaattggttaactgtgtaaggaaggcaaggacacgtattaaaaaatcagtaagattttaagtaagcaaaattggaggactgctgctggcatctagtgtagagttaccaggtttagtaaataaaaatatagaagrccaagacgatagtaacaaatacaggatctcatttgatgaaagtcactgtgtaaagaaagaaaaataaataaagttttgaaaagaaaaacaaatcagggataaccaatcagtttacagaattgaatttaataagaacgtctcctcttaaaaatgtaatgagaaagcatgtaaaaatagcaggttaaataaaagaacacaatcgcaagtttaaggtaacartaataaatatttaaaatgaaataattggaagcagattttgaagaacaattacgttctctctaagaaaaaaaagaacatattgcaagcaaataatataattttcagcagtaaagacaaaagacaaattttcaacattgcagaaagtattttaaaaagttaattatatggtaatcgatagaacaaaaagtaaaccctagaaaaataacctggacattgcaggcctaaaacgaaattttaaatgtgtgaataaaattaaaatatccagagaatagaccacgagatttccatgtgcaaaggatgaaatccctttaggacagtggttctccacacagggcaattttgcccccctaggggacatttaataatgcctggagacatttcagttaaaattggacggatgctgctggcatctattgtaatgttaacagattaagcaaataaaaatataggaggcctagttaaatttacatttcagacaaaagaaaaaacaacaagaataaatttataaataagtattacttgtgataaccataatatgagtttacatcataatgtaagtgtgctatggaggaccaattacagacctgcagcattgataattggatacacagacaatgacaattatttgttgcttatttgaaattcaaattgaactgacacactctgtattttacctgataactgtacgaggacaaggatgctgctcaatatctcacaatgcacatgacagtccctcacaacagaattatccagcataaaatgtaaattgttctaaagttaaaaatcatgctttgtgaagatgtaataatgaaaagcacaaattccataatagcaattaggactgaaaaaataaaatcagttattgatataagatttcacacacaccagctgccttccttatctctgaaatgtccagcttaccatacttaggctctgatttctgcacatacatccccagttcacacttgcttmcaagcaggccttactttgagacaggaatgatttgggctgctttagtccttcaccaattgctgattaatgagctgtgatggcttccagttaaaataatttgtgggtgaaaaattcacaaaatatacttcatttttaaaaattagagtatagaaattctcaaagctgtgttcttgtttatagggtactgtgaattcctaagccccataattctgtagatagcttgtttatggcagtcttctatttacctccataacaattttagattttacttctttttcttcctcctatcatgatatgggatattctgataatgattttagcaattttgctaagtgataatcacagacttaatttgaatcataaaatgacataccccttatgaaataagattattcactttcctttcaatcctttctaactgctccagtgctctcaaagggtagtgtcatccctgatgtcacagttctcctgtcccccttacctctggactcatctcttaatctaaaataaaaacaaattgtatgcaaaagaaagaaacattttttwaaaaagttacttctgatggatttagttctgtccaggaagaaaatagatgatatattcagaatactctacaatctttggcaactgtgtaaccttgatcttgggratggatgttgggaaaaaaattctccatgaatgtattgcacttctgcatggtctagctcttatcttgtgagcaaacagtatgtttgatgagcaaacagaagggcctcaactaggatcaggtgagcaaggcatgcagggtgcaaagtttgaggagccacttggttttagggccctgcaacctattgaatgcctttttacgttttgtgccctaggagtctcgttcactttgcccaagaccaggtcatggcaaagagccttgggatttagaaatagggtatccctcttggtcaraaggcagatttgtttaaagataaagactcttctcttcttcttcttctctccagagatatttgcttacattccagtgtaaagcttcttcttcagaaggcaagatggacaggttactcacagtgatcaaagtttttaagactggagtttcctaattttgagatttctcttttgatagacaccactacttgcacatgtaacatcagtttctcatcttatccctgtgaggggaytgaagcttgaagaaatagtacgatgatattcctctgactactgctagtacttcagtgaataataaaccatcttttgccttctgcaagtacaagtgacaagctaagttgttagcttataataattttggcaacgaggatggaacacagcccaaagacctggccttctgaggagaaagtgaaggatcctacaagctgattaataggatttgctgaaagtccatgggaactggtagctaacatgttgactaaaatgtttgtaattggtaaataaatattcttctattatgttgctcattaatgaggaggattgggaagtggttgaaaattgagtaccactggtagaactgaaacagacttccaaatgacacttttagatttwgctgtcttctccagataacattaggtagacagaytaaagatctcccaaagttgttacaggcctttggtggaaaggtgaaaagattaaggatctcccaaagttgttacattcagatgcttattcagttaaccaccgagtagtggcaataatgcttatttgaaagtaaatgtgtcttgcatactggcctgaagacactttctctatatttccctgataacttctttacctctattctgatgtcaattgctttagggattcgggctgggcctgagatcttcctgacccaagggacaccaaagaccctacagaaccatcccaacatattgcaaagcttcaaggagagtagggactcaaattagtatagccctgttggatatatgtgcacaaatcaccattctacttggttctgggggttgggggaaggggtgctgagggatggaggacaatagcatgtgaggaaatacaaaagagaccctactgggaggtgcactagaaagaagggcaagaagccaagaggaaaaaaaaaaagccaaccctcccctcccctcccatcccctcctctttccttcccttcttttcctcccacctcagccacccaaatgactaggacaacaggcacacaccatcatgcctggataattttttagtgttttgtaaagacagaggagtctcactatgtcacccaggctggtctagaactcctggccttaagcagtcctcccacctctgcctctccaagtactgatattacaggcatgagccactgcaccggggaggcctacagtcgttctttatagtttaccctcttttttcctgcattctataaatactcaaatagaagatagcagggccttctggctactgtgacagcctctaacaagcaggtttagaaagaaaaaggaaaaagaagtgcctgagttcaactgatgaggaytgaacaaacagtgcacacacacacacacaaacacacacacacacacaccaaagttaggaagactttgtggatagggccctttggacccattcgatgcactgctttttattgtctttatatctgtatgtakggtgtgatattaaatacttaaaatattatctcataagtgccagagagattgacccagggaaaaccaccaaaaatgttagtgggacaaactccctggccatttgagccagttggtggagcataatttaccatgagtgccttcaccctccaatgtccgaacctacccttattgggctttttgtgtattgcaaaaagagaaaatccctctgtgcaagataaaacagaaaattactcaatgtactcaaaacaactcacaaaaaatcgaccatttctcaaggaatgaaacaatcaagaaattacaaccttgaaattacttagatattaaaatgaccaaagactttacaggagctgttgtacccatccttcatgaggtcaaggtagacactcwaaatgaatggaaaggaaaaacttgtcagcagaaaaataggaattataaattataaattaagaaaacagatattttagaaatgaaaaatataatgtcttaaaaaacctttattgggcatgataaatagcataaagaaaatgatggaggaaagacagtgttcttgaggttggatcaatagaaattatatactctaaacaatacagggtaaaataattgaaaaaattatacatcatatcatgaatatgaaaggctataacaaatgrtgtactattcatgcattctgagtttcagaaaagcagaagaggttgatgttgaaaaaggactcagagaaataatgatcaaaaattttccaaacacagcaaagagcataaacctacrgattcaagaagctgagcaaatcccaaccagaatacaaccaatgaaatccattccaggaaaattcattgtccaatwtctgaaaattaaagacaaaatattgaaagcagaaagaaggaaatgacatcatagttatagggaaaatgcaatataaataatagtggttattatcaccagaaaccagaaataacagtagaaaggagcacaaatatttaaagtgctcaaaagtagaaatggtctaccagatgtttatgttcaataaaaatatccttcattaatgtaaaggaaatccaggcattctaagaaaaaaagaaaagctagaaacctaggagaatttctttccaacaaacctatctttaaataatagccaaatgaagttctctaaacataaaggaaagaatagaagagaaatttgtggaacatcaagaatgaagtaaaaataasagaaagggggaaagtgggcaaacacaatatatcttcctttttcacttgagttttcttcatatgttttaaccagccattgctagcattgaagatggaagagagacaggaaatgtggaaaaatgacattcttctctagagcctctaggaggaaactcagccttgacacatggatttaactcagtgaacctcagttcagatttctgacctacaaaactgaaaaataataaattcattttgacctaaaaattataaagggatgtaaggtttccatacttcactaaaactggtaaaaagtgtacaccactagattataagctatgtacatgtaaagtaaaacatagaagaatcactaaaaacactgttcagagagatacactcaaaaattatacggatcaactaaaatagaattataaaacactttcagtggccccataggagatcaggaaaaagaaaacaatcaaaagtagtataaataaaaaacaaaaaatatgacagctctaaaatatcaaaaaatgcattaagtgtcaatggttattgaaagtaaatttttgccatctcagtttgtgatttacgcttttgcatagatatatactttaagtcacaaatatttgtataacaactaattatacataaactcattcatattctcatgcaaatatctggaagaagcctgggtgagtctctccaactctcactgagccaaaccaggtctagatgggtaaggtgtccatcctgtgtgttctatgaagattaacagtctcccaaagtcacacacttcctaattctcagacaagtgaatatattaacttacatgacaaagggaaattacatttgcgaatcaattgacctgaatttagaaaggttatcctggattatctaggtggactcaatgtaaccataaggtcattaactgcagaagagggaggcagaagagtcagtgcaagggcgacgtgatgctatgtgatgggaggctcaagtggctattgctggcattgaagatggaagaaggccaaggaatgtggacaaaaaatgggtgcttctctagagactccagaaagggactcagccttgacaggtggatctaactgagtaagacctattatacatactatgcttctctagtttgccacaattacttaatttcctgtaatttagtgttagccttgttctaaagataagcgccttcttagaaagtggtggatagcagagtgatactcatggctaatgaacaatttgctatattttctaaattgaaaacaacatcgacaacatcyggttaaactggaattacaaagagaagagaaaatcaacttaatttttcctcatttactacagtgaccytagccatgtgacttaatttctttagatataattttttttttgtatttttagtagagatgggaaaaaattagtcagtcatggtggcgagggrcctgtaatcccagctacttgggaggctgaggcaggagaattgcttgaacccgggaggtggaagttgcagtgagctgagatcatgccactgcaccccaacctgggtgacagagcaagacaccatctcaaaaaaaaaaaaaaagaaatatgctaaattaattgtgaaatatatatatttatggaccactaacatcaaatttaaaaatatagaagatatttttaatagttaattggccataatagtgtcaccaaactttttagacaagtcaaagcaagttgaagtctcagagactattgtgtttatttgctaactgtattatcagaatgcttagttggtgcaattaatagaataattctgccaattcataacactgccagaccacagcgacccaatgaaactcactgactctcagagaagtttattccctctgycaatgttcatctttcctggcaaaccatctttagtgttccaggcaaactagagcatggtgaagtcgaagaagattctactttctgttccattcagagagcttcctggttttcaaaaaagagtgaggcatgtgggtgtgaaagagctgaggcatgaaatttggatcttatcacaagtgcagaagaaaaaacaggagatttgaagcacaaatgtgatataacctaatttctacttttaaatgatcactctgattgttgtgagggaactgatatgggatgagctgggggaagaacattaccaagaccagctggaggctggtaaagtcctccaggagagagcatcatggctgaacaatcaccttctagtaaagatcaggcaagtggtcatatttgggacgtattttgaaagtggaggcaattagatcggctaatgcataagttcctggagggagcgaggatttttgaaccactaggtaaacacctgtcagtgaccgagaaaatgttgggatgtgttatgagagatgaatcctaaaatttcatatgttgaagactggcccttcagggcctcagaatatgaacatctatagtagaaggcaagtgtggtgctgagggctgccacccacctctaggtacccaagctcctgcagcagtcctgcgtctccctttcacccaccytcactcacagacagtgtccctttcagctcttccattacctctgtttttgatgtgtctagtgagagcatagctgatatttatgctttcctgatacactagtctctcgctgattgctgacattggagcaggttagggagcaggcctgagctgagtgacctttaggaggatttcctgttcttttcctgtactctgctgccaaggagaaacctgtcttgcaccaggcctgcagcttcctcagtcccccacatcatcaggcaatatctgcctggcactcctctttgttccttttctctgacmttcctttttgacatgatggttgacctgaagtcaccgaggcaggactgctcatctccaggtcctatgggaaacagtacctggtgaaaccagagacaataatctccataacgcattgggagctgctgggctcaagcaactactctgtgcctgagatacaactcatacggcccagctagagctgatctacttcccacagggccagagaagaattgccaattaagaatgcattcccccctgaaataggtctatatttattccagggaaaataccaatctgcctgggtcccttacaagaacaatgtcgtctgtagcaaaatctaatctactaggaagccttcttgtattattatctgcaacttttcagaagagccataccagaccctcatatgcccagcacaggatccactcatgcacacctgtctagggccttgtctttatgattttctgtcacctggcttctcagccatgcctccaaccaagctatcctcaaataaagactaaccatgcacaaaaagtgaaaaattacacaagacctactcaaggtctgaaatggaaagtgcagctggtgattctgagtagtatattttatgaattgatgarcagggaatttctaggtatcacagagcaatcagcagctgaggagagagcgacaaaaccaggactctgacagggctttttggaaacttaatttttggagcaatcagcagctgaggagagagctaccaaaccaggaccctgacagggctttttggaaacttaattttttattgtcaaattatacagacaaaaatgaaagtaaaggtagtgaggagtaccacacacctttacttagaaggataaataaaggacacctttgtagggagaaaaaaaaagatataggacgaaaagtaaacatggcaaggtagactcagaatacaaaatttcaacaaataagtgcgagaaaaagaatgagaaagaatgagtattggaatattacagataaaaatccttggtgagaaagaacactctgatgaaacaggtgacataattactgagtaaaagcagaagaccaatcaaggcaattgaggcttggacaggtattacaaattatcttagatgaatgtataattgtggccatttaattatcagtgatgacaattacaatatttattagaagaaataaagtagaggatgaattctatggaatattctggagaaagtggaggtcttagctatatgacatcgtgtggctcacttagggaaccatatattcagtttgttcaggtctagaaattccttggtggtttctgagttcagttttgctttaataaaccctaaagatatttttaaaatacaaatattttagcttgcctgtgttgtatagcaccaaggcttgcctgagtgtagtgagattcacagaagtttggacaattcttgtagcctgagcaggctgccagcmccyttctytcatatatgtgtgcctgggagtgtgctgtcctcacacatctcacagataagcaagaccatctctgttacatgaaaaatttagctaaatgtgaaaatatccacgcacacacatcatgagagatggaaagaggctatcaaaacagtcagagatattgaccatcttcactgttagctgtaggatcagtgtccaccccccgacacacccacacaaactcacatacacasaaatgaaaagcacagtgaaaagcagaatagcagtctttccaaacagattgaaaaccaaaagatgtctaaagttcaatcctgacactgtgccgactgcttggacacagttccgtcaaaacatttgtccaagtcatagttgtgccttttaggaattagacacaaacaatatcctacccaacccttcctgctgagctagagtcccaaaagaaatgagggatacacttgacctgaagtaagcaaagcagaagccagtctctgaggcgaggaggcccacctggtagggagctcaaatgcaccattgtcctgcttgtctttataaagggagctgacacgtttctcccagcacaaagttgggagtgacaccagagcctcctgcaagatgcttctgattctgctgtcagtggccctgctggccttcagctcagctcaggatttaaatgaaggtaagatgaattgggggaagatattgtgactctgattggggtttacaggcaaatgctatagaggaggaaagtggagggaagagaggaggatgagaaaacagatgggactgcagagttctcatgctgaggatcagaagatctattgtacctccattcctcatcaaggcctcatagtttatttgttgcacaaatagaatccaataaagaattcgtactaggggtgtgagagagtgagatttgcattatatagagacatgggactgctgtgaaggatgtggagaatgcaagacagattcagggaagtacagctgtgaagatcctgtactgatcccagtagacagggatgatggtggccttgctgtacagtggatgagcattaatgaaggagataaacacatgtcagagctactgccgaggcagagaattgggtaaacacttgtctctgtctacatagagttagagaataaccagagtgaaacattgtcatttttctgtctcctgaatgtagtatttcaatgtgctgggaatggcatgcgtaagattatatccaagtggctatgtctggtggctcctgttgagaaggcttgcaaacataaacaacatatttacagatgaaagagggcagaagaatccccaaatatgtcattgaaatactcagagcagtttaactaaataagcgctaagggtttacaggcaaatgctatagaggagraaagtggagggaagagaggaggatgagaaaacagatgggactgcagaattttcatgcygaggatcagaagacctattgtatcttcattcctcatcaaggcttggggaatcaaaagaggacaaacaggggcccttctatgttgagttcctggttgacgctcagtgtagtaacaatactgctttcccttacatcttcttccacttccagtagcatcagagagtggctgatgagatcacaaaggggatgcacagggtgtgatcagaggtcctttatcctcgtagaacactatgagccttgaatgattcaggaagtaacttttcccatcatcctgtacttcttttctagatgtcagccaggaagatgttcccctcgtaatatcaggtaaatcccaataaattctcagtaaactctgtctccatttttccctgaaaaattgatgagttctccagtgtcttcttatcaccattttcttgtcaggaattggctaataccaatgccccaaagatayaaacagttttctcccaaccttgattctggrgaccatgagtaaagaaattcgatttttcatcacccttatgtggattaagaggagttctaattaggaagccttgggaaggggggaggttgggagttgagaggcaggtcaggcagagaggggccggccgtgtggtgcagacagagaggtatgaagacaggagggttttccagcatgagctcagctcttcttgtttcaactcacacagatggaggagactctgagcagttcatagatgaggagcgtcagggaccacctttgggaggacagcaatctcaaccctctgctggtgatgggaaccaggatgatggccctcagcagggaccaccccaacaaggaggccagcagcaacaaggtccaccacctcctcagggaaagccacaaggaccaccccaacagggaggccatccccctcctcctcaaggaaggccacaaggaccaccccaacagggaggccatccccgtcctcctcgaggaaggccacaaggaccaccccaacagggaggccatcagcaaggtcctcccccacctcctcctggaaagccccagggaccacctccccaagggggccgcccacaaggacctccacaggggcagtctcctcagtaatctaggattcaatgacaggtacgattccagtttattatccatcaaaggctccaactgctacagttctccaacttcattgtgccaatgaatcctctgaaaacctgttaatattgccctgtcctggaacacatttctaaaaattgttattcagatattcttgtatagagtatcaagaccctgtgaccctgtgttttacagaagctcttgaaggcaattctgattttgagaatcactrtcttcaaattacatgtcttaagtagggttgacaatgaggacatagaaccatgttccccctttggctctctctattttctttcctcaaactcagactcccatttaaagttttcacctgaacatgctttgctcagtcctgcctcacatcaggctttcaggtccagtattcctgctaagtggtccttgaactttcagttgtaaaatggtatctcatttttagtatacttacatttaaagtcatacatgcttaagctaacaaaaactaatctcactgaaccgaaatgtacagagctaaatagtaagagcctaactcatctttcctcccttctatccttctcaaaacccccaccttttactctttggaatctactttttgaaatatatattgctacataaatatatataatgcttttattacaagcacttataccatactgtatattcagatttgtgtcttactcactggaaaaatttattgtttagaaaactttctcmtgagttcatttagatctcttcagtgtttaytggttagtttgtttttacaattgtatactattctattgtttggttgttccgtaatctatttaaccaatccctgtcactggatattaaggckggattcacattctcactattatatgatatgttgcagtgcccatctttgtaaaaatagcccttacataaccaacagcagcaaagcatgaacacataacaataattgtttctctttctcatctaagcaacactttaaatcacattatgtgcaatggcttaaagagtgaacaaagaaaatattactaaggagaagggggctgtagaagggatagagggcaagagtaggggcttgcatctccatcactgcagtaacccccagtgagggattagacatttcctgccatgtcaagtgttgtctgtaatcttccttgtttgcttgtctttttcaggaagtgaataagaagataacagtgtttcaaatgccktgaaacatggcatcatgctctaacttcartataccaataaaayaatcagcttgcaatttctgctggtggtgtctctttctgagtgtttgggactctagaatctgagacccatgttcacattgtaagaatatccaggaccccttctccttgatgtttccagcaagcttctctcctccttatccttattaagtcatccacctggggaaggagttccactgtttctttccttctctgtcttctatagctcgaatttaagttgtacaattattttcaggtcatttcttgatattctagtcagcttatgaatgtaagcaaaacaataccaatgaaagaaaatcccagaagctgagagaaattttaacaagttcaaaagtaaccgattttgttttctagggaaatgagtatggttctatgcctctattccccagaagccactagacctattttcccatattttatcactgatcagttctgtccctgcctatgagtcttactattcttaagaaaacctaaatggatttcatcagaggcagcctgacttgaatgggcaaagaatttggaatctctcagattgcagtttaagaactatgtcttgctaactctggactcataggaagctacttaagtctcagagcctaagtttcctcttctaaatttttgaataatcaaaatggctcccctaaaggatgaagactaagcagatcacatacatgaaamactagtggatatagtcatgtctgcttcacaataatgattttaggaaagaacagcagacatgaaattgtgaggaattaaatgytcccgagttaaaaatcttaagatttctttgtccaaaaaatctaagtagaatagtctctgatattgtttttttctaggctttcaaacaaaataggaacacaytgagtatycatatttttttttagcattttctttcttatcagacccgtaaaattctaattaggttttttttaaaaaaaatagtatctgcttatggaaatttaattatgacaattagaaatgcaggctctttcttcctcctcctcctcctcttccttcttttttatttctcctactccatctccctctttttcttttttgaaaaaatatgyttaaakttgccttcaattatatttatttatttatttatttatttatttatttatttatttatttattttgagatggagtctcattctgtcacccaggctggyctgcagtggcaagatatcggctcactgcaacctccgcctcccaggttcaagcgattctcctgcctcagcctcctgagtagctgggattacaagcatgcaccaccatgcctggctaatttttgtatttttagttaagacggggtttcaccatgttggtcaggctggtatcgaactcctgacctcgtgttccatccgcctcggcatcccaaagtgctgtgattacaggcgtgagccaccgcacccggtcaccctcaatttatttttaaactttatttttataaatatatgtggttcaaagataattttgttacatgtatacattgcataatggttaaatcatggccttagggtttccataacaagaataacaaayattgcatttactaattaatgtctaactcttaattccctcccacccactcactcttccaaggcttcagtgtctatagttctcccctctatatctatgtaaacacattttagcacctacttattagtgacaacatgttatacttgactttctgtatctggcctttgtcacatagcatattatctgtcacatccagttccattcgtattgctacaaaaggagtgatttcgttccttctttttttttttttttttttttgcagagtagtattgcattgtgtatatatcacgatttctttacctacaaacccattagtatccattgatggttacttaggttgatgccatatctttgctrttgtgtatggtgtttcaataaacatagaagtgcagatttatttttcatatactgatttcatttcctctgcatagatacagtagtaagattgctagattgaatagtaatcgagttttagttctttgagaaatcrtactgttttccatagagtttatactatttactttccaatcagggtgtataagagctctcctttctccacatccatcccaacatctgttttgtttgtttgtttgttttaatcatagccattctgaatagggtaaggtgatagtgwggttttgatttttatttctctgatgattagtgatatagagtatttttcacatactgttgattatttgtatgtcttatttgaaaagatgtccatttctatctcttgttcactttttaatggactattttgttgtttttgagttgtttgtttgtatattctggttattattctctgccagtcctatgctcagtagggttatcattgggagctgtgtagacattgccactagtccaaactcagaagtgaggcataggggagcataacatgcctggcaggggctctcgaagcttgggcagatcagtcctgggctccagcccaacgtctagtgtgcttctctagcagacagccctgtgcccccctcctcccacctctcagattgcggggtcaggattgttacagggaaacacagacacctttagtctctatgccagcttatatgagcaatctccaagcaacaggctgaaggacttacatggaaatgtgatctaaacctagagtctagcttgctttataatgtgtgattattaagagttggagtatgttagccactaattgtcttcttgcactsagccctgaaaatgttaaatttgggcttttggataatcattgggccctttcgatatggagaattaacctttagttctgggaaatgtattgtttcattgatgtgtttctcaatatattctggtttcttggtctgaaattaatgattgttgatattaaagagaacaggttatagraggtggaaatcaagattctacttggtacacggtatgtttacattcattttaaatgacaggtggattgctgaggtccttgactcctgtacagatgcctaagcgcctgctgcagtcctgctcctggctttgactccattctaagtcagtcacagtgtctccttcagctctttggtaatctctgttttggttgtctggtaggttgatacccaatatttattcttgcctgaaacacaaatctctctcactcatttctgacattagagagggtcaggaatagggtgtgagttgagtgatatatggaagcatcacctgttctcttcctggactcaggagacaaggagaagcctgcctcccaccaggactggaacttcctcagctacccactcaaagaggcacatctgactggcattcacctctgctcattctctctgaccttccttacctacttgaaggtctactgtaagctacctaggcaaaactgctcatgtccagtaactcttttgaagtaatgtttggtgaaaccagagacaatcatcctgttaacatcagggtacctgctaggcccaagcagctactctatgactcccttaaagcatgtgacacttagttgcaactgtttgactttccacatagctgcagaatatttgaccactggtattatattccttctcaacccacatcactatttatgtcagcagaaaaacagaaakttaatctgcctaatcaactagaaaattcaatgttacctgtagcaattcttatattattgaaaggccttcctgtaatgtagtaggtctttaaaaagttcatgaaaatgtatgttatattaagaaataccataaaaggattccacattttttggcatcaaaatgaacctaaactgatatgctgtaagatgtctgaataggagctatttcaaggaataatgaaaaataagacaggagtttcaaaacatcccctataagagcaaaatacatttttctaaaattaaagtgaaaacaaagagaaaatttatggttaagcttgcatgaaagaaggtraaaccactgatgctttctgaaaagttcatrtggataatggctgaagaaatcagcagttcacaagtagatatgttatttcaagaagggatgaaatggtgctgaacctcaagtctacrgtgacagagtattcatatcaaatgtatcttgttgataccatgatagaagaggaatgaagattaagagtacaaacaatagccaacccttcatgttttttaattggttcatcttacatgattctaactgaaaaattaatgttgagcaaatttttcactctgtggatgccaaaactatggcaaccagagcagctacagacaagagaagaagcttccctgaaaatttaaataaggggataaagatcctgaagcatttcatcaaagaattgtgacagcagatataacatggctttatcagtacaatcatgaaacaaagcacaatcaaagcaatggctaccaagaggtggaagtggtccagtcaaagaagagtggatgaggaaagtgcaaaggtaattgtaagagtttattgggaagctcaaggcattttgcttattgactttctgaagggccagagaaggacaatatatgcttattctgagaatattttgagaaagccaraactctagtagagaaatgcctgggggagcttcagcagagtccttcaccacgacagagctcctgctcatttctctcatcaracagggcaattggtgagagttctgatagaaaaccattaggcatccacattacaccctaatttakatcctttggatgctttttgttttgtaatctcgtaacatctgtaaagactatttattattcttcagttaatgtaaaaaggacacaccaatagctggtatgttgaccaaaatgtatgaaaatttcccttatgctgttcattaatgagtaggatagggaaatggttgaaaactgagtatctgatggtagaattgaaacaaacttaccaaatgacacctttacatttgcttttttccatagagaacaagaggtagaagaattaaagatactccatcactgttgtagacctttggggagacctaaaattcaaatgtttattcaattggttttgagcaatgtctgcactgcttgaatttgaaattaaatgtgtcytgtttacttgcatgaagacactttatacatatctcccttatcacttctattcctctactctgatctcagttcctttaaggatttgagctgggcctgagatatccctgactcaaatgagacaaaagcttaacagatccatcccaaaattttgtaaagcatcaaggagggtagggattaaaattgcttatatgtgttcaaatcactattctacttggctctgtgggaaatggggaaggagtgctgaaggatataggatggagccacttgtgataccgaggcaagaaaggaagagactccaagtctgtagactccctagacactgggaggtgcactttaaaaaggtaaaccctggagcaagaagtcaagtgaaaaagaaagcctttttggtggccctagtcttttttgttttttgggtggttttcattgttgttttttcagactttgacttgctctctctcttaggctggagtgcagtggcgtaatcatggctcacagtagccttgctctcccaggctcaatctatactcccagctcaccctcccaaatagctgagtctacaggtgcaaaccaccgagccaggatccttttgtaatttttttataaagactgggtcttactatgttgcccaagcatatctcaaattccttgtgtcaaggaattctcccacttctgcccttgaaagtagttggattacaggcatgagccatttcgccaggcctgtagtcgttgattttacctcagccgtattatccactttctataaatccccagtcagaagacagcaggcctacccgggtactgtaatagactctaattaagcaggtgttaaactgtgttgttactgtagggaagaaaggaaaatgaagtcctcaaattcaattgagatttgagcaaatgatgcacaaaagaaaactaaaaaagactttgtgaataggaattttttgggaccccttcagtgcacactatgtatgctatgatgttaaatatacttatagttttatctcgtaagagccataaaggatcatccaggcagaagctccaagtagaaaaatgttagtgggacaaaatcccctgctatctgaaccagtgagtggatctcaattaagcaagaaggcctctaccctccaatgtccaaaactt

SEQ ID NO: 1616 - DNA, 12900 bp, Homo sapiens
tgagaacacgtggagtttggttttctgtccttgcgatagtttgctcagaatgatggtttctagcttcatccacgtccctacaagggacgtgaactcatcattttttatggctgcatagtattccatggtgtatatgtgccacattttctttatccagtctatcattgatgggcatttgggttggttccaagtctttgctattgtgaatagtgctgcaataaacatatatgtgcatgtgtctttatagcagcatgatttataatctttcgggtatatatccagtaatgggatggctgggtcaaatggcatttctagttctatatccctgaggaatcgccacactgtcttccacaatgtttgaactagtttatagtctcaccagtagtgtaaatttttcctatttctccacatcctctccagcacctgttgtttcctgactttttaatgattgccattctaactggtgtgagatagtatctcattgtggttttgatttgcatttctctgatggccagcgatgatgagcattttttcgtgtgtcttttagctgcataaatgtcttcttttgagaagtgtctgttcatatccttcacccacttgttgatggggttgtttgatttttttcttgtaaatttgtttaagttctttgtagattctggatattagccctttgtcagatgggtagattgtaaaaattttctccttctgtaggttgcctgttcactgtgacrgtagtttcttttgctgtgcagaagctctttaktttaattagatcccatttgtcaattttggcttttgttgccattgcttttggtgttttagccatgaagtccttgcccatgcctgtgtcctgaatggtattgcctaggtttacttctagggtttttatggttttaggtccaacatttaagtctttaatccatcctgaattaatttttgtataaggtgtaaggaatggatccagtttcagctttctacatatggctagccagttttccagcaccatttattaaatagggaatcctttccccatttcttgttttkgtcaggtttgccaaagatcagatggttgtagatgtgtcatattatttgtgagggctctgttctgttccattggtctatatctctgtttwggtaccagcaccatgctgttttggttactatagccttgtagtatagtttgaagtcaggtagcgtgatgcctccacctttgttcttttggcttaggattgtcttggcaatgcaggctcttttttggttccatatgaactttaaagtagtttttttccaattctgtgaagaaagtcattgktagcttgatggggatggcattgaatctataaattaccttgggaagtatggccattttcatgatattgattcttcctatccatgagcatggaatgttcttccatttgtttgtatcctcttttatttcattgagcagtggtttgtagttctccttgaagatttccttcacatcccttgtaagttggattcttaggtattttattctctttgaagcaattgtgaatgggagttcactcatgatttggctctctgtttgtctgttattggtgtataagaatgcttgtgatttttgcacattgattttgtatcctgagactttgctgaagttgcttatcagcttaaggagattttgggcagagaagattaggttttctaaatatacaatggcaaattctattttcttaccaaggtatggtaacatcaattttaaccttataattttttatcttactstttattagttgttattactctgtatmtgtatgttttgctccacaataaaaaatgttaaaaaagcagaaacctaaagtacatttctaagtgtaaaattagrgtgatgcagcatattcttatagatatcattgtaattagagtttttgctgaataaagaatagaggattatggtactaagaaatccaagttaaaatttaaaacttttctatttttattttgagacaggatctgactctgttgtccaggctggagtgcacaagaacaatcttggctcaatgcagcctctgtcaccttggctcaagtgattctcccatcttagcctccagagtagctaggacaacaggcgtgcaccactacgccctgctaattttttctatttttttgtagagacatggttttkccatgttgcccaggcaggtcttgaactcctgtgcttaggcaatccacctgcctcagcctcccaaatgatgggattacaggtgtgagccaccacacctggcccaaaacattacttaaattaattcacacaaaagaagagataggcaagaattgttaatccactttcttagtgctaatatgaatttgaaacatcaaaatttgaatatccatgattgatagacaccttttttcttatttccaatttaattatttwtgatacacatttgaaagtgtaagaaattcaggaatttacaataaattatagtacgatggatattaaatatattaaattaaatgtattaaaaatgtgtctctaaatgaaatatttatattcacattgttagcattctaatttcactatactattcctgtgtacaccagtgtgttgggtaaaattttttgttactataaattttttggctgtccattagagaaaaaaatcatagaaaggcaaattttttaaggtataaaaaataatttagcctgatctttgagyatgtttgtgcacatataatgctactttgactgctgtagtaaaataatccagatttagtcaccatagctaagaatgagaaaaagcatttgtgatagtttgctgagaatgccgtcattttttgataaagttttaagtactgttttactatttgatsttttaaagattgttaaaaactaagaagtgttgatttctgctaataaaaacagcttaaaatttawatcatggaatagaatggtggagctgtggyggagatactttgtcttattaattgaaatgacattttgagatccagtgctgctcactgaatttccctgtgaggagagtttgtggtgatgaccccacaacagacaagctactatccaaaaaaactcctcacatcaaatcaatttccagtttcttccaagttgcaggaggatgcctagaccttggttttattctcttctttgaccaaagtattacaaaaggaagaaaatcattaccattttcatgtcaggagggtggcatggagatggacttagcctattttcrgtgttccatctcttgccctttataagggttagttgactgtttatgatrcattccggtatttcccatttttgttttggttcatttctaagtgtgcattataattttaatattaaagkttttgattaggagaaatgtctcatagaaattattattactcatctgattatatactgaagggaaaaatcaattagttgtatatacattcttatacaactctaagatagttgaaataggaactttcttatttagttgcatcatgaggaaatttgagatgatgttatctgccaagcgcagatctctccaaaggatttcttctagccttaattatccacctcacaggacaaacctttgccattccccatctaytttttctttcggctcctcaattcctgacacaacaaagttgtacatatttcccacactcttggtttagcagagttcttttatcagttatgtttttmtgcaagagaagaccctctaaaacattagacatatatatctcacatgtctttggatttcatttktgtgtgtgtgtgttttctgttttttgagatggagtctcactctgttgcccaggctggagtgcagtggcactatcttggctcactgcaacctccacctccagggttcaagcgattctcctgcctcacccttctgagtagatgggactacaggcacactccactgagcccacctaatttttgtatttttagtagagatggggtttcaccatgttggccaggatggtctcaatctcttgacttcgtgatctgccctcctcagcctcctccacacctggcctggatttcatttttctaagctgggtttgatggatggctctggtgatttgagatgggccaaattcggsatcttggagatagagtttggccaatttagtctggatcaggtgggggcaatctgactwcattactttctcattctccttctgggaacagtgtacttgcgaggcgatattctcatggtaaatggaaagaggaagaatccccagtatggaagccatctcaaatctctatgcaaagtgtagtaattttctgtttatcaaagtaagtkaaatgattgaactccaagttcaggggaaaggtagtcagtcttcctgtgataggaggatactgcaagatkatataccaaagggtcgggtactcaggaattcttataaaatggctaaatattttatataataataaatatttaaacattagacttgagagaaactttaccaaaggcctaagaattagagatatgtttgataaataaatattattcwtgggctgaaaactcttgagtgggaaaatagggctaatttcatctggacaacttcttggaaactcattttttattttggaaattwtgagaaaataatttgttccattcataagtggtgtgcacatgcgtgtatttgtgttcatatttatgagcttgtgaataatgaagttatacaaaagtattagcagcaaccaaatcttatggagtattggcctgcctgtggttctcaagaaaatcttagatgcttttgataaaagcagtttggattctgtgtatacaaatctggcattttaaaaagtccatattggtaatgatcttagttgtgaccaagctccctttaagactttagacatttgctatatgatctatgtattgggttataaaacttcccaaacaactgaagttgctaaacacaaatgatggagaggttacacaaagaaaaattgcaaactctgaaagagagtacrttcttatttgtgtactagcaaatgaggattcaggtttccagtcaatttcagtatgaataattcyagcctgtaacaagaacaaacagtgaatgaatgagttaatttgagttgtttgaaaataagaatgttttccataaagagatcattgaactcatyagttaacacgccatggtgatttctggcttgacactggtcacaacgtttaaaagtaaaaagaatgacccagcagatttacaaattaggtgcatatagaatttaaggtcaggatattcaagcaatcacaaccagtgatattacattgagaggtgaagccagctggacttcctgggtggagtggagatttggagaactattctgaagctagcaaggggattgtaaaatgcaccaatcagtgctctgtaaaaggcaccaatcagcactctttaggtagcatggggattataaaatgcaccaatcagcactctttaggtagcrtgggaattataaaatgcaccagtcaacactctgtaaaaatgcaccaatcagcactctagctagccagaggattgtaaaatgcaccaatcagctctctgtaaaaggcaccaatcagcgctccataaaacgcaccaatcatcaggatcctaaaagtagccaatcacagggaggattgaaaaaagggcactctgataggacaaaaatggaacatgggaggggacaaataagggaataaaagctggccattccagcccacggggcagcccacggggcaacccactcaggcccccttccaccctgtggaasctttgtccttttgctcttaacaataaaccttgctaccactcagtctttgggtccacacmgtctttaagagctgaaaccttgctactgctcagccctgggkccatgccatctttaagagctgtaacatcaytgcaaaggtccgtgcctccattcttgaagtcagcgagaccacgaacccacctgcaggaaccaactccggatacaacaccagcattttaaaaatttctttttgtctgttcagacatgataacttttctgcccatcatattttccattctagtagtggttacatttgttattggaaattttgctaatggcttcatagcgttggtaaattccaccgagtgggtgaagagacaaaagatctcctttgctgaccaaattgtcactgctctggcggtctccagagttggtttgctctgggtgttattattaaattggtattcaactgtgttgaatccagctttttrtagtgtagaattaagaactactgcttataatatctgggcagtaaccggccatttcagcaactggcctgctactagcctcagcatattttatttgctcaagattgccaatttctccaaccttatttttcttcgcttaaagaggagagttaagagtgtcattctggtgrtgctgttggggcctttgctatttttggcttgtcatctttttgtggtaaacatgaatcagattgtatggacaaaagaatatgaaggaaacatgacttggaagatcaaattgaggcgtgcaatgtacctttcagatacgactgtaaccatgctagcaaacttagtaccctttactgtaaccctgatatcttttctgctgttagtctgttctctgtgtaaacatctcaagaagatgcagctccatggcaaaggatctcaagatcccagtaccaaggtccacataaaagttttgcaaactgtgatctccttcytcttgttaygtgccatttactttgtgtctgtaataatatcagtttggagttttaagaatctggaaaacaaacctgtcttcatgttctgccaagctattggattcagctgttcttcagcccacccgttcatcctgatttggggaaacaagaagctaaagcagacttatctttcagttttgtggcaaatgasgtactgrgtgaaaggagagaagccttcatctccatagattcagaagaggggcrttgtgtgtcttctagcagaaaacaaactggtggtgtatgaaacattttatatttcttacwgtgttttctgtaatgtatgtgtatgaataatttccaaacatatacctagataaatctttaacctagtctaaaaaatgtatgtatgtgtgtgtrtatgtgtgtgtgaaaaacttaagaacattgacaataacatactcttytttgtttttttcatatgaactgccagattatacaaaatatgacaaaaattcctcagaattatgaagccatgtgtatttcattcatgtattttatctttcatttgtagaatttacaatgtctatttataattattaagaactaacagcttatctcaggaaagatattgctgttttctattgttatttgaaccacacaaatataccacagtgtgcttagaaatcattgtttgaacctctatcttattggatggtaaggtcattcaattctaaaccaataatgtggatgtatctttggggttttattccattatgaattcctattttatggttagtaaaaagcaaacagaattattgtaaacaatgcacactatagaattcgagtgacaagtataggtagaataaatttcatatatgtctaccataaacagtactgaagaatactagatttaaagcaagtatgtgaatagcttagaaaaaaatctctttgataataaagggaggaaatatgatcatggtcttgattgctattatcggtttccatacgcagttagaaacrtcatttcttccagcttttgaattaaagaaaagctgtttttgaagttgagatctgatgtaaattattttagtatttttttctaagrcacttctaagcccctgaattgctaattatatcctcatcttccatttacaaaattccttctaaacttcagataagagaactcaaatcttctcttttctaaaaaaaaaaactatcaatgtaaaaatagtatagaaattatggaaaataattcagtgaaactttttgtaaatgttaaaatagtatctatgaaatctatgtattaattatgggatgtgccttaccattgtaattttgttgtcagtgatgaaagtgttttgacatattcattaayaggaagttctattataagaaagaaatgtacagtcttgttcacagctaaattctatatgactayattaattcttggtgttatgaagttttaacaatgttatttaatgttatttaaaccttaagataaatcatccccacacctgatttatgtaatttttkaatcatatatcttcctcagtacaatgtaagaactgtaaagaaagagatcatgtctgwcttgctttctgttgaytcccaggacctagaacccagcaccaagaatagatggccaaaaatgatactttaatgaacaaataaatgggtggctaaaatggataagttgatgtggtaaatcaatgaaaaggaaactcatcacaaaatctgcagttgcatgaattcccctgttctggtctcaggttgaggttkcaggcttatccaagcagaatccttcctcagaggaaaagtttggctattccacaattttaggggaaatatcacactagtgatatatatagtgatatatagtcacactatatatatatatwgtgatatatagtcttgatgcagctgtgtcaggtgtctgaattggagacaaggtaaaacatcaaaattagatggcaccttggaaggctgaggcgggcgratcacgaggtcaggatatcgagaccatcccggctactatggtgaaaccccgtctccactaaaaatacaaaaaaattagctgggagtggtggtgggcacctgtattcccagctactcggaaggctgtggccrgagaatggcgtgaacgtgggtggcagagcttgcagtgagccgagaccgcgccactgcattccagcctgggcgacaracaaaaaaaaaaaaagaaaagaaaaaattaggtggcacctatgacaatactttaaaaagcatataaaagactttggtctatttgcataagtatttttttattgtgaattatatatttgtgttatgatattttctagttgattattaggtaaacaaaatggcatttcatttcaaaaaattgagttagtaaccagctacttgaccaaaatgtttttaattaatacctgttaatgaaagtgatgacatttatttagaagtaaagttcaagacaaaaatggcagggacatgtggaaattgagacaggaagaaatgtgaaacaatgctctagtcgctttgaattctgctggatcatctggcacagtggccatagcagcttggaccagagcctgtatctgctgtagagccctcttttgttctgggttccacttgagaccagtagcctttggaaactttattaatgagtcagagcaatattttcaaacgtggaatatgttggctccaaaatctcaataggtccccaaaacattgtatctcttttgtagtgataggaagtacayagagagagcaacatgccatttactttaaaaaagattgttttgacatgtgccctagggacactgcacaccttaaaacatcacctatgctgtaggtccctgaatcttctcaggtttatttcttttcttctggtattttacttccatccaacattagggtattttactatatttaataaacttgcaacttcctgattattgtaccaactaatactttattattattgttattattttgaacagggtctcattctatccctgaggctggagttcagtggcaggatcacacctcattacagcctcaaccttctgggctcaagtgattctcccacttccgcatttctagcagctgggactgcaggggtacaacaccttgcctggctaattttgktatttcctgtagggctaggatttcaccatgttacccaggctggtctcaaactcctgggctgaagtgatctgtytgtgtcggcctccaaaagtgctgggattacagtcatgtgccacagggcccggtttgtaatattactaatatattaaattagcacgatgttttaaaaaatgtaaattaaactgagaacagaagtgacatagccctgacataaaacagtgaagcagtgctattattcttacaatacaagccaaattgttttgattttcctgcataatgggtgtagattaacaaacattcaccaaatcatgagccccgtaaaaagtatcaaaagctctgctctgctcagtgaagatagcacatcctggaaagcatttgtgagtgttgattgaagtttatggtagtctgcattcastataacctgtctgtctttggtagaggccagataggttaagtgaatcgggttatagaaaggactaccatcccctgtaactttcaagtgttttgtcatgacagtgaccagttccattccttggggaatgcagttattatattttatacattgtgttgccaatggaggagaatttcagaggcttccccttggtcctgctataataatgttccttactctacagttcaggaagaatgtgatagttctgccagctgccatacgtatccatttcaattacacattcaggaagaggtaataactacaaactggttagatccaccttgggatagacatgagcygaagctctgggcagcatctgaccttcaagaactcccactgcaggctggatgtgatggcgcatgcctgtagtcctagtactttgggaggccaaggtgggaggatcttttgagagcaggagttcccttcgcaacatatggaaactctgtctctacaaaaaatttaaaaaattagctggcggggtggtgcatgcctatagttccaaatacttgggaagctgaggcaggaggattgcttgagcccaggagttccaggctgcagtgggctatgatcctgccactgtactccagcttgggtaacaaacggagactgtctcggaggaagaaaaaaaaaagaagtgcaagttctcactggtatcttaaatatcaagtaaaaagggatcaaatcaataattaacaatctttggttcctgcctatagcaaacaggtaaaatggaaagtagttatacaaagggtatattatattaacycctaacaaaattaaacaaagccagttttttttcatctcctttcattttttttttttttgaaacagggtgttgctctgtctccccgttggagtgcagtggtgtgatctcgaccaattacaacctccgtctcctgggttcaaatgattctcctgccgcagscaaccaagtacctaggatcataggcatgcacaaccacaactggcaaatttttgtatttttagtggagacagggtttcaccatgttggccatgctgttttctaactcctgacctcaggtgatccacctgcctcggcctcccaaagtgctggaattacaggcctgagccaccgtgcccagcctattatctgctttttataggtaattatactgaggcaggcagtagttgtaaaatggagtctcacatatctrtatgaaacagggaatctggtttcctgtctttgtagtctgactcgaagatcccctcttagaaaccattatagtgtaaaaactgaaaagatataaaatccaagattggagactgattttaatatctattcatcttaaaccatttagtaatcaaaaataaatagggaaaaataaagctggatattcatacatagagaagtgtagattcttcaatggaaaacatgttttttaagtgtccaaggaatagttataaaatttctgagtattttaattaaataactaagatttaagtgttagactcatgagaataacttagtcaaaggcctaagcatgagagattaagtttgataaacattgaaaatgggctgaaaagcctgagtaagaaaattaattactttttcattttagaaattataggacaacaatttttcccaaccgtcaggggtgtatatatgtgcatgtgaaagtgcttatgttaatgagcttgttaataataagttatacaaaattattagttggcagcaaccagattttaaggaatattggccttcttgggcttccgaagaaaaccttggacgcttttggtaggaaaagttgggattcactctccataaatccggcgttgaaaaaatgaatcaacagkggtcatgattctagttttgaccaagctacatataacagtgtaggcatctgatktatgatctatgtattaggttggaaaatttcccttacaactgacattgctgaatacaaattatatagaggttaaacaaggaaaaaaattacaaaatgatgaataagaatatgacttratttgcatgctagcaaatgagaattcagctttcacatcaacatcagtatgaaaatttttatcttataacaaggacatagtatttgaataggagttaatttgagctgttttggaaattatcatgttttccattaagatagccttgaactcattcaatagcatgctccggtggtttcctgcttggcattagtcagagaacttaaaaggaacaggaacattactgcacaaccagaaatcaggtgcacatagaaattaaggtcaggaccttaaagggaatcttgcccattgatattagtcctgccytaaaaaaagtcggacatggtatgtttactactaatcattttttttccataacgttaatggtaktttgtattttcccatgggcacctacattacacttatagactattttgatatttcaacctattattttctttgaatccttttaaggagttgttaaacaatgctgaaatttgccttacagtatgctgttaactaatcatatttctcaaagtcatttgacataatgtttggttaaaggaaatatgtctagcatagttatacccgttcataacaaaagagtatttaaatctttaagaaaaaatattagaaaagctaataatatgaataaataaat

SEQ ID NO: 1617 - DNA, 308631 bp, Homo sapiens
  misc_feature (1)...(308631): n = A,T,C or G, or insertion/deletion polymorphism (see Tables 1-2)
cattagggatgactgaatttttactttctccctctctccctcttttccttctttctcttttttccagcattcattgcaaagatttgacgtggtggaaaagggaaaaagaacaaaggagttggaaggtaatattgcttagtggtcaagctaagatttgtgaaaaaccaaattactgctcagttctcagctctgtatcaaagtaaactgctgacattcaatacctagagtgcttgtttcctgggtggagactgaagaaatatgttgcattattgttattgatatttgggaagtctcatataatgaggaagatcctctggtaacgctgtatgtgccccagaacctaggaagcattgcacgactgggcctccagaagcccagcagcctgggcagagccggccattataaagacttcagttggaaggcctttctgaatcctaggcatccctagaagcttctggagtcctgggtcttcacatcagtgctctgtatttgtgagactaaactattttttttttttttttgagacagagtctaactctgttgcccaggctggagtgcagtggtgcaatttcagctcactgcaatctctgcctcccaggttcaagcgattctcatgcctcagcctcccgagtagctgtgattacaggtgcctgccaccagacctggctaatttttgtatttttagtagagacagcgttttaccatgtttgccaggctggtcttgaactcctgatctcaggttatctgtccacctcagcctcccaaagtgctgggattacacgtgtgagccaccgtgcctggccaagactaaactaatttttaagggcttgctttatgctagtctcccttttaactggcttgtatttcactattacaaagctgctcacagtttttttttcttctttttttctttttccttttttttccaaaaaaaatatttggactttaaaaaatgataatttctatcatgtttaactaactatacattcttttttaaaaagtctttctcaagctatcttaataactatacattctttaacagctttacttatttatttagagacagggtcttgctctgttgcccaggctggagagcaggggcgcatttatagctcayggtggcctccaagtcctgggttcaagtgatcttcccacgtcagcttccagaataaataggactatatgtgcataccactatgcctagctaatacttttaacggtgttattaatatgtaatttacatgtcataaagttcatccatttgaagtgtacatttcaataaatttcagcatacttatagcattgtgcaaccatcacaatctaattttaggcatttttatcactcctccaaaagaaactatgtaccaattagaagttaagaaactatgtaacaattagaagttactctacatctcacctcctcctaccctctccaagcctaatcttcttttgttttccatggacttgcctattctgaacatttcaaccgccttttgtgtctggcttctttcacttggcataatgtctttgaggttcatccatattgtagtatatatcagtactttcttcctttttattccccattaatattccattttctggatatattacattttgtttttccattcatcaattaatgaacatttgaattgtttttcatactattataagtggaattgctctcctcatttcatttttggcttgttaattgccagtgtatagaaatacagtttttgtgtgtgtgtgtgtgatggagtctcactctccctccggggctggagtgcagtgacgcgatctccgctcactgcaacctccgcccgccatgttcaagcgattttcctgcctcagccttctgagtagctgggattacaggtgcccaccaccacgcctggctaattcttgtatttttagtagaggcggggtttcactatgttggccaggctggtctcaaactcctgacctcaggtgatctgcccgacttggcctcccaaagtgctgagattacaggtgtgagccacagcgcccggctacaattgatttttatatgttgatcttgtatcctgcaaacttgctgagtttttttattagttctaattagttttgcagtggattctgtaagatttttctatttgtaagatcatgttatcttcgaatagaggtagttttacttcttcctttccagtctggatgccttttatttttcttgcagtttcttattccacctatctttagtttgccatgattcttcatggtacagactcagtgttataacttctcttcttgctatctttttgtatgctctgaattttcaagtttaaatttgagaaagtgaatacagagatacagaaaacggagaaaaacatggagaatctgagtagctgaagtattagctattatttttcttagggcaaagctttgcattctagctcataggtgtctggctagtaaatgctgcctttggattagatgactattaataagctgtagccagaaagaaagggaggccacaagttctgggtagctcaagaagggattgtataggcatgactggcctrgaaattgacatggatagaacagtattgttagagaaggcattttgttttaaagaatacattgaattttttttaaactcagaaggcatctttktaatgttggttaaaatgcattaggatgtctaaaacatttttggattgtctgtttgattagaccacttatatgtgtttgaatcataaaacatgaaggcactccactaccttctcatgcttggcattcatcatctttaatatatttggttgaaagaactctacttaatattctaactggagatatatatatatatatttaagacaactagtggtttcttcatctctctattctctccaaggaacgctttctttgtacttggttattttcgtaagtgcttgttgagcatgtgtgttatatagaacctccgatatgccctatatattggggtaataagtgagagtgtgtttgtggaggggagggtccccaaaaaatgaaagtcataattccttggagctttagttcccagtagaagaaagagttaggctgggcatggtggctcatgcctgtaatcccagcactttgggaggctaaggcagaaaggttgcttgagctcaggagtttgagaccagcctgggcagcatagtgagaccacagctaggtgtggtggcacacacctgtagtcacagctactggggaggctgaactgggagggattgcttgaacctgggaggttggggctgcagtgagtcgtgattgggccactgcattctagcctaggcaacaaagcaagaccctctctctctcaaaaaaaaaaaaaraaaaaaagaaggaaacttgagaacaagtacaaagtagcacgtagtctcataactgcaaagtaacatagtacaattttaaaagaatataatgatgagatgtaatcaacactctgctactgaccagggatatagagattaaaaagacatagtwtctgctctaaagattcatacagtaaggttgggagcggtggctcacgcctataatcccagcactttgggaggctgaggtgggaggatcatgaggtcaggagatggagaccatcctggccaacatggtgaaaccccatctctactaaaaatacaaaaaaattagctgggtgtgktgacacgcacctgtagtcccagctactccggaggctgaggcaggagaattgcttgaacctgggaggyggaggttgcagtgagccaagattgcgccactgaactccagcctggcgacagagcgagactctgtctcagaaaaataaaagatacatacagtaatagatcagcacataattggattcatacagtaatagatcagcacataattgaagctcaaaaatgcractgcattgtagatgcctttggcataagagaatgccatggtgtgttgtggcctgctgcttttaatgttgagagggattaattgaagaatagtaccatcattaacctaatttctattgagaatcatctgcctctgtaaaactaaggtcatatggctaaacttatgtgtaacagtgtgtttagcaaaaaagaaatatgtagatgaataacctaataactatgtactggtctcgtagaggtgaaatgttgaactattaataggaactttccacaatagatcatctcaacttttctgatgtagttttaattcctccactaatttatgccatctttggcaatcacttaacttttctctgcctaaccctattatggcctaacttatgtaactgaactagtagtagaaggagacacaaaagtggaaagtaaattctctacatacttggtgcaaataatttattctatgaagaaatgtattttctcatagacaggtttgaaaaccatagtacttaaaattttactttacaaaaagaaaaaaatacagatactagttcatgagacaagagacatggaccaaacacacgtttacgttttttatttttttattttatggctactactaaaatgccaccattcatgtactgcataacagtgtttcagtcaaagaagaacctcatttctggcagtggaatcataagattataatggagctggaaaattcctgtctcctagtatttactatactatgctttttatctttaggttaaagtgcattctttctacctatataaaaaagttaactgtaaaacagcctcaggcaggtccttcaggaggtgttacagaaggtgctgttatcataggagatagctccatacgtgttattgcctctgaagacctttcagtgggacaagatgtgaaggtggaagacagtgatattgatgatcctgaccccgtgtaggtctaggctaatgtgtgtgtgtttgtcttaatttttaacaaaaatgtttaaaaagtaaaaagtaaataatttcaaaaatagaaaaagcttatagactaagtatataaagaaagaaatatttttgtacagctatatagtgtgtttgtgttttaagctaagtgttattaaagagtcaaaaagtcacaaaaaaagaagtttataagtttaaaaagttacagtaagctaaggtcaatttattcttgaagaatgaaaatatatgaaaataaatttagtgttgcctaagtgcacagtgttgataaaaggtacagtactgcatagttgcgtcccaggccttcacattcaactccccactcactcactgactcactcagggcaacttccagtcctgtaagctccattcatggtaagtgccctatagaagcataccattttttatctttgattttttttttaatggaatgcttcagaaattcatgtgtcaaccttgctcaggggctgtgctaatctctgtattgttcaaatkgtcctagatgtgttgccaaagcaatcacttttacactgtttttgctgtagmttttctatgtttacatatatttgtacacacaaataccactgtgttacaattgcctacagtatttagtacagtgacatgctgtacatctttgcagcctgggagcaataggttacaccaagtagcccaggtgtgtagtaggctacaccatctgggtttgtgtaagtacactctatgatgtttgcacaaccacagatatcacagggtcacctaacgaggcatttctcagaagtagtcttcattaagctaccctacgactgtaatgaaacgctaagttttgagccaggaatttgtgtatagaacactaggaatggcttcattagkatcatgcatctttttcattaaactgtgagtccctttgagagaaagattgtgtctctgaacttagtggcctaaatttctagaattatgtcttcaaaaagttgcccagttaggcgtctctggggagtcaaaaccacaactcccagaatgccgtgctcccttagcgcgctcaggcgcggggagagaatgtcccatcacccaccgcgccagatcgagaccacagttcccactacacccagggactccgcggaaagctatcaaacaccacctgttgccatagcatccgggtcgggtgaaccaatccgggcgccctcgccgaacagaggcgggcagttcgcatcgccgaccaacctgaggcgtttttgttgtggcgcgtgaccggargaggcgggagctcaggaccggcgccttctccttgcttctgggggtcgtggccttgctcccgctgtgcgggaaaagaatccaggcccttccacgcgcgtgtgggtgcgggggccccgaagtgctcgtggttccccgctaggtctccgctggggcaggaaccggaatcatgggtgggaccaccagcacccgccgggtcaccttcgaggcggacgagaatgagaacatcaccgtggtgaagggcatccgggtgagtgcccgtggacgggcggagggccagtgsttggactcggaccccaaggccccatcttctccggacccgctcagcctgggtttctcccgtcctggaccctagcgtattaaggccagaagcccaggtgtctgggaagaagcctagagtttcaagacgtgggacattcattcagagatagttcctggttgtgccaagtgctaggcactgctggggcgggcggggaatgccaggttgaattataccctgcaagggctcacagtctactcgtaactgtactgctcccttgttgcaggaccgtatttgaaacccatacctcggtgtacttgtctgtgaaatggttttcctgggttcaggacccaaaccctgcttttccactgtgcacaccctgtctcccagggtgaattggcattttaaggattgcctttgctttgtgtcatttagtgctctccctctgataacaccccctcctcccacccactccccacaccctgtcatcctccctcccagccccacagtcttttctgacctgcctggggcggcttctggcttctccctgcttcactttcacttgatatctcctctttcccaggcgcctcctctgtgacctgctgcgccgaagttttggattaggcccagttgcttcaggactagtgtctgccagtctgataggggctgagatgggtttgcagtttttcataccagtagaagtaatgtagtcatttctgaccaacgttgtagagcactttttttttaatgccctttgcatgcacctgatacataaactgaaaacctggtttttctctagggtgtcagtataccagcactaacttcattaacacactctccgctgcgcctgaatttggagcctcacatttttggacgtatgatgcctgaacctagtaaataaagcaattttgacttcagaaagttttataataatttatatatttttttctgttatcaaccagcgtaaataaattacatttgtaaattatttttaacagttgttaccaggaaataaaacttcttaaatatttaaaatgtttaaaaactttttcttctgaaactgttaccttgagaataatttattaaacttttcttcatagaaactcagactgtcgaactcagtttttggtmtgtgaccagtatttctttatatcatgctaattaatggtagtactacattttgtaataaaatatctgaggctgtattctttgagttattgtgtttcagttagtactctttggagtaaaaaattactgtaaactttaagttttatgcagagattttaagactcttgccattaggctttcagtacgcaactcagagtgaaaaataattaaaagacaaagcaaaataagttttgagtgagaagacattggttagaaaaaaatgtataaatccatattctcgtgctttagtacagacacagtgctaacagcaamcaaaatcgaaagagaatgtggccacagcacagagattcatatcaagtattagataaggttggatggaataactgtgacagcagggataggtattctattaaaatggaaaaattgtctaaaaaacctttttaagatttttgttttttaaaaagaaatgtcctttggtcatataacttgacagcattcctcatttttttcctttcttatatagtacattttacctgtattgctaacagttcaagcatgatcatttttacctctatgcttttcttcagaatatacccttcacctggaatgcccttgcgctggtctccattgcttcaaatcctccttttacatgaatgttttgcaatctctctgagcttcagttttcccatctgcaaaataatgcaactgagtacatccctcagatctctaatattttccagtcctgaaatcctgtgagtctggtggcactgtaagtttcttgtagccatacttagcccattgcagtttcctctagaagtgacatccattgaagtattgagtacacagaggtcattctgatttctttgagctcatgatcaaaagagtatcaacttgaaattaaacagacctcagtttaaatctcaggttagatatttattacttaacctgattgcctgtgtgatttttgtctgggtcttttgtagatgtttttcagttgatcttagtatttttcttggcttgaattaagcagacatcagtttaaatcgcaggttagttatttattagcctgtggcctttgacaattgacttcttttatttccttatccataaacggtaataccatcacttcccttgattggttattgtaagaagatgaggtaaggtatgtaaagcacctggcacattgtagattttcattaaaaaggcagccattattatgatagggttcctttcacatgcaaagttttaagattctttgaaagtgctgtgctgtgtagtggaaagagcatgtgccttggaaccaagcagacctgggttggattctatctctgcctctcactagcggtgtcgctctggacaagtcacttttcattgtgtttccgtatttagtatttctggacaaagcctactttgagaatttgacataatgtatatctagcacagtgtcttgtactttgacagtgtttgcacttgtgaataatagctgttattagagctgttcaaaagaatggatatgtgaacttaagtgaacttcaaattttaataaaaataagagcatgttgtgccccaacaggtgtacctaaaagggtatggactgggaaatgggagtcttacattctgccctaattgagggtgtttttttgtctaggtctgttgtagatggtttttatttctttatatttttcttggctttaaatagtcactttgttcccttctgagacatggggaaggataagaaaccgcattctcagtatgtccataagccattgtttttagcttagtttgttagaacatggtgccgatgaggcaccaaacttcagttttgaactgcagttaggttagttcagcttggctgaagaaaacgttccaactttgaccagttgtctagcatttatgtcattggttgtaagaaatgaaagtttaccaagcttactaattcaacagaggcagtcactgctggaaagctaattctgtgttctgttacactgttaaagatagtacagacggtctcctgttaggatggttcgacttaggattttttgacagtggtgtggaagtgacaagcgttcagtaaactcagcttctggcattaccttcagcaaaatccgttgtaaammaaggagcwtctataatttsakcttcctttatttttttcatataatgacttgggttcattcccttaatataaatatgttggcaattatgaggtttttttgagttggagtctccctgtgttgcccaagctggtctcaactcctgggctcaagctatcctcctgccccagcctctgggactacgggcatgtgccgctccaccaggctcagtcatcatttatcttaatgtataaagaataacatttagtgaacaacataaggcttttggtaactatgctgaatatttatttatttatttgagacgagtcttgctctgtcacccaggctggagggcagtggcatgatctcagcttgctgcaacctctgcctcccaggttcaagtgattctcctgcttcagcctcctgagtagccaggattataggcctgtgccaccatgccctgctaacttttttgtatgtttagtagaggggggtttcaccatgttggccaggctggtctcaaactcctgacctcaagtgatctacccacctcagcctcccaaagtgctgggattacaggtgtgagcctccacacctggctgaatttattaatagattgtgtttctctatattgttgaggtccttaatagcaatgaaaggacctacttcaaattttaagtttaaaatttcttctcacctaccaggtgttatttttcatggtatttgtagggtcttgttttttccctttatccttagcaactgatagcttttcttccctcttctgtaaaagtaacctatatttttacacctgattccaactttgaatctgaaactactcttatggattggatgagaggtcactcttttgccttgccctcttctcaaggctaaaataaattcctagagaggaaagaccaagcattttcattactcatattacatgtggttgataggatttttgtgagcacctgctgtgcctgcttggaaagtgtgcttacaactctatctttcgcaagtttatctgaaacatcaaagctgtgagtgaactcttctggagcaaatgtcaacttcaatgagtatcattttcaaagatatatttatcatgctttccagacataaacgaatgtccgcagctgggctttaaagttgcaagctgaaattcacaggagccagttatggcagtatggatacttaatatggaacgtaactcatgctttgggaagtgttggcagttgagagaccgtaaatgaagagattacttaatatgcggtattactgaggattctgaagagagtatgttatcagagactacaaattcggtcagcccttgggagtgttgaggaatgttgtgcaaatttagttaagtagtggatgattagtttctttcagctttagattctatgaagtttttggctaccatcttaagttatctaggattttataaaggtagggataatggtttctactaatgacaaatgtaaagaaacacagacataagctaagcattacatatttcatatatatctatcaacatatatatgggttccctctccccctttctcttaactaactatttgggagtaatttctcccaaataataatggcagtttttggagcctatgtcttaaaaaggtaattgtgaagcaaactaatactcacacagaaaatgacctatgctaagtggaaggaggatcaagagagaaaaaatgggtctgagttcttgaatcaatttgctaggacacatctggaagaagataagataaactaatggaggcaggaggctgatttatttgtctcatgtggctcataactttacctcttagaagggccactgaagaattcctctttttttactctgttacctgggagtagaaatactttctctttgtccaactcacccagtctcctgtttctgagaaaattctttcttttggattggtgggtagtgtttctggcacggattttggataagaccaaacaaggtgggtaggaagagatgagtgggaagactgtaggagatgacacatggcctttccccctctgtggagcacattggtgtggtgagtaccacaaatttaaacttggcaagctctgtttgcttaaatttgtctttaggagcaatagagaatagggtggacagtcaagttcagtgggctgaatatcggcagacctgcttcttttgattgccccttatattagaatggtggctcttttagttcatagagcactgtggatctgtaagctgtggattctggccagaaccatgcaataagcagacagttttgcatacagttgagtaattgacccacggactactcagtctgtggacctcagggtgtaattcccagtatcaatgtgtgtggggattatttcactattctttgctacaaataatttctgtaaattgcccttggtatttgccttgatgcagattccagagatgtctggaaagcaagtataataggtataggtcattgtacaggaaaaggctttgcttaaacaagtgcccggttcaggaaaagatatgtttcctgaagaagatactttttttttttttttttttttttttgagatagaatctcrttctcttgcccatgctggagtgcagtggtgcgatctcggctcattgcaacctccaccttctgggttcaagcgattttcctacttcagcttcccaagtagctgggactacaggcacccaccaccatacctggctaattttttatatttttagtagagatggggtttcaccgtgttagccaggatggccttgatcttctgacctcatgatctgcctgccttggcctcccaaagtgctgggattataggcgtgagccaccacacctgaccgcaagatacttcttacacagaggctgccatcgcagaagcttgtgttgtactatcgacccccattttgggtcattttttatcagaaagatgagttgttctgcagctacagattgcgtgtataatcctggccagcatctctaaagcttgtcagctgcttcacgagtgagtacccctgttcacagaggagatcaggtgagtgtgcaggtctgaacttactactgcaatgggaaggtcagctcagagagcattaactttggatacagatgataacacaacaaaactattacctcatatctacgtcgctatgagcagactgggaatagggtaatagtgcttggagttggcagaggtgcaacagtagatggccatgggtgctgctttggaagggcctaaggatacagttgttgaatgattktaagaacaagagaaaggtggagtctcaataaggcagccgtacaatatgtttatcaagccttcaataggtttagtatatactcctttggygcatgcttacaagtttactgaactataaccaaacatcccactgggaaatgttttgaattgatgtgagaatttgacattaagtagcaacttgggacatcagagaggcctcaaaaagaaaaaaaagttaacaagaaattagtgattaggttgaaagagacattctactcctactacctagagagcatagatagagaaaaataagcaccttctatacccataccaggacttaggcagctgctgcttgcaatagctgyaggcctggtcctcatgcaccttacagagaacgagtcagtacaagctcagacccagttgataaaaatgaaccaaaatgaattaaaaaagtccctgtggttggagctatatgggtaatagctttaccaaatatttgtgtagccaattgtagtttatggtgcaaaacactaaaatccctccacagaatctctggggtaaacattattttcatttttttcagatgaaaatagtaacttttcagatgaaagcttatagctaacacttgatttttgagatttatatatattatatatcagttaaaatagctttaagattctaaaaatgtaagcttattttttcctctttaagaggaagtgatatttttattacatgcatgggattgaaggggtgtgttattaaaagtagagcattggactagagattggggaattactgcttctggtcttgatgctgccagtaactgaatattactcagggtctcttttttttctcaagtataaattgagtcagtcttacggggatttttctaggatgtgtctcagtttctcagtttctcagatgggtttcagcaacattcccagtggctgtcagttgttagaaggatgcagctggctctggcattttcaaatagaaagtcttcttgtcttccaagaagggagtcgtagttttttccttcaaagagcacacacagcatttgatctgtagcctttcccttttccatcttatttccattctggtttgggccctgagatacaagtaacagttgaggtatagactatttagttcactgatgtatcacagggccttgattagtgcctggcctgggagacatttgttgaatgaatgacttaatatataggagcttgcaatctagtggaaaggcagaaaggtgaatgtggaaaggctaattcctgttctttcattgagactgtattggaagtttgagaaaggaacagcaggcacaaggaatggtagctttaggtaggcagggttggaatggagtggacaactgttttggtcagtgaaggcttggatgtttagactgcgtcttgaaaggtgactccctcccaatggtacaggagagagggcaatgtaggcgtgtgtaaaggcaaggagatggrcgtagaacaggatatgtaatattaaggaaraaaactgtagaatttgaggttggagagttaggccatcaccaaatgatgaagtcttgaatgctgtacaaagaatttgaatttttctgtaaacagacagtagctattgaagaatttgaagtagggagttaccattatcacatttgcattttaagcggatggtacaggaattagggcaggagaaatgggatgagagaagagaggaattcattaaatatttagggattgatgaagtcagagctaagaatgagagagaaagaagagttaagaacaagccctatgtttgaatttaggaagctgggtgttggtggtgtcattaatgaggtaaggaaggcaggagaaagaggagatatgcggcaaacgtgagatcaattttggacactttgggtgtgaggtgcttctggtttgccagaaggaaggtgttcattaggcamttcagtgtggagaccgggcttctgagagataggtcttaagctcgagtgaatgcatttattaatggaatttattagtttatcaacaacagttagaaatcaagagattggatgagagtgccagtacaagggcacatagaatgagaagggcccttcagcattgaagtgcaggcaggagaggggaagctgcaaaagagataaaatgtggccagagtcctaggagaaccaggacagcaggatgtcagaaaagccaagggagggctttccagaagacgggagtggccagaggtgttagatgctaaagggaagccrtataaataaggcattttataaatataaaatatttatttacataaatatcaaaagttatttatttggtcattggtgacttctaccagagaatgttcactgttgcactgagggtaaaagccagagagtggtgagttcaggaagtggaaatgggaaggagacccttgatacaggaggaggatcactcagttacttgaaatggaaatcctggggtcttccttgatgacttctgctttactcccacatctactcagatactgggtagtgatgctgagggatgtttgagtgggatcttttttttttttttttgagacggagtctcactctgttgcccaggctgtggcgcgatctcactgcaagctctgcctcccgggttcacgccattctcctgcctcagcctcctgagtagctgggactacaggcgcccgccaccacgcccagctaattttttgtatttttagtagagatggggtttcaccatgttagccaggatggtctcgatctcctgacctcgtgatccgcccacctcggcctcctaaagtgcagggattacagatgcgagccaccatgcctggccttgagtgggatcttgagactcagactttttgggtttgaatccttcctctgctactgataaagtatctgatccagggccagttatttaatccggctatgcttcagttttttcacctataaaatagagatacaaaagtatctatctcataggcctgtgaaggagtaaataagtgaagtgcctagcttagtgtagcgcctggcacataataagcactcagtgaatgttagtattttaaatcctaaataccttttaagtgtgttctcccctggattaccataatagctttttttttttaaagtttattaaagtaaattgttgtagagtaatttacatgccatgaaattcatccattttaagtttacattccaacactttttttttttttttctagatagggtcttgctctgttgcccaagctggagcacagtggcatgatcatggctcattgcagccttgacctcctgggctcaagygatcctccctcctcagcctcccgagtagcaattcaacacttgatgaatttactgagttgtgcaaacatcactacaatgcaattttagaatatttttatcaccccaataagatctcttgtgcctgtttacagttaatccctattcccaccccagctctaggcaactacttaatctactctatagggatgcyttttctgggtgtttcatataaatagaatcattcaatatgtggcccttgtgtttgcttctttcacttagcttaatgatttttaggtctatctgtacggtagcacatgtcataacttcactgctctttattgctgagttgtatagtgttgtatggatatgtaagattttgtttatccattcaccgtagatagacatgtgtttgtttccacccttgctcttatgaataatgctgctatgaacattcctgtgcaagtctttgtgtggacatatgcttaatagcttcttaattggtcctttagcctccttcagggatcctgcttctgttcttgtccccctccaatctgttctctacattgtagccagagtgattttcctaaagtgtaaatctgatcgtgccattcccctgcttaaaatccttcagtagtgctcaggtaccctcagggtcaagttcaaactgtttcaattgaagagttcactaagaatcttcaaaatttggaatctctaccttccctccccaccttctctttcactatgccctctctctattttcttgcttcagccatttattcatgttgtttcattcattcatttaacattcattcattgaattaactaggcttagtgaggctctgggagtatagcgataggacagccaaatccttgctttcagggagctttctttctagtgaaaggcagatggtaaacaagcaagtctcaggtagtggttaagtgctgtaaagaaaataaaaaaggatgacgcgatagtaactgtgggaatgatgactctcaaatccgcaaggctgtgtgttcctcagagcctctgctctattgccagctgcctacttgatatctccacttggatgtctaacggtggcaaattctggttttcatctgtactttaatgtgatttttctcacccaggagcactttcatcctactgcatctcttcctakcttttactcctccttaccttgtaaatcttccctaatcctctgttccagccctgccttcaaagcctggctacatgtgctgcccattgtgttttctgtatacttgcattacatgctgactcactcaggtagcactcttcatgttgtatttaaatgcctgatggttgtttattctgttatgctttaagcacttgataattttgaatactcagagtctagcctagtttctggcacatagttgatccatcatgaaatctgttgaaagagcgattgtatgtggttagctttgaacaggagggagggagggaggggagagggaaggaacactttccttcgggactagagggagggaaggagctaaggcccattaatgcatgaataagtgtgtaggattaggggaggaaagttgaagtttatatagcatacatttccccagagattacaattttgtgcatagtataaaatgaagagtgtagttatttataatgaacaattagcagtgcattagaaaaaataaaggagtagtgctgtggggtgcatctcgaaatcttaaaattattcttccttctggttttatggctgttagatttaacctaatttctttagggcattcgtcatatgtatggatatggatgactaaattacttggatgttattgcactggtttttgatcttgctgttttataattgattttattttgatgttgcttttccagctttcggaaaatgtgattgatcgaatgaaggaatcctctccatctggttcgaagtctcagcggtattctggtgcttatggtgcctcaggtattgctgaattttaattttagggtttttaggagataaattataagtggaaaaagttgactcaatagtcaagttctctagcattctgtctttcgttatttagatgtttagcttttaataaggaatattagaaatcagtattggggtttcttttaaaatgttttgtactaagaatgaaactattttcaaacagtctttgaaaattttgttttctcttcccactcttgaatcctctactaggctttggaaagttacttcatatctttttgtgtaaaatggattgcttatagggatattagagatttaggaataaatatttatttaaaaaatcgaacttagaaaatattgatttgctattttcaaattgtgaagtattccaaatgattttattttctaataaatttcttctaagtttataaaaggtttagtttgtcacagtcagtcttagttattgatggaaatgtggtggtaaataaaatccataaagaattattaagcctaattttatctgtaggtcctgctggataagagacttaatgctgtttcttctcccttttctctctcctgccacactcatctgtttatccagtattttactaagcaccagctatgtgtccagcactgttcttgatactgcccagttgatggatagatacgctatttattgtgaaatggcaacaagaaaataattgggatgattaattttggactaagtgagattttcctgtacttattagaaagggggaaatctggctatagactgtgaaattgagaaagacgagatcctgcccaaatgccattcacttgggccaattgtgaccccccccgccccgccccttactaatcattaagtcagtaaacatgaattgagcttctgatacgtttagaggaaagggtaccaagatgaataagaatgacttcttgcccctttgaagcttcttgtttagtaggagagttgaggattcacagttaattaacgctagatagaaagtgagcatgccttccttgttagaaacccttgttttggcttctggaccacactcttggttttcctttcaccctacttgcaaccctcagtccagggttctttgttgatttctactaagtaatcttgtcccaatatacggttttgaaatcgttatctagatgcctgtgactcccaaaattatatctctagccctgacctttccctgaaattccagacattataatagacaactgcctacttaaaatctccccttacagattcctcaacttgacatatcccaaatcaacctttattttcacccccagacttgcttttcttctctgtctttcccactaaatggcacaggtagtcaggtccccaaytggggattcatccttgttttcttttttccttacaccttacatcagactgttagctagtcttgtcaactccatctctaaaacatgtctaaatatgttccttttgcatctgtctcctctgctatatctccaatccagatagataactgtcgtcttctgtggaagtctcttaactggctccctgcttcactctttccccctgtgctgtgcacacagaagtcctcacaatcttttgaagaaaagcaaatcaggtcaagtcatgtcccagtggtggctctccatggtacacagaatatagtctgagctgcttccctgggcttccatcatatatcatgactggtccctctctgccttccaacatcatcacattattcatcatctcctatcacctttcctctacttattcactgtgactgctatcttcactagaagagaagctccagggaccttattcctcatttgtttgttcacagctgaattcttagctcctaggatagtgtaacctgcttcttagtaagtgcttattatcgtttgttgaattaatttaagggcattatccattttaaaagtagctacttttgttcattctggagagttctatacatttaattcaggtgacatatattgaatgtttctattatgtaaataaataagccacgtttttatttttttttttcttttgagatggagtctcgctgtctcccaggctggagtgcagtggcgtgatcttggctcactgcaagctccgcctcctgggttcatgccattctcctgcctcagtctcctgagtagctgggactacaggctcccaccaccacgcccggctaattttttatatttttagtagagacggggtttcaccgtgttagccaggatggtctaaatctcctgacctcgtgatccgcccgcctcgacctcccaaagtgctgggattacaggcgtgagccaccgtgcccggccaagccaggtattttgaaaagatgcaaaaataggaaaaagttttttttgacagataaactacatatataacaagactgtaagggaggtagaaacatagtataaaagaaacctaggagatactgaaaataagtttatcaaatattttggcttaagaagatgccttgtcgtgcagaaacaaatggctgtccagtttattaaaatgcccaacaactgcacttccagtcactcgggtcttgcatataaataccactgcatacagtgagcacatctagctgatgataaatatacctttgcttcctcctcttcctcaaaatggtgaatctgttcttatctacatgtatgaacttaaaatacggaaaatgttaagggagcaaatggtttgtaactttgtaagtacttatgacgtgtatctttttgcttatgaatattctgtgctataaccattgtttctgtagtttaattaaaacattttcttggtgttaaaaaaagaatgatgatatatggatacatttaaaattggaatttgttctaaagtatgatttgttgtaggtagattttttttcctacctcctgtgttacggagttagcgtgatgatcatgatgattcaatatactgaagtaatgatagatgacacttaaaatttattacattgtaggtactctgctaaatcctgtgtacgtcttatctcatttcatccttataaccctatgaagaaggacctgtgataacccattttatgtagaaagaaactgagacttgaagtgattaattattttgcccaaagtcacacagctggtgagcaatggagatgagagttacattcaagtttgtctgactccagagcaaatgctgttaaccactttgtcttattttaatttgaatgacatcttgctttagaaaggacgtgatagaaactagttggaatgaaggagctgctttttagtgatgttctgcttgaactaaggaaagaacccgttgtctataagtaattgttggttgttctagctttttcccatattggcctgagtggaaggagagaaaatgttttctctcttgggttgttttgatatttcgagagagtggggatgggtcgggaggttttctatgagtgcctgtggtgtgtctggcccgaagagcatgccactgatgtgaagagttctggctttgctgagggacccatcccttctcactccccatttgaaatgactgatgaactctttggtccatgaccagctgtgaccagcctgggcactgaaagctcttagaatgccatcttgtgggccaggcttggtggctcatgcctgtaatcccatcactttgagaggctgaggtgggaggatcacctgaggtcaggagtttgagaccagcctgcctaacatggtgaatccctatctctactaaaaatacaaaaaatagctgggcgtggtggcacatgcctgtaatcccagctactcaggatactgaggcatgagaatcgattgaacctgggaggcggaagttgcagtaagccgagattgtgccactgcacttcagcctgggcaacagagtgagactccatctcaaaaaaaaaaaaaaaagtatgccatcttgtgttttagtggtcaggctagaactacactttccaaatggtagccactagtcacatgtggctcttaaaagttaagtgaaaattaagtcgatcaaatgaaaactttagctctgaagttgcactcttcacattttatgctcagtaaccgcatgtggcttttgactaccatattggaaagtgtagatatagggcatttctattattgcagacagttctgttgcatagctctgatctggaacacaccagtgctttttattttctatctgcaccatgatgtgaaaaagactcaacaaggctcataggacaggttctttgagtacatgatttctctcaccctttccaacctaacccaagaaaagaactaaaatttggcatgctattttgaaatgatcttgctttaggttaagaatgcaattcaactatgtgtaaattaacaaagatttattcttcttagaattaaaaaaataggcttataaaagcatgaagcttgaacatttatgttttgttctgagtttgtctcatttaggagttttagttagtactcaataatagatttcttaggatttaaaatttagatgtgttatgaaataatttttcaagcctacaaaaatgtattgataaaaatgtcactcgccttttttacatttttcagtgtgaagtaaattatatattaaatgtgagttaaattttaagtatttattaaaaagccttctttctcacaggactcttagtcataccagccctaggctattcatatgtgtgaatatagggcagtgtatttgatgaactgagagccctaggatttctgtatataggaactcaattttgtcataaaaatagttttgagaatacattttatactataagaaagtgggttcctctgaagactttactgaaacttttttttcataaaaaatataatttttttgctaaaccttgaaccagatcagtggctcgttgcagtaagtattcgcatgtaaagctgtttgggcaaaataatatactgtgtgacacacagcagattgtaatgccactttaataaatgaatgtgctctcaataacttaactgtgtccttgctgcctcaatttttttgctgcgttatctcaactatattggtttgcttttataccagataatttttttcttaggctgacataaggagatgtcattgcatatagttataaacttaccttttcattaacatcttgcatcttttgattttaaaaaatcaattttgggtgctgattgtttcctttcaacctgatcttttagtttttctggcttataatgaggtcagacctctcatggttgaccctacctaccgctgaagaatctgtccccaaatcaatatgaagaaacagacaggaaatgatattaggagatgttttgttgttttcgtaagctactggcaaccagataaaaatgatgaatctggaaaaaaacaagacaartgacctaacttttattatcatcctcactgtagaagtttctctgtaaatttctcgtcattgtgaaaaataagaaagatttgccagtttgtgttaagtatatcactgagatcactaagtatttggcagccttaacaaattgcaggaaaccaatttgagcaggaaataacacagcctaaactaaacagccaattttgggaaacagattcatgtataagttctgtgtatttttctcccagaatctggccctcctagttatttttaaacagctctttaaggctcatttagacataacactgtagggagagttcagagaaaataagcttattcctttgactcgagttacaagaactgaacatctaggtttccaacttttaatatgtgaaactttgtggatgccagtgtctcaactgtgtactttttttgtgggctgtaatggttgatttgcctgactgttcctaatagtaagaaacctaattgctattgaattaaaggcattaaatctaattctctaagtcagcatattctgctctgaaaaagaaatctgccaacagtctagggttgaagaactcatggttggttccatcagtcaacaagtgttagcatggccgccatctttgaccttcaaggaattactagtttggtcaaagcatatttaatgttacagtgtagtgaatgagtactagtttagtcgcctcctctgttaatatttttgagaaggtgaatcaacatgtgagtgagatagaatgtataagaggtatggaaagtgctttaggaatttagagaaagagtgtcaggagctttggcaggcaggcctggcatcaggggaagtgaacttgagccaaacttgaggctaagagggatgggaggggggttagagtagaaggtaatcctggtagarttagcacacagaccagattaattcagataaaggtttcttgtagggtctcatgggtgggtaggttgaagtcaatgagtttaattctatcctatagggcctgggcagcttcagagctgttctatctcattttaggatgcaagtctggaaagttacattagttgtgccttcagatatacccagatattagtaacatttttattcgtaaagatatagtgctggttttcttattgatatttttatatccaataaacaaatccragtggtaagwatatgtattttccaccatagtactaaataaaaccattttcatcttcagttaagtaaagaagcagccccataagcatttttgtttgtccgtaattggccctattgcagaaagaaagaaagaaagttgccctcaaatgcgtgagacagcatggcaggctagggtgtaacagatgagttctgagcagggaaggtgaatgaagcaagtggatccttggaaagataaggtaaagaaaggatgttagttggaaactagcaatcaggaaggtcagctgctgcctggtctaggtagagtggcagggcagaggagggcttggctggwtatggtaactactgctccatggatgggtagtgacagtccttgactcacgcttcagtccttttctccccaggcctaggacaccttttctctgtgctacttgattcatctctatgttggatttatttttgagaatccagaaaacctttaggctgactttattttaaaattgagaggagggcatagaaaacttcctttcttgtcattagcaatgtgttttgtattccgtggtattttagaatggtcaaaagggagtcacacaaagaaagtgctgcagtgggagagagaatgaactagagataaagcttggtaggttctgaaacatcagtgagttacatcttccgatcgttttctgtgactaggaacttccacccattgatttcctagttaacggattaaccactggcttcagctgctttatattatgtcttcagaggtccctgcccttgttactgcagggactttgcattggtgcttctaggtggtatgaaatcaagtgggccggacactccctacttgcccctaagttactagaaagaagcaactgttttcttaggtaggttgtataatgtagattagaaatatagtaatgtcgtggagtcacagtactcaggagctggaagttaactcgggagttatgacctagtaatttcamtgacagcagagaaaaaagacgctgttttaaagaagctccccatttttgctgctgtagattctggacactaactttaaatggaattatgggatagtggattgtattttctcacagaacaagtgttgttatttgtcataaccaagcaaatcatgggtgtcaccaaaactatattaagaaaactagataaaacagtgatataaattttgtaatcatgcttcaagatttgtgaaataaaatacggcattggttagtcaagcaaaactaatagaatataaagcataggacatatacttagcaatactatttttgatttaaatttcatacatttgttgtaaacaatattaacaatatttttgcctttcttggaatttgacagatttgagagcatcatctggatggcccaaatctcttataataagttgcccaagggagtttcaaatgtacattttcctattgcaagcagagaggttcaaaatcaatccattgactttccagctgtcagccaaatagtaggttattgttgttgatgatcttgtttttccttgttaaaaaaaaaaaaaatttaaaagtaaggtctgacccagcatttcatttctttcctttaccctctcctgcctccckggtttattcagagtcactcctatagtgttctgtattaggccaaatcagtgctaccagggaacagtaagtgcttttaagtcccccttttaaaccttctctgcccccaggrctacttgacactttgttgacagctgtcactgtacttgagtattccttgaaaagcctcgggaacccatgtggatcattatagaaggatctccaaactttatcaccgaattgctatggcatgcttatgacaatattctggttctatatgccctgcttcccctgaatgagtggttgattgaaatatgggttttaattagccagcatcaaatgattggagcttgaaattactttcagttacagggtagtcatgataactcacattactataaagatacaaggtgtttgaaacatctgacagattgcagggtgggcaagtacacggctgccagcaaccaacccctgtgtactcactgtgttggcaggacttctttcctttgtcagctgagtgagtgcagctgctttcctcctcacttcatgcacatgcaccttgctcttttctcatagggtttttttttttttttgcttgtccacacccatcattgctatagtcctgcaagggtcactcgcagaccttgtctgtatttgatgagtagcagtagagccttgctctgcatttcccaatttattatgttacgctttgcagtttctcccatccctggtgtcattgccctagtctggccaccattatctttttcctgcattaccctgacagtctcttgcttggggtccctgcctttagtcttgcattcccyggtctattctcactgcagccctagtttctttccaaagcatgaaactaatcatgccattcctctgttagaaacttgagccctccaccccaccccggccttcctcttaggatgcagcccaaatctcttacatagccagcaaggtcctgtacaatccatctcctgctcgagtcttctctgggaatctcatgggattgagcccaaatactgcttttgtacaagaccttgctggcagacagacctttgtctgttgtgttgaacttctttgtctagtcatattgwagttcttgtatatcctcagacttatccttttgagtttttttatttttgagttggagttttgctgttgttgcccaggctggagtgcaatgcctcaatcttggctcactgcaacctccacctcccaggttcaagtgattctcctgcctcagcctcccgagtaactgggattacaggctcccgccaccacgcctggctaattttttgtatttttagtagacatggggtttcaccatgttggccaggctggtctcgaactgctgacgtcaggtgatccacccatcttggcctcccaaagtgctgggattacaggcctgagccaccgcacccggcctccttttgggtttttgaccgtgttgttccttctgtctgaatactgttccaccttctagccctgccccactgctatctcacctcttacctgccttttgtctagcaaactcctgctcattgttcagatccctgcctagaaaccacttaccccaggaaayttttmatgacacccagtcctggtgagatgccccacctgtgtgggcctgtggtacctgtgcacgtctctcgtagcacacgtcacgtggttctgccattgcccgttacacacccctctcctccagatcccatagcttctattttctcattggtcctcccaggacctcctcttctggcacttccttcagcactcccccttgctttggtgctgagctctctttgccaaggccgttatagaactgtgtgtgtttgctgcaggtaaacattgacctgttgagaccagataattaggcaaagcaggaaaagaagaagtctcagagggtcgaggagatttccttcaagagccatttcctcattttctcagtgtggactttccaagttgataccattttgaagagtttccttttcttgtgttactaattctctttagtactgatccttgtaatagtatgtacttcattgtgttacaattacatgtttacttgtctgtttttcccatttgattatgagcctttgaaagaagtgwatgttcgcttcccatgttctgtacgctcagccacagtgaccgtattataaagttaggtgcctcataaatgtttgtggaatgcrtgagctaaagcaaatcagataatgaagcctgatatgtacaagtgcctgtgtccactaagaggcaagcaggaaaaggggtctttctcttaggttggttccactgggcatgggtgtgagtgtcttcaccaggctcctgatggtgcttatacaatgccagtttcaggtctcaatcgtagcagacccaaggaagcccttttggaagaggcactttcttgagtaccatctggggaaaagtacgagtctgtggaggagtggctagggagcggggctctggatttggaaacattgatgtggaggttcatgtcctcctcctagttactaatttagtttagaaaggaaatcatctgtgtagacttgacaagttttggtgagtgctgtaktgagttgggattttcccttctcggaccctcccgctctcagttcctgctaccctcctcactttcctcctccattgggtcgaagttaatctgacattagtacctttgtcccctggaattttaggctaggagttttaggtgaggtttggttagggtgtctagaggtaggtccctaacttggaaamcaagttacccctggcttccttttctagtagaacccgctgctctcttcctgttgtcaaaactctgggacacttgagagtggagcttttcttcactctatcttctcctgtgtggcttttctcgtgtctgatctcagcttctcacttgaggatcatgacttattttcttcttgaaagagtggtctttctgccatcattcatttcctcaagcctctgaggcctgctctttgaagtctagggactttggtgtctggaagcccaggaaggttgcggtttggtttggcttctgggtaggggttggaaggaaggtccaatgcttgggccagtcctcccagtgtggggacgactgggagaycagggagctagctcagggagctccccgtgtgctcaaacacacagaagcatctgaggagccctaactaataaagagctaagaaaacctctagaatttgctttagctcatatgggcttttacccagtgcttccttttcacctcatcaccgtgtgctacagtcacagggaatgcgtataatgatgtcggattggcttcatttggtagttacgctaaattcttcagatgcaatttgtttttttgttgacatagtggtcatctcatgactttaaacaataagataaaatattgattgctgtgtgtcagttttgagaatggatctgaggaatgaaatgaaaatcagttattaaaatcaggataaatttgatttaaatcaaaaatattaaagcagcatttaaggtcaacagctcccccaaaaacattgttttgttatgcaaccagctaggttacggattctgaatatcatccttataatcatttaaacaaattattttaacaaaatacctctggcagccctcaattcatttcccttcttgaaacttgtactttttggtgtgatggctcaggcctgtaatcccagcactttgggagaccaaggcaggaggatcccttgagcccaggagatcgagcttggaagtgtactatgtttgcatccctgcactccagcctgggtgacagagtgacaccccatctcaaagaaaaaaaaaaaaaagaaacttgtgcttttagcaagaagagatggctttaactgtgcatgcatacttacagtaaaaaataaggccaatcacctgtttctttttccttggtaggaaaaatgaggccagctaagcagcttttgtttaattttgtgggacagcaaagatactcattgagcacaatatgtttctttaatttttcttaataacatgttgtcttctctgggaatctgatgggattgagcccatacactgcttttgtgaaattttttaaaacttttctaaaaatgttgctttaatattccatctcagaaacttttgagagtgggcattataagattatgggaagttataatcctgttttcatgattctttgacctttgacatattttatttttttaataaatctttaaagaaaattaaatatatgtatgtgtataatgaaaaagtatttttgctcaagcttgataaacatacaaataataaatttttcctctaattattttttcctgtcctattaaacatacctctactgacataggcactatttcataaccygtgttcatcttttttgcaaaaatgacatttacaaaagtgatgacataaaacttgttaaaaatggtgattttaaaaattgttcatgattgattataggactttgagctgaaaccttttttctttttttttctttttttgagacgaggtcttactgtatcaccctagctggagtgctatggtatggtaatggctcactgcagccttgaactgctgggctcaaggagattctcctatctcagcctcctgagtagctgggactacaggcaggtgcccccacactgccaatttttaattttttttgtagagacaggatcttgctatgttgctcaggctggtctcaaactcctggcttcattccatccttctgtctcagcttcacaaagtgctgggattataggcatgagccattgagcctggcctgaactgaaactttttaaggctatgttatattttgattgagaactacctttttctctccatccaagtaaaattcttttagttgawcaaacacctccctattcccagccctgcagcatcatctgtgatgtgcctcaataggtgtracttgaaccagccgaaccagacccaattgcaaaggccaactgaaatcaccatctgtgctttactggcagtgatgtaatgtgattgcatgctttcagaaatagggytacagaggaaatgaaccccagttcttcacatggraaatggaaaggtggtagttaaatcaccactgaatagaggagagagagagagagtgagctcatgtggtgtatatttagtgttcaaagggcttttgccatttaatagttgtgtgatcatggacaagttgtctcatttttcttcagaataaartggggagactaatgccaatttctcatggttgccatggagactaaatgagaaaatatacaggtgctgagtgaaatatagcaggtgatcactaagtatccttttctttttttcttctttaacacagaagcatccagggccataacttcactgccaccttttacctgttccacattgactcttgccaastgaactactttytgtctaccctctttggctttcatttggttttctgtgcccttgttccaacaaacatttatttatttattactggctatgtgccagacactgtactaagtgccagagtttcaaagatgaataggtcagagatgtgactgccgactaactctgcatagggcggtcagggcagacttcaggaaaggggtggtgatgatgtttgagctgaatattgaaggaggaataataggagtttaccaatcagacatgatggaattggtggtgggggcgaggaggagaaagggcatttcttgggagaaggatgatgtgcgatgatgggtgcattggttacagtcataaagggcttggtgatttctgtgaattataactagttatatttatttgaaatgcacgtacttggtgggagatgaggttacaaggagtaaatacgaatagactgacaaagctaaggagtggggatttgcttctatagtaaatggctctaaccctacatttttttttttttgaggcatagtcttgctctgttacctaggccgaatgcagtggtgtgatcatagatcactgcagccttgaccttctgggtgcaaacaatcctccctcctcagtttcctgagtagtttgggttacaagtgtgtgccaccaccacatttggcagacttttttcttttttgtagagacggggtctcactctgttgctcaggctggtctctaactcttgggctgaagtgattcttctgctcagcctcccaaagcacaggcgtgattacaggtgtgagccactgccctggctctatccttacatctttatactatttttaattaatatatatgtgtgagtatggtgggggaggagtgagggagagatatcacctccaaagtcacctcaacagaacttttcttgatcctatttgccttcctctaaactcacatgacattttatctatatttttctcttggcagtcagtattttatgtatacacacacatataattatatataattaactataatataattaaatgtataacacatgttataattaattataatttgatatataacacaattatattagaattaattataataaatacataataattataaacaattataattaaatatgtaacaattatattataattaattataataaatatataacaattataattaattacataacataattataattaattataataaatacataacaawtataattatgattactatataacataactattataattatataacataattataattaattataatcaaatatataatacaactaattataaatatataacaattatatataatatattcaactaattattctaattaaatagataatataattataattaattataatatataagtatattataaacatataagtatatgcaaaattatatgtgtatattttatatacatatcattatatattaagaatacataatttttgtttttttaaagagatgaggtctcactgtttttcccaggctgaactcaaactcttgggttcaagtgatactcccacctcagccttccaagtagctgggattaaaggtgagtgccaccatgccaggcccctctacattttaaaaacggttacttatttataactctgttagcacctttactatacattaagctccttgtgggcagaaggcatacctgagagcccctggttcctttgtgacccatatggcatctgtctgacctgtagaaggtgctcaagaaacacttgacaatggaatgaatgaatggatgggcctgtgatcatccccagcttcttcagaatactttccacttcaaaaacatgtttgatgaaagcagtcagtcacaaaagaccacatactaaatgatcccatttataggaaatgtccagtataggcaaatgtataaagagcagaagtggtggttgcctagggctggggtggtggtggtggtaacaaggatagggagtcactgctgattgttgcacaactctgaggatatactaaacaccattgcatggtactttaaatgggtaaattttatgttatacacattttgtgtcaataaagcttttgaaatacttttgaaattttgtcaaattttaacaaaagtatctttaaatgcatttttttcctgtttttatgtttaccgtatatacatagggacttgcattatataatatttattgttattttttgaagtttggactgggagctcatagcatgtgctttgggacttcattaaccatttcagagatgcaaggcagtgtgagagggaattcttgtgagcctatgcagaatgacctcattctctctgtcagagaaatactgcactaagttattttagtattagcagaatgtcgttgttggatatatttggacagtatatttttgtttcaagtcattgaagaagtttgtcttcatggagtaatatattgctttatcttaataaataggcatagcattggcagaagtacaaggaatggtgctatttttctgtcaccttcagaatgaagaggtaggtatagtttgttttttagcctgttgatcttgtacttctcattaacaggtactttatttttaaaagtatgttttacattaaaatagcatttgtgcactaatgaagcaatacttattaataaaacatgcccttagataaattgtttaatgcagttttcttttttcttccacattgtggggactagtggtttctgtgttgatgaaagagcagggagcatcttttcttgtgtgttcattcatgcaaaattttgccctcttgaaaaatgaacaaagatcatagccagaaggtatttatcatgcagttaaccacaagaaatcttgaatgagatcatcatcaagtaacttaaataaaacagttattttctgacactttatcaccagagycattctttaggacacttagcattattatgtatgcatttttctttttcatataattgccaactattttgaagaatgggatgcttcagattaacgtcttgggagggagacacaatctacttgaccctgatttaaaggaatagtggaagtgggtggttcttcaccacacatgtgattgttactagggattcttcatagactctgtcatagcaaaagtattatatttggcttctcatgacgtgtcccgtgactagcagagtgttgctcagtggaatggcttgggctgaatcagtaggtctttccaagtataaatttgagtgctcactagaccagagagaggcagaggcgtcaggatttggtgggagattctctgagtgttgcaaatagtccccatccctcctgtgcatgacccaagagtttgctctgagacacctattgaataaatggccagccagcactgtggttaggtgaaaggagcacgaatattgatagatatttaagccctgacgtgactgagcctggccttcagctttgcctcttactatatttgtgatgtccaagagtgacaggggctaacatagctataaataagcaactattaagaaattgtaaaaagcagtgactgccaagagaaaaatatagagaaaatgccktgtgaatttggaggaagtttagagtgataggagctgtgtgccaaagccactagtctttcttgggcaattcccattatggaacaaagggatccagaatgcattttcccaaagaaagaatgagtacagatgaaatattgttgttagaataattcttcaggcttatcatgggtttttgggttaacttggaaacccaaatagcattttactttttaatgacgaatatacaaatgagctatggcacccctgaagagttggcatggttttccatagctgcggtcaaggttggctcctttctgtacaggttttccatatgtcttgtgagagggtttgaaatatcaactttggattccaacatctgagttcagttattgtctctatgcagttttgattacaagcaaacatttgtatacatacaaatgtgtgtctgtgtatgtgtgtttgtcacttaagaaaataatgtgtcaaccacagatatgttagtatgagcattttaacagttcgttagtcactgaagtttttttgcagtacaggctaatgccaaaggcaagctttctcctgcttgctgttttgcccagggctggcatggctggtcagtgacatcaagggattgtaacaattcacttttataatagttgatataattttggttggcttttgtttattcactatttcaagtatgatggtggtggttttttgtttttgcttttctctgcttcaaagctatcaacgattgcattcctctcctccactaaactttatgtaggagggagggaggatttagtacctgcacatggaaatactttgatgctgtgtcgggtcatttttcagggagacagaggccagagtctgtgaaggtctgtagctgcagaatggttagcacagaggcaattgatacaatgagggggctcaggttttgggaccagccagccctgagtcaccatggggctctttataacattggaataatacttaactcagggctaacctaatgcctagaacattgtagaatcagtagagactaaattggcatggtattggattgctgactagaaatacttctatctcaaccttataaccaactggctgttttaccttgggtatgtttctttatttctctgggccttagtgttcttatctgtcagatggtggaatggactgttatctctaagattcccttgatagattctgagctttttagataagaaccattttcattcgtctttgtttcctaacactgcgattatacttggacaaaacatttttttgaacgaatgattagatttgcagctatagttatatagctacatatagttataattatgagcttatttgtatatgtctgtgaacatttataaatgagaattgtctttttttgaggttatcctcaagcagcctgaaatgcaattttatctctaaatgttcattcatacatatacatatgtgtgtatgcctagaactaatatataaaatttaaaaattagaaaaaaataaaaatgatcaaggtgcaagagtatacgtttaaacaaatctattgctttagaagaatttatttatgttgcattatttggatatgatgcttagaataacttggctagtagaaaaatgctgttggcagcttctaggtttaaaaaaagcaccccagagaattagggaaaaaatagtagttaaaagggtactgtcaaggttggtaggtctaaatttaacagagcagctgtgttttggtttggaagggtgtgtgtgtcatgctatctccccgcgctgtttgcttgccctgttatgaggcagaaacatgttataatggagatagagatcctgccttttgaaatgcagcctcaagaagtggctgcttgaatgttgcagtgcccccactggcttacaagaaccttgtcagtgtttggagaagtttaaakctagcaggtgtaattgttgttatgctttctggcttggctgtggtctttttctgaaggaactcttcaagaacattgagcagtattctctgtgcttgaaatattgtgttttattgcatttaagatgccagtaattataagattttattttattttttgagatggagtcttgctctgtcacccagcctggagagcagtggttcaatctcagctcactgcagtctctgcctcctgggttcaagtgattctggtgcctcagcctcctgagtagctgggattacaggcacgttccaccacgcctggctaattttttgtatttttagcagagacagggctttgccatgtcggtcaggctggtgtcaaactcctgacctcaagtggtctatctccctcatcctcccaaagtactgggattactaaagtcatgagccactgcgcctggcatatttttaagattttatgttccactaagaaataaccttgacagttaagctgtgataaagtgctttcctatccattagaatattcattttatgtttattggagttgttctatctatgttcataaataaaaaggaaaatttaagtgaaatgaattggtagcaatattcttgaagcttacattcagagcccaagtcttctgaatcattttctgcctccatgttgtccatgtgagtgttttttcctatactgtcaccctgtgtgccattaagagtggtagtaatgtagcagttgttaaaaagtgtgctctactgtctatcctggaattttcttccaagctgctgactctcattctgcatttttttttttttttttttttttttttttttttttaagacacagcctcctctgttactcagcttaggtacagkggcaagatcttggctcactgcaacctccacctttcgggttcaagcaattcttgtgcctcagtctcctgagtagctgggattacagacatgcagcaccacactaattttttgtatttttagtagagacagggtttcaccatgttggccaggctgatctcgaactcctggccttaagtgatcctcccgcctcagcctcccaaagtgctgggattacaggcatgagccaccacgcctggcccttcattctgcatgttttgatgctactgccttcttgatctcacatagataatgtcatgaactatgttatgactaccacctggcccacagtgacaggaagataccgtcggtatcagagacgaataaatgtgtaccttagaagcaatggcatgtagcagcagtgcactagctgtaaaaaggactttgaccaaggagtcattgttcagaggttcacagtggaagtgtggattatggagtattttctttattctaaatggttaaacaccacaagtaaagaaattgtttcatgttcagacactattattctctaattgtattaatgtacagttaccttttttctttcatggagaatcttaatggagagtttaacctgaaaagaatagccctgctgtttctatttttttgaaacatctttcaaacttcaaacatactttgcttctcaaacattcatagtgtgtataaattatgaggaatacaaagatgagtaaggcttgttgccctcaagcattattggttaagtattggcggttaaatgagaagtggtaataaacatcactaacaagcacattatagtcttcaaagtaggataaaattgttgggtactgtttaccttggatttattaagtttaattaagtctgcctacaataaattaaaaaatcacatgtctaaaaatatgtgcatcatcttgaatctgaatcagatttctttccctttagaagctctattgtggataattgattcaaaagaatatgatctgtacattatagtatttatggctgttaatgtcctaatttgatcatggtgctgtagttatataacagattgtccttgtgttttggaaattaygttggaatatttaggggtaaaggcatcatgtctgcaatttatcgtcatgtgtttcagaagaaaatatttgtgtgtgtatgtgcgtgttatgtttgtatagagagaatgatcaaatatatctggtgaaatgttaattgggaagtttgggtgaagggtatacgcggattttttatggcattcttacaacttttctgtggtttgaaatgattttaaaataagaggttatggaattgaaaagctattgctaagatatcagatgcctggtacttttaaatcaacacatttattttatgtgactttagggcagatgtgtgcatattttaagaaaaattccattctcttggcggaaacttgcagaatgtcttcaactctgcttcctcttgctttcacacaccccgaagtgcttgctctctcactttgtggatttatatatcttttgcggcccgcttggggggagtatttgcacatacatttctatgttactgctgttctccaaacactctattattattgtatctgagaggttttcaattgttttaggggggagtttcctacacttaccctttggtagtgattttccaattgtctatgactagctattttgatgacttaatttagaatggtggtcccttttgtttatttctaaactagctgctatgatccctgcttcccttctgcctctttacccctcccttatttgtcacccttctcctcacttctctattaggccggattcatctttggaattagtaaaaatcctgcctcttccaggaagcctatcctgactatccctatggaactctgattacttcttaatttgccacttactgcactcagttttgtatagttatattttattgttttatattgttctcaatgatggattaaaattattgttgttttgtagtcacttcaagttatatgtgcatattattttcccagcccagtgtcagagtactagcagatataagcagatataaactacgytttccctcccccgctgactttatccccacagctcatggctgtctccacgaagtaagtgattctgtctgagtaggtattttttttttttytatttaacctaggatcagacctaagggagttttgttgttgtcgttgttgtttttgagacagagtttcgctcttgttgcccagcctggagtgcaatggcgtgatctcagctcacgcaccctccacctcccgcattcaagcgattctcctgcctcagcctcccgagtagcttgggattacaggcatgtgccaccacacttggctaattttgtatttttagtagagacggaagtttctccatgttggtcaggctggtctcgaactcccgacctctggtgatctgcccacctccgcctcccaaagtgctgggattacaggcatgagccaccgcgcctggccctgagtaggtattttttactgggtccaaaactgaagccactgtctgacttttgggattatctgtatctctcctttcttcctttttacctccaatctctgaggattaaagattttttttgtctgcattagctgagatattagtttcataatgtagccaattcatttactatttttaattcagaatgacaaataaactggatttttttcacctgtaatttgatctgtgattgttgaaacacgtaaaacatatttgaacaaaaacattccaacacagtttataaatgtgttatcctctgtggtaaggacaaagtcatgagactcgtttttgctcaaggatataccacatttgcatcttaaatacaactgttaatattctcttcttgttaattcaggcagggtagcttttcctgagtgacagaaatgtagatgattatgtgaaataatgagttgattggttcatatctgggttgtcattttggctttttggattgtcttatgaaaattttctgagggcagtactcttttttgtagagttgggattataaaactgtgaaatgttctcttttacctttgtcttgcctctgaaacattttttgggttaaattctttaaaaaaaaagaagtcccattgactgtgtatgtgctattaactctagcatcgcttccatgatctggtgttgtctaacatttgattcgtccccttttgtacattagcatatcccagcagctcgtggaagcatttgtgaacgaagaaaccgaggctatgagagattaagtgatttactctagaccacaggtaacaatgtctgatgtaagtttgggtcttcactccaaacctgtacattctactggattaaaggttcttaacctgctttgtgccaagttgcactttggcattctggtgaagcctgtggatccattttacttttaaatacaaaaaatatggccgggygcggtggctcacgcctgtaatcccagaactttgggaggccgagacgggcagatcacgaggtcaggagattgagaccatcctggctaacacggtgaaaccctgtctctactaaaaaacacaaaaaattagccgggtgtggtggcgggcgcctgtagtcccagctactcgggaggctgaggcgggagaatggcatgaacctgggaggctggagcttgcagtgagccgagatcgcgccactgcactccagcctgggcgacagagggagactccgtctcccccccccaaaaaaatacatagcattacaaaagaaaccaattatatataattaaaaaaacccaagtttgtaatatacactgacttactagcacattaaataaaatgacctggtgttgggtgtattaactactattattkcaaagtagtgatgagcatgaatatttggaatgtctgaaactattgtaatgtgttatgaaaatgtgtgatttctattggtgacaaatcacaggtactgtggctaatactactaggttttagggtatcattcatatttgaaggaaatgcatactttatttagaagttagtgagaataaagatgcattttttttcctatccaagtttacagatctcttgaattcccaggttaagaaytacttcatcagattataccggtctctcatgtttataaacatttatgccacctgctggatctgctcttaaaaaacagaataaacaattacaaaagcaaaaatatatgcaaacaatgtaagacctcactaaaaaaagtaagattcaggcttaagtattagttcttgcactgctataaagaaatacctgagactgataaagaggtttaattggctcatgagtctgcagtctgtaggctcatgactctgcatggcagtatctgctggcttctggggaggctttgggaaacttacaatcatggcaggagatgaaagggaagggggtacatcacatggctggaggaggaggaggggcagcgagaggtgccacacacttttaaacgactagatctcatgagaactcactataagaattgcaccaagagggaaatcagctcccatgatccagtcacctcccatcaggcctcacctccaacactggcgattacaatttgacatgagatttgggcggggacacagatccaaactatatcagcatatacatatgttgcgagatcctggagggtaaaaattaaaatttacttaatttaaaatggttagaacctataagtttaaattatttgtgtttcttaatgttctagtcagttctctgcctacctctcccctaaagataaaatgatcatattgaagtttgttattttcttcattaaaaagcctttgccttctatatttcagcttcttctgggcaatttgttttaatgagggtgactgtcatagagagtttcagttcagttctccattagtgatgactggtaggtagagcagagacaggacctgaaatagaatgttagagtgcactgaaatggcatgtctctcctgtgcgtcgtgtaagcctgaaaaggtttgttttattgcttttcactgggtgagtctgaacctcttcgtcagttgtcaggcctgacagcttaagtgtattgtagttgcttccrtccttacctaaaatctagttctactctttcttttgttaattaaatgggaggcattcacttaaatgcattttatttcctctcttaggtggggaatcataagctgtttcttctaaactgttaagcccctctgtctgagttgctccagagatactaagtaactcggatgstgttgacaggaaaagctttaggtagaggggaaaaaaacgactgagcacatttaccgctcagcagggttgccatgctcccctaaccccgcatcatgcagtgagtatgtgcgttgctttccccaggccagcatcctggatcagagctgcaggacttgggaggcagtgcctcagccctgctgtcagcctcatctcccgcctggggaggagagctgcagatttgtgtgagcttccatgcagcttcctggattccctctcccaagtctgccctgcagacccatccagtggactgctcttctgccatatacattctctcccttgactctttccagccttgggctttctaatcattaccaacactttacagtctttttgtatttcacaaaaatagcttgcaaaagcttttggcctgaatttttgtaacagtcttttgattacaatagggctggagaatactattaacttctgattatctgaggacagattattttaaatttggcttataaattgaatggtattttattttcctttagtacttcttgtattattattgttattattttggggtaattattctccccacccattaacttttattttgctgcatcctatcaggaaacttacaaaacctaaaaatgtaagcatttattcaattataggtaatgtttgaaagaatacaggtctgcctaggtttgtattttgtaccattcccaactgggaacttaaatgacaatgttttggagagcgcatgctgttaaaagcgctaatggagaacattttaatttctattaacaaatcaaccaataaaacaattatttaagtattttctttaaatgtctagtgagttttgtgattgttagtagagatcaggcaaaggggtttcagcccttcagttgctttatccacagttggtttatcacacatgctgctacctgccatggtgattagacatttacatagtttaaactttttattcatagtcatgcagtgtttaatttatgcccataatagattattggtagaaatctggaaacatacgggacactgatgctgaaaagcaggttaatgagcatcataaatgtgatgatgcctctgaaaattagcgtcaggatgcttttcactagactactaaaatgtattcatttgctaaaatgctcatatagcacattggggtgtgtctcatattttgctacttaatcttagaaaggttgctcttcatttattaggaataaaaactatcctcccccaattttatttgcatttgcaaatagtaccctgaaatcttttatcctgtcataaataaaacacaaaagttctaaaatcaaataagttaacttccctaagtgcaaaatgtgagaattctgaacagtagagcatgaaagggaattttgtctattttttttttttttttgagatggagtctcaaccggtcacccaggctggagtgcagtggcgctatctcggctcactgctacctccgcctcccgggttcaagcaattctcctgcctcagcctcccgagtagctgggtgggactacaggcatgcaccaccacgcccagctaatttttatatttttagtagasacggagtttcgccatgatggccaggctggtctcagactcctgacgtcaggtaatctgcccgccttggcctcccaaagtgctgggattacaggtgtgagccaccgtgtccagtcgattttgtctatttttgaaactgtaacagttaagtcagttttgtccacattaaaaaatatrgttggtccacaaatgaaatacaatatagtgtcatatttaaatttttttcataattaaaggctgcaacaagttaaattttatcttgatataaatggtataaaaagattattacaataaactttgttattaagggttgggtgtgatggttcacggctgtaatcccagcactttgggaagctgaggcaggcgggttgcttgagctcagaagtttgagaccagcctggacaacataatgaaacctctgtctctacaaaaaatacaaaaattagctgggtgtggtggtgcacacctgtggtccagctgctcggtggggctgaggtgggagaatcactggagccctggccattgatgctacagtgtgccgtgtttgtgctgctaggctccagcctgggtggcaaagtgagaccctgcatcaaaaaaattgaatacccgaagcaaacaaacaaaaaaaaactttgtcatgatctttattaataatattcattatttaaaataaaatgttttaagtaaaatcacttatgtaacatacaagttacagatgtttaaaaatattaccaaaggtttcttaagattgtgttattatgagaaatgcagttgtctgttggaatgtgtagcagagagaagagccttggggtagggacatggaacatcttcccggtttctgcatcagagagtgattgtatgaaaatgtgtacacattggcacagactagagccagttttgaatgatttctgcagtatattggccttgcctggtcccctgtgtcatcgcagagttgattataatgatgagtgtaacctagcagggatgccaagctccctacatctttctgggataaggatggtttgagtaaaaggttgccatggttgtctggaggcagcaagcaataaaagactgtctcagaatgtgttctcttggtgttaagccttggaggtgtgtctttgtgagtattcaaagggaaacgtaagatagttggagagaatcttagggacatgcagaaatactaccgcagtgtgatgaagagaagcctttttaagattgtaaaagtataaatattgctcataaaaaaatagatgtgtttcaaccaagcttgcttttaagtgaatatgtataagtggattatagttctccatttacatcttttataaaattggacatgctatgctggaaaaaaagggcccttggatataatttacatttcctaggaatgtggcagttctgtcattgcatgcttaaaaataattattttcttacagaactttacactaatgccaaaaacattgccagcacctcttatgtattcgtattttacctaacttatgcccaggcagactgctttagacctgaactatgtttattttttagctgatagtcgaagtcctcataggactattagcgtatcaaaggcagtattgaattagagcagttgtttgctttgggtcttagaaattcccagagtttagcagcagaacatagaatagtgaaagtgggttcttagatggggacagccaggacagggtgttctaaatcacattcaagttttgcgtatatgactggagtagatggagatgggggaataatgaagttatgactcaatcagtcctttcatttcattctgcttagtgaattttgaataaaagaaaacctgtgaaaaaggaagatttaggaagatttgtactggacccttgctgctattatgcagaatggtacatgggaagaaaggatggaaaaataaatcaagagcatcgcttcacttaggttttcagcaaacattgggatagctgagacattttttcattaaaggttagcttgccagaaaggtggttgagagtgagtgaattattagtatgtaggtactatgattgttagattatcattaaacaggaagtagatgactggatggagccttgaagaattactagagtaggaaaggtaatttagtcattgatgtgcaatctataaattccttgttatttgaaatttgagtgttatttatatagggatttgrgtaaagtaggtttatgggaactaaaatgtaatctaatgaggtaatggtatttatcagaaggtgatataattctcacaacaatcttattacctggatacttgtataattcccactatacaagcaaggaaactgagttacggggaagctaataaacttggccaacaatatacataaacacatggcatggcagggttttagatcgaggcattctgattctacaggcgaccttcttagctgctctgctgtgatgccatgggcagagaaccacagtttcagaaatacatttaccagcagggacactcgaggtgatctaattcatggccctcattttagaaataataaaagggctcttcgactgcgactgaatggcttgttttatggcttacttaccctgggatggaaaaagcattttaatgactctttaatttcctcttattatggatagctgggtagtataggggagtgagagatcatctctgactcccctttttgctcttgtgtaaatgggctctttggctggatctgcaaactaaattgacaccaggcatattaacaagtgaaaagcatatacatcatcgacgtgttcatggggatcttcataagagagtgaatccgaggaagtaaccacagcaagatgcttgtatacttttttgacaaagaacaatgaatttgagaagaaatgacaggacaagtaaactttggtgaggggcaataaattttctaggggagttactgagatatatagaggggtgtataaaactagtggaagataagggttacttcattaagtatatttattcaggtctgttgcagcmccagttctcaatgtctggtggtaagggctgttttctcaccccagtactggaagggtacccctcccagaggaatcttgatggcttactgcatgcgggaagagaaaggtcagctagccccttctgaaactacaattcctccagtgttttcaacttgaaatagtcaataggccattccagcatattttgggatggcatgtccttcactccttcagtagggataatgaaaaaagagactttcctggggcagctataggcttctgctctgaggtctcttccagctcttgcaagtatacccaacatagctgatttttagcttttctttctaagtctgcatgtttttgaggctatcctttgattcttctaggtctgacaaagggtagagttggacatacgttttagtaagatatgtggggtcgaatataggttccactgttctaatggagaccctaagttacatggctcaaaaagttaaaattttatttttctctcatgtaacattttrgataatttgatgattccctaatgttgggacccagtcttttctgtcttaggctcacaactatccttgagcctgtgtcatgggggatgactctgaagctgcgtgcaccctgttcattcacattttcttggcctgaacttagtcactaggctattcctaactgcaagagaagctggaagatgtagtcttccttctgaccagccatgtgctcaaccacaaattgagtttcagttattggagggcagaaagaatagatatggggctgctttgtaggctgctgctcggggcagcctctgctgtgttatttgagatttataattttccttggcttcccagatgacagtggaaaaaggcatagtcaagacttcaagtgcggaaaatgttggcaactctgacatgcaagttcttttccatatasagctgagttatgctggagtattttggttacaaagacttcattttctcacctgtctgaattcctgtttggattttagttactcttgatttatcagcatggattaaaaattgaaaagacttggtattttaaaattatatctgaaatggcagagacagcatctgaggattcctcttgctactataaggaatgagtaatttagtttgatttttctttaaatccaaataaataagatgattaaactcaagataaagctgtaatatctcttatcgtgtcctgtcatttgtcattgctaccatgtcttgaaagctttgtggaaaaataatggttttgatatttgttattgagatagaatacccacaaataggtatttaaaatatttttgtcttagccagttgattgtggcgtgtgcatggactaagcaacttaaaaaaaaagaaattggtttgttgaataacagctttcactagagacactaaagtccacaaaacctcagtgagcagttgtcagattccattttaaggaggcaaagctaaactttatatgcgtttcccaccatgtgtaaatccaaacagcaagcaaggactattaaatgttttattttgctagtggcagcaaagaatgtaatgttggatataatatagtttacatttacagttgaagttatattttcaattgtatggaataaaatgaataggtctctatttcatagccaaagtggacaatttatagagtgattttctagaacaccccaatatgtagtgacattttgtggcagtgatgccacatgtaggaartggatctctatagaactttgctattaatgttgcggggtatttgttgcatgatgtagaaaatgctatccgggttacctttcattccttatatctgacttagcttaacctcagctgatggcttaagtcagtggccaagaatttttcatcagctgtccttggtaacatatatcattcatcatactaggatgattggtgttatcaattgaaaaatctaaatggaagacaaaattaaatgctacttgagaagctagagtgaaaagagaatgtcttggctctctaacatttcctctcttttctacctgtattcaatatggccatgaatatccttttggagacactttgaatctcattgtgttcaattacagaggaactcttcagcaaataacccttgtatggtgtgcttctagatagtgtacataagaaactgtgtgctgtaaattctgctttcccaaatgttataaaggtatatgattgcatttttctataatataatatatcatataatataatacagatgtttgattgtaatttaccttttaagaacacatagtcttataatggtatatgggcaggatacctgtggggtcaaaggaaaagaacatgaaccaattttgttttcttagagcctgtgctacctacttttagatactttaatcccagccaactctctttggtataagaatggtttgaacttctgttagctaaactgatatactatgtaatgttcatgattgaattgataaaggtgttttttaaaaactgaaattatgcctcattatgcattgtttaaaaataacttttaaatgattatgaaagtaaaaatgtgttcttggtaaacactrcaacgaagtataaagagagaaaggaaaatgatccatttctcccaaatataaaggtaatcattagtatcattttggcatatgtatttatgtatgtatgtatttattttttctgagacagtctctcgctctgtcgccaggctggagtgcagtggcgtgttctcggctcactgcgacctctgcttcccgggtttgagcaattctccwgcctcascctccctagtagctgagastacaggtgtgcaccaccacgcctggctaatttttgtacttttagtagaggtgtggtttcaccatgttggccaggccggtckcgawctcctgacctcaggtgatccgcctgcctcagcctccgaaagtgctgggattacaggtgtgagccactgtgctgggctatatgtatgtatttctttgtgatggtgtccttaggcttttttcagtactgtacatatagaaaacaaaatgaagaccaaatagtgtgttcagcctggtatcttttcacttgtgagaaatttttcgtggggtttaaagcatgttttttaatgttagcattgtattatttgaccatttcactgtttttggacatttaatttgcttctagtttttcattgttttatatataaaatgtatattgttctccctcattgtctaaatctttctctttgccacactacacttcatgtttcttaggaggaagatttaatagtcttttaagcttgtcatgaagatgaatttttagaaaatgcttgatcaacatcaattttactttaacctttggtctcgtcatcattcatcatattctattactttagcagcattcaaagataatgaaagagattcagataaattcttgttactctcagatcaaattcatttacaataaatatgtgaatcttgatgatcagaagctaaaatacttattgaacctggacatcaagccagatcctaaatctttatgaaaatgcaccacaaattcttcttgttacataatcttttctgtaggttaaaaaaaccaacaaatcctagcatgttgacattctgaagaatatatggctttaaacagtctcttgcaaactatagtactggctcaatgaaatgttatacagcatcagtcaggatttttaataaaatgctgttggttctccaattgaagagtttcattctgtttatgtaatgatgttcatgtttgacctgaaaatacctcctcattctacggcatttcatcttcaagagaaaccttattagtaatttgtagattagaaataaagtcacagagggtagtcaggagaacacaggtctctgtaaacctgactcttttattaaacatactttgccatgaatacttttcattgagctgtttttctacctatttaagatgaaccagatatgacatatttctgtattttatttcacaatcctatggtatatacccccaacacccacacagtggttataactgtaaaatgaaagttttgcatgtgtaacatgtcgtaacattcttatttcactgccttgtttgaaatgcatataaatttaaatgtgaacattttatactattcttttaaagattttaaatattatatatgtataatgctttattagattaatttcttcctgttaaattccctatgaactgtgtaacttgagataaaaatgttacaatcatttaaaagtgttaaaacatgcagtaaaatcttactcatttggattcatttaatttacaatttgtcagaaaattagagaagaattatgtttacttacactaacaggatgggaaaggggtcatggggtgagagttggggagggtttggtaagaaaattcccctaaaggaaatctcaattgcctagcgaattattttatgaaatcatcatgtgtgttggatgttactatttatggagaataagttggtattctaattactagtttcattaaaacagttcccctaaggacccctacctgataacacttttaagactggatccakcctttctttgcggaatcaccatggcggctgggaccctgtacacgtatcctgaaaactggagggccttcaaggctctcatcgctgctcagtacagcggggctcagrtccgcgtgctctccgcaccaccccacttccattttggccaaaccaaccgcaccyctgaatttctycgcaaatttcctgccggcaaggtcccagcatttgagggtgatgatggattctgtgtgtttgagagcaacgccattgcctactatgtgagcaatgaggagctgcggggaagtactccagaggcagcagccmaggtggtgcagtgggtgagctttgctgattccgatatagtgcccccagccagtacctgggtgttccccaccttgggcatcatgcaccacaacaaacaggccactgagaatgcaaaggaggaagtgaggcgaattctggggctgctggatgcttacttgaagacgaggacttttctggtgggcgaacgagtgacattggctgacatcacagttgtctgcaccctgttgtggctctataagcaggttctagagccttctttccgccrggcctttcscaataccaacygctggttcctcacctgcattaaccagccccagttccgggctgtcttgggsgaactgaaactgtgtgagaagatggcccagtttgatgctaaaaagtttgcagagacccagcctaaaaaggacacaccacggaaagagaagggttcacgggaagagaagcagaagccccaggctgagcggaaggaggagaaaaaggcggctgcccctgctcctgaggaggagatggatgaatgtgagcaggcgctggctgctgagcccaaggcyaaggaccccttcgctcacctgcccaagagtacctttgtgttggatgaatttaagcgcaagtactccaatgaggacacactctctgtggcactgccatatttctgggagcactttgataaggacggctggtccctgtggtactcagagtatcgcttccctgaagaactcactcagaccttcatgagctgcaatctcatsactggaatgttccagcgactggacaagctgaggaagaatgccttcgccagtgtcatcctttttggaaccaacaatagcagctccatttctggagtctgggtcttccgaggccaggagcttgcctttccgctgagtccagattggcaggtggactacgagtcatacacatggcggaaactggatcctggcagmgaggagacccagacgctggttcgagagtacttttcctgggagggggccttccagcatgtgggcaaagccttcaatcasggcaagatcttcaagtgaacatctcttgccatcacctagctgcctgcacctgcccttcagggagatgggggtcattaaaggaaactgaacattgaaaaaaaaaaaaaaaaaaaaaagactggatccaattgctgaaaggacttgaaaagaattatagatgcattttttwaaaagtatcatatatgtttagattttactcatccttgttgctttcttaccatttattctagatagtttaatattatatgctttagtgaaagctaacttatttttgctgtttatagagaaattatttcttattataccctcacttccttaatttcaaaaaggaatctctgtgaattattataagttaattcaggatgagtagctttaaatcctttttctttttccttcattataaacatgatatggccttattgaactgtttgttcagtattcattctgatattgtcatatataaaacatagttttaaatggtcaagcgctatcctgtgtagataattttgatgggaaatgtgtcagcttgaaataaatcgatgtttgggaaattgttctcttaaagacggtaatctgaaaatgtgaatgctaaataatgaaaacatttgtacagtttgggggtagatgagttttaatctgtttctggcatctgtacattcttgtgatatctcacagagacctggagtgtttaggttgcaatttgtacccaccttttccatttctattgaattaataatggagccctcatccctctaggacatcaggagagaaaaaaaaatagacaatgtgatgattagcagagagtaattttgattaccctaaggaaaattaagatgatctttataagtggaccgggcaaaatgtggttttggtgagtatggagctagagaaagctagtcatgtttgggcaccttaaggcagagatcatgttggggaaagatattttggtgtcatccaaatgtttatctgtttgaaaaatccatataaatattagtagattatttgtgactatctatctgtggtcatacaaaccataaaatagctagatttcccactttttttcatttatcagggtgaatattttagccctgtctaaaacaatggtgcgcagtggtggggcaatactgtaccactttagaaagtgtttgagtagtaccccacttgaggagtacggcaccacttcaggcactttaggaatttgagggaagctgtggtgtttagtggcacggggagggatcttcatggctagcagtgcctgggggtagtttcccatctccaagaattgtcctgtgccctcyaacttctgaatgtcccatcagagattcatggagctgaaaacctatttacctggctgagaacttagttgttttatatataaacagaaagtatgttttgcatggttttaaagtatactgaattttccaagagtgaaactactgtgtaacaatagcttttgcatttgtgatgatttagcacacaaactcaagattcagactgttttattatgtctgctagggtagttatgtttgaacgtttacataatgagatgccattattttattataaattagcttgttttatttaaatattacacttagggcattatattgattacttttcttggtcacacaggaccatttgcgtgaaatggaaaagagcttgggtggtttctgtacttcatttagtttggagagttaacactgtattatagttttatctccagtgaacaaaatataatcatttttrwaacaaaaaaattaagctatgtatcagaaagcaatatccaaaggtaattattattttttaatttaaattatagatcttattttcctggaggctgtgtgagatcttgcaactattattcagaatattaagacatgaaatactagatatatctgattctcaatacgggttttaggaattgtctacttaagatgtctaaactgtagaatatgaattacgagcttatctcttgctatacggctatagcccagtattgatgttttctttcctacatggaatggaacatggagctagtttctatgggtgcttattgtgaagcaaacaataaaatgaacattatttgcgtaatatgccattcagatgagaaatttacaaaggtatatacatcctgatggagtgataatgctacaaaataagccattaacttgatgctgttgatgttcaggttgccaaactcttcctaacactgccttctggtacagtatttatgattatgaatgtgcagtgcagaactttcattctaccatcttcattaactttaatgcgtaagtagccacagttacccctgccaggtagtagacagatgccatttgttttgaaggcactcttaagatacattctccttataggatggtgaaggtaactgtcagctgaatatacctatattctctgtgtgcmtggtttaaatcaggtttatttgtctgccaactaaatggtgccacaaatggataataaacatgtttatttctaactcttgagatttatcctagtcatcttttggctcttcttccaatcaaaccctgtagcttttagaagataaggagcaggacaagatttatcctgtaacctatgctgttagtcatttagctctaatatacttggtgttgtatttcattgattgcatggatgctttgattattattttcttaaacaataattgctcttcattttaatgaatttattgaaattataagattaatgagtatttctattgagctgaaaatttaatttggctatatcttatggtataactttttgctcaactatctcaatcctgggagaatcagagtctttatctgaaatctgctgcttatattatgcaggtacatatatttattttgttctcttggaagatcttcrtggtttctctttagtgtgtttaaactagcacatgaaaataatagactttacaaaattggcsatgacctatatcagcaaatggtgaaaccagaaagaaaaatacattaaaggaaaaatcccaaaggaactgatatttctctaagaagcaaggtataacttttattaagcaacttaaagagattgtttaagaaatactgtaattggggagggaattatagtgtaaggattatgcaaaaaaaaaatgaagtaaaagggaattacaagtgggaaaagttacaaaggaaattagtatgttccttgaggttcagggaatctatgtatatttcagatcatggttgcattttcagtcttctgtttttcatggttgatgagttcatcaagtccttccatcttttggagtcatttctattcaccattcaaggatctatctaaaatgtataattatgtctccccgtaccattccctcccttcatatctttagtttaaccagtttcggtaaacacaggaatttgagcatcacctgtcacatagaagacaggtgatgtgtattgaacttatgttacactttctttgaggaataagaatttcctcacatttcctaagaatactcaggatcaagtataagtttaggaatcttggactttcttatttgatcctgaactcaratttatagcccagaaattttggtggctaagtgggtcaaaagattcctaggcaaaccttaaagaagacccttggactagccaaagcatttgtttagaatattgtttagtaaagacaaacaaaaatttgttaggaatccagagctgctttcaatcatccaagtatttattattttcagtaatggtttcaagtaaatggtttagagccacacttgctagaactaagcaattgcaatgcttggctttttctgacatgttttatgatcagtgtttatatctataactaattgacaaaatgccagtgtttgtgttctttaagatacattcaccattgagaaagaaattaaaatggtttctgagaagaattttaaaaagtacagactatacaagtatggaaagaaaacattcttttgtcttaacacatttctaaaaggagagtatgtgtgtatataaaagccatggaaccatacttactgaacttgaaatagttttgcaaatttccatggcaaatgggatttatattgcttgaacatttttttgtttttactccttttctcatttcacaaactttgccagttcccaaagatttgcttggaaactcactgtgctaataggcaaagttggcctttcttgtgcttctcttaaactagcccttcctgaaacactgaccttttagtttaataacagttttatttgagaaaatgttcagatcctgggagctgaaaagagtgttttcagaaaggccattttaaatagtggtctccaaatgctgtatctttttccctcatgcactttgggtcagacctatcagaagaaatacagtattgctttatgtattctattgatttaaaaacaaataccatgaagcttagatgtgctcagaacccattacctcactggtttattttcctggctgtgctttgatttgctattttagatttcaaactctttatgctaggtcatgtttttattttctgttattttaacttctcatttgtagctaaggtaattactttttcagttgtgaccttggacttgacccaaaagttgtgattttttttttttttccttttctggaaataggtagggcattagaaagayagctgtgctttggctcctttatggaccaaaagtgatgtcaaccagctggtcacttggacatgtctttttcagtggccatgggagtgttcctgtccctttcattgctgttgttgtcctcttcccacgtttttctctcctctcatggcctacctggacgatgccacctgtaatctgtatctctttctcacctcaccccacagcaagtggcagggctgatgatagtagggagaaggggatagagaaggaaacagcaagcctccagtctgcattttcttcaccccaaaccacttcctctccacattctcacctggatggcttcgtgcctatccacccagctggtcaccgtttgatcacactggaataaacagctcgctgctgatttgagcttttcctctggtaggaagacatccctatgttataggcataaagtgcactatgaagatatgacattgtgccaagtgaaataagccagacacagaaagacaaatactgtatgttcttacctatatgtggaatctaaaaaagttgagctctaggaagcagagtaaaagagtgattaccaggggatgtgggatggggaaatagggagatgttgatcaaagagtacaagctttcagttataagatggtgactttagttaataatattttttacttgaaatttcataagagaacaaattttaagtgtccccaatgttccccaccccratggtaactgtgtggtgctcgatatatttgtggtaatcattacatgattcrtatcaaatcatcacatagttcaccttgaatatatatgattctrtttgtcaattataycttaataaagctggaaaaaccaaactgcttaatctcttttctgttgcttataacagaatacgtaaaactgggtaatttataaggaaaagaaatttgttacttaatgttatggaggctttgaagtccaaggttgaagggctgcatatggtgtgggtcttcttactggtggggactcctgtagaatccctaggtcatgcggggcatcacgtggtgaggggctcagtatgctagtccagctctctcttctttttcttttcttttctttttttttttttttgtgagatggagtcttactctgtcrcccaggccggagtgcagtgatgtgatcttggctcactgcaacctccgcctcccragttcaagygattctcctgcctcagcctcctgagtagctgggattgcaggtgtgcaccaccatgtctggctaatttttgtatttgtagtagagacagggtttcaccatgttggtcaggctggtctcaaactcctgacctcgtgatctgcccacctcagcctctcagagtgttgggattataggcgtgagccaccgcacctggccttctttttctttttaaggtaccagtcccactatcatgataaaccattaatccatgcatggattaacccattcatgaaccctcatgtcccagtctcacctcttaagggccccacctctcaatactgccacagtgggaattaagtttcaatgtgagttttgaaggggagaaacattcaagccataagcacaaacagacaaaaaacccaagacaacaataagaaagatgtgatacaattttattagtttacttagaacactgaycccagtgcatcatagttactctctgaggttttacagaagcctagttttaattgaattaaattaaattgaattttgattgagaatcctgttgaattttgcctgagaagtatcttgctgttgtaacttgaagtaatctaggagaggcagcatgattttacatataccatttgactgtgagttgatactaactggtatgatcaatcatactaattatgttaaatatttgtttcagtttttgctacaaatggagctactggttgtatgcaacttgaaaaattttagtgtcaggttgttttacttttttatgagaagtagatgaaagtatgaaaatcattaccttgtgaagtctatagtctagaatttcatagctaacaggtgtacccatatgtcatatttttaggtggggaaactaaaattcagttagattaactgatttatccaaaatttggctagttgaaaagcagactatttggactttttgtggagctcttactgcctgaaatttctctgcttttatttggatcgtttaaaaatctttcatactttcataaagagctctaatacttgcctgaatgcaaacagaattctgttctaggggtttcctaagttttrtttgaccccttcaaagtagaggcttatatttttctcatgctatatagactatgaagtaggagagaggcaaaacagaagcatagtatacagttggaagggtccctaaacacccatttgagaaaaggttgttctcttgctgcccagagaggttaatacctttcccaaagttcccctagattgttgatggccatggtgggattagacattaaatagtttttcctctattccctgattccctgtayagtgttctttttattcttttctttcctcttcctctccccccctccctccctccctcccttccttccttctcttcatttctttctttctccctctctctctctttctctctctctctctctctctcttacaacttattaaggtacatttagcatatcataatattcatccattcagagtgtgcagttcagtggtttatagtatatttatagagttgtgcaaccatcacacaatctagttttagaatattttcgtctgggcatggtggctcatgcctgtaatcccagcactttgggtggtcgaggtggacagatcacctgaggtcaggagttcgagaccagcctggccaacatggtgaaatcccgtctctaccaaaaataacacaaattagctgggcatggtggcgcrtgcctgtaatcccagctactcgggaggctgaggcaggagaatcacttgaacccaggaggcggaggttgcagtgagccaagatcacggcactgcactccaacctgggcaacagagcaagactcagtctcaaaaaaaaaaaaaagaatattttcaatatcttaaaaagaaattccataattccatacccattagctgtcattctctattttctgctttctcctactgcagggaactactaatctactttctgtgtctatggacttttctattctggacatttcacatgaatggatrtagcaggtgacctttcatgtctgacttctttcccttagcgtagtgttttcaagattcatcatgttgtagcatgtatcagtagttcattaatttttatggctgaataatattatatcgaatggatataccacattttgtttgtccattcatcagttgctaggcacttaggttgtgtttagctttgggatgttgtgaataatgtcactgtaaatactcatgtatgagtttttgtatagacatgttttcaaattttcttgagtatatatagtacctaaaattagaattgctgggttatatggtaactctttagcattttgagaaattgccaaactgttttccacagtggctgagccattttgcattcccacaagcaatgtgtgagggttccaatttctttacatcttcaccaacacttgttattgtttgtcttttttattatggtgggtttgaaatggcatatcattatgattttgatttgcattttcctaatgactaatgctgttgaacaactttttatgtacttattggctatttgtatatcttctttggagaaatacctatttatagcctttgcccattttaattgagttgtctttttattatttgtctgtaagagttctttatatattgtatatcctatatacgtgcatactctggatacgagtcccttgtcagctaatgacttgcagatattttctcccattctgagggctttttagctttttgatggtatcactggatgctgctgttgcagtctgatagtcctcaactaagggaagtcatccttctgatctttcatgtatcttctttgtgattgcctcatgccaatgaaatatttgaaagggcttttgcatatcctattgtaaataatatttttgcatatgctgtgggactaagcatttataatgtcgaggttatcgaaagagacactgctgtctagttttccatctgataggctcaactatttgaaataaaacttaggtcctggccaggcgtggtggcttacgcctgtaatcccagcactttgggaggccaaggtgggcggatcatgaggtcaggagattgagaccatcctggctaacatgatgaaacgccatctctactaaaaatacaaaaaattagctaggtgtggtggcacatgtctgtaatcccagctactcgagaggctgaggcaggagaattgcttgaacccaggaggcggaggtcacagtgagctaagatcgtgccactgcactgcagcctgggcaacagagcgagactctgtctcaacaaacaaacaaagagaaaaaaaccaaaaaagaccttaggttctgtggatattcctagatcctcctaagtgcttctggtgctttcttgttcgtaattttgggtagtaggtctgtagtgaagaggagttagtctttgtttatttcttgtggaagcctcttaaagacgtgtgtgaaatttgtccattttatttaccatcatagctgtaagaaactttacaaaacataccacacacagtcttctaattggaaagaccagatgtttcaaatccagtcaccaggtatttagaaagctccagctgtgttatcagcactcttctctgtctctctccagttgctggcacttgaatttgaatgacatgtattccaaaaaatagggtttcaaaattttcataaatgacaaatggcttttttcataaataatggaaaaatgaatgtaactataaatgatttgctctttgtagtacatgattttgttagttgtttaattattgaaatgagaagatttttttttgtcattttcttctccaaagtccctttcttacagcgtctcctctccttacacaccgttgtcagactttaatgttaggacatcatcttaaagaattggtccttactgactcagtccccactgtacagtaagcagttccttgagtttgttataaattttggcaggagtggaaatctaggtcactagggaactcttgattaaattactcctgaagtgcactaattggccttttccacagtgcttgagaagttccaaggagacgctggccacttggcagaactttgcctgttcaaatctagtctcagccgggctttcctgagtattttcttgcttttatttttaagaagtcacctattttatctccttctgctctttatcgattctagtttctgatgaagaattgaaaagaagagtagctgaggagctggcattggagcaagccaagaaagaatccgaagatcagaaacggtgagttttgtgrtatcagagagaggttttggtgggttttgtcatatttaccagtatttttagagaagaatgattgtgataagtctcattatttgtgtatgactgaacttcagaatgtgctgaacacatgaacttggccattttcggttttagattgtgcctcttagagccttgggttacctgcttcccaaagctgactgtgaattaccattatatctcttgtattggttgcttgaatattgagccgtgttttctcaatatgtgagaaggagtttttgagtattctccaggaatttcccagtcgatcagcaaatgtatgcatcattgaaaattatattgcctgccacaggcactaaagtaaatattttggctcatgatgaatatcgtrtgtgatacatagtgcccggattaacaaatagcactaattattattctgttcacgtaaaaaaattaggatgttacagacataagtaaggttggaaataaaaatcctgtttccatcctctgaagttaaccactttttaacattttattgctcgagattttttcctctgcacacacttccatctgattgttgccattattaatactactaacaacagctaaaagaatgttcattgaagtgtttttgtaacagtagaaaattggaagcaatccaaaccgaccatcctcgaggactggctgaattaattatggtacatgcctgcaatggaacactagaccatcagttatagccctgtgtgctgattcaaaaagatgttgacgagctatccactgaaaaaaacaccatgaaaggattttaaaaaagcattttttttaaatactactttttgaagttttagagtaggtacttattcataaaaagatgggaaaacattttaatctaagataaagtgcttcccatctgtactatttctggagtttgcacatagcttagagaattatgattacatgatcatgtgaatgtctttttactgtgagcaccaaacacatgcttgccactgagcaggtgcttagtttgtatttgttttgttttgaactgcccaactattttgcttgagagatctagaggtaaggaatctttgaattggattgtagtcctcactggccataggaccttcaccatataatttaacctctttgagccttaagtatttcatctttaaaatgagggttgtgaaaaattattatttaatatttcttttgacaaactaactcccaatttacacaaaatatacasaacagaatatgaattttagattaagactgctattttcttaggaaatagagaaggcttatgacttacaatttaaaaaatcaagatttaattagtactgccagaaaggtctctgtatatttccacagtttcccatgcagtgctttataattatttaattgggttaggttgatagactatataattagatagtgaagtttaaatattccaaaaaaattcagaatcaatttttaaaaaaagagaatcaatatgttatggtagaatttcttgtctttgaaattttgttatttttaattgagttttattttaataggggttttttggttagattctcatatttagtttgcttattatatttcacataggatttttttttttttttttggtcttcccttctctccatatggtgcaggctttttgttaaaataactcactgtgggttttttttttttcttcttcttcattattcagcttccatttgctctgccttggctcatgaaagggaaagggcagatgagatgaataaaaggtgccagtgaaagccaatttcatatctcasgtggaatggggtgggcagcctagctgtaacctggacaaatgactattgataaagaatttattttctgtcacctttaaggagrgcagagggtggtacagcctttgtattattttttcttttttaaaaaaagttttgtttgaagcctccttcatgaaaacttcagctgtcaaatcttggcaaaaaatgtgtgttcatctatatgatagttcttaggagaatcaatagctatatttttctttctttttttctaccagagaagaaacttcagaaacagcattaagaaagttttgtgtgcagtcttttagcagcaactttttggagtcacagaacatgtatacgttattgtatgtattgcctgaattgaatcgagatttataggcagttttagaaaatagctcctcttgcctttgtactgttactcatatggtatataccctgcgtgccaagttttctcttttccctccaaatgcacacaaacctgttgaccagttctcaagcacttcatagctggacatacgcatctacgtacgtacattttgaagaaacttgttcgagaaggactttgtaattaatttcgattgtgatatttttctttatagaatatctattatcattgtaaccctttttaaatggaaattttttgtttgttttttgtttttttttgagatggagtctcgctctgtcacccaggctggagtacagtggtgtgatctcagctcactgcaacctccacctctggggttcaagcaattctcctgcctcagcctcccgagtagctgggattacaggcgcccgccaccacacccggctgatttttttgtatttttagtagagacggggtttcaccatattggccaggctggtcttgaacttctgaccttgtgatccacctgccttagcctcccaaagtgctgggattacaggcatgagccaccgtgcctggcatttaaatggaaattttaaagctccatgaaaaatatagtatagtgaatccccatatcccatgacacagttgtaacaattcttgtttcatccacatatctagtcactctacatatgtggtgagtggtgaggaaaagtagtacaattttaaacaggttggtgaattttatggcagggaaatattccaaaatgtcttctatcagcatagttgaaataagtactttgtttcagttagatttatttagttggaagactgaaatttaactccgattagcttagaaagcaaggaaatttttaggagcataaaggatatatagctcaaaagaaacaaatggaagacttagaaaaccattagcaaggggagaactggatgtttctaaaactgtgtgtggtgaggaaatagttccccagcaggaaatcatgatgagcattccataaggagggggaacggatgcygggtggctgaatttctttgcatgcccctgattttaagattttagtgtatttggtgtaccctatgaaatatattgctgcaagttttaacacaatactttatctcttagaattttcttattgaaacaattcattaacactaattttgaatttttgaaaacatatgtatattcataagaaggaaaaagtaggcaaaataaattgattaaggcagtggttctcagctgggagagcatttgatccccagggggcatttgacaatgtttggagatatttttggttgttaaaatttgtcaaatgttattggcatctagtggatggaggccagggatgctgtttaacattctgtaatgcacgtgacagtcctcacctcctgctgcccgccggcccccctcttatccgttctccccccaccaaaaaagaattatttggctcaaaatgtcagttgtaccaatagtgagaaacccagggctaaggtattcttcaaaccagcccacattggatttaattgttctggatcacttttggactcagggtttgatgtctttgtttttccacacaatatcatattctatgccgtcaaaacctcggtgacacaacattccttaaaagattgctccactcttattcctggaatttttccgagctgctgacagcagttctgcaaattttgatgcttctgtgcaagcaatgacaacagcagcaggactgccgcctggcagatagcaattttcagatgcttttaggtttgtgaaaacgtggaaaaatatgcatcctagaattgataaaatgcagtccatgtacacttcagaccataaaatttgtcagctcggaatgacttcttgaatgtcttactttaccttctacttaatgcagaagccctttttaggcatctgtgactggtagggccacatgcttttagattccattcaaaatcatcgaaactgatgatatttcattaggtcatctaaaatttaccccaaccccattaaatctccactcctaaatctaatgcagacctgccatacttaaaagttgccttagaggaggtttcttactaaggccacagtgacaatacagttgctaattattagcatgatgactatatatattttcatttttacaaaacatttacatatggactcccaattcattttgtcttagatttatcctgttttatggggatcttaagtgatttgcttccacaatcatgtcccgcacaaatcgctgatagattagtgcacacacgaaaatttttgggtctaatttgaaatcatggttttgcttatcaaaacatctagtagacagaatagttgctcagcgtaccgagaatccagagtaaatgcctctgtcggcagtctgtttttgctgtgatactcaatggtgtgtttggattatagctgaccatattgtgttgtaactgtgtaggccaatatagcaaggacataatatgctacagtttgagtatagactttaaaaatatgatttacttctcctctgtgccctacctccaaaagtcagtctttgacagctagaaaaatgtgactacttctgacctctgacctttggcatttgaatttcacctctttacctataaaggcaagtgaaagtgtttcacttataataacatttttttttcaagaaaccaagaagaaagggaatggctgcttgatgttggaactaactgtacatcaaccaagattacttgctcgctatttttcaatggacattagttgagatttttcccgcacttttagttatttggaaagttacattagatttgtaagacttcaaataatctatctggtataatgagtggtttaataaattagtcataaattttatcagccatctgkgttagagtatagtgtagtccttttatttttccattgatagcattgttgatatcatcaaataagggcttaaaacttatttgtaccttttagtttctcatactaatggtgaaatttacagggatggtaccatctgtttaagttcattatatatgataatttatcttgatttttattattacatatgttstgcctttgaaaaaggcagcaagaaaaaggcaaaagaaaaagcagaaaaaaggaggagggaagagttytgaaacaaacaggagtttgtgggtagcatcatgtttaaaatacatgatmcaagaaatcatgtggctgggcctggtggctcaygcctgcaatcccagcactttgggaggctgaggtgggcagatcacctgaggtcaggagtttgagaccagcctgaccaacatggtgaaaccccatctctactaaaaatacaaaattagctgggtgtggtggcacaagcctgtaatcccagctactcgggaggctgaggcacgagaatcgcttgaacccgggaggtggaggttgtggtgagccaagatcgcgccactgcactccagcctgggcaataagagcgaaactccgtctcaaaaaaaaaaaaaaaaaaaaaaaaaagagaaatcatgcamctagcatggtgcttttcacatagtaaagtctcacaagtatttgttcagttgaatgaatcactgggtctggaaaatcatgataaccttttttctagaaggtgcagttctatattatgtatgtgggcatatatctattctacattatattaaaataaaaacttaaattatctctttgaaattggctactgaccagagactatagatacttgtcttaaaaatctttcttttaatttagtwtagtgttgaacacttgttttcctgtcatagacacaaattacacagttatgaaaattacataccttcaacctgcatgtaatttctaggtgtaagtaattaaaaaaacttttcagggaatcagtactattgataactaatattgatcaaggcttataaaggcatagttttgaaatgatcttatgagatcasttagcagtcagtatattctcaatgcagtcacaactgacacaggcaaatgaatttcacttgtaatttataaatagttgcaaagaaggttattgcagaaatttgagttgtagctcttcagcgacacacagctgatgtccaggtgtaacctataccatcctgctgtgatgtgagcatatttcccaggctcattaggcttcactggaggtagtagatggtttgttggcattatttccaaaatattcctttatatactccaacatttaagagatccttctgtagtataaaagtcccactattttagattatttttttattaatcatatttttgctgtttttttaaatgctttattgcattgctgttgttttatactcatacttttccatttgattctgcttaacaattgataaaaagacctaaccagttstgaatgtagtaggaacacgtcctagccacccagtatttttcactggaaggtgattggaagtgctgtgtctgtactaggtattggaatcttgtgccatctgctactttcattgtttttcttcaggtggcagttttctatttttaatagccaactgcttttttataaccaacagtgatagaagtttggattttctagctctgttttattcttattgttttatttcttttttcaaatccaattttctttcctactgatgctacactgttgtaaatcctgtttgagaagatatttttacatgttaatatcaaacctggaaaaccagagtcaatcaagcgtgccatagacatctaacttttttactggttataatagcagcagtgatgtttgaccacttcttgttcacatgtttcttttgacagtaattacagtgttttctctcgtgaagtgcagtgtttgaagtcatttgtgccaaagtcaatttctgcatttggaagtttctaggaattggtttctcagtgttatatagctgtaatagtcttgtcgaagtgtctccattactttttggtctggggatgtggagttttaatgtactcagtcatttattattccttgcataaaagattaatgtttattgtcagtattatcactgatttataaaaacagatgactgagttagacacaggtaatgtttttcagttagcagaactagattagaattggcctgccgcattgctctacctagtctgttgctgaagtgatagaatcatataggctgtcatcattacataaacatttttcaaagggagtgcaacatggaacccaaagtaaagctgatttaagtgctgtctggttaaagctaggactagggacttagagctgtgtcagcctattttcttctttttccttcctaaagacccaggcccttgtgctaactggggctttcttcaagaaaactttggtcaaggtcattttctcgcaaatttggacactttgtgtttgaggagtgtactttccttacccaaatagcatttgttggatagactcgattctgtttctgttttaaaaggtgggtggacagtggcctgttgtccatttccttaatccggaagtccgtgtttatgggcagtggtccacataggctggacctagccctggctgtttcttagtcctgggccttctggaagccatctgttgatcctgttggtaatgctgtgttaggaacactggagaagagtgtgaggtccttctgtgcaggatctggaaatactggagaatattcagagagagtccctgtttcccctcytgacctccatagctttgccaatatagcctcgagctaaaaaggaatgtgggcaacacagttgtaaatcaaatgtaaattttctctccagattataatacttccaaacattggcaccgtttcctgttcaaataataaccttacccccttcttttcttggttggagcaaactgttaaacaggagtagcccatcttaaatttctgtttgatactttagtgagagaaccacattcttttgtatcccattcttattcagaagcagttgtcatttgtctttgaaaactttcctcacagttttatacagacacatacatagaacatgcacactggagtcacatataatctgtgaaaacgatttcagagcataggatccatatgcccaactacaatgtacccacattaacaaacacaggggtcatctcttacttactgtgtgctaagcactgttctaagcattttatgtattttcattcatttcaactatataacacccctactgggtaggcattactgttatcctcattttataaatgaggaaacagagagggtaagaaacttaccaagttatatggtttggttctatgtccscacccacatctcatgttgaaatataatccccagtgctggaagtggggcctgtaggaggtgattggatcatgggtgtggtttctaatggtttagcaccatcctcctaaggctgttcttgtgatagatttctcatgagatctggttgtttaaaagtgtrtgacagtccctctccctctttctcttttcctccttctctggccataaaagatgtgcctacttcatcttgcccttctgccataattgaaagtttcctgaggcctcccaaaatgctgccatrcttcctgtacagcctgtagaaccgtgagctaattaaacgccttttctttataaattacacagtctcagatatttctttatagtgatgcaagaacagactaatacaccaaggtcatatctatcaagtaagtggtggggctcggatttgaatccaagtctgcatttaaacaccctacagtattactttctgtgtggacagggaataccttctttaaagtctttcatttacaattgtgggaagaagtatcaaacagttacttggattttctcttataaacctttagtaaataacaggtctcttaggtctcttaaaaatgacctctgttttgtgctactggttattagatctagatagctactctgtacagtatttaaaaaaattcttttatcttaggcccaagctgtcttgagaacctgtctttacagttaatattctttttgttgtgtaggctatacctgacatttatttatttatttatttatttatttatttatttaatttttgagacgttgtctggctctgtcgcccaggttggagtgcagtggcacaatctaggctcactgcaacctccgcctcctgggttcaagtgattttcctacctcagcctcccaagtagctgggattacaggtgtgcgccaccacacccagctagttttttgtatttttaatagagacagggtttcgccatgttggacaggctggtctcaaactcctgacctcgagtgatccacctgcctcagcctccaaaagtgttgggattacaggcgtgagccactgtgcctggctctatacctgacttttaaatgcttgtttgtgcacattttcagtgacaatggcagtttaaatttctcatgagttcagttctcgttagcttaagattgggacatttttcttaatagtacagcggggagtatgtggaagcagctggtgccctgcctcatgaactttagagatgaggatctgctgctggtcagtgaggcacgtgtgtgctcactagcgatttcctgagttcagtagagcaaattgggcacctttcacggtgggggaatttgttaacttctttcttggagttaggaagcaataaagaagtgcaggaattactttaattaatgattgcagaggggaaaaatatttacgtttctctctatattcattcttagacttttttttttttaaaatggaagactggcttattctgttattttatatatttgtgttgcttgatatgctgggtttttggcttgtagtgtctgttgttagtatttatttgccttttgtatgatagtcagtcatcacatttagtctacaaayttagatgttttgaaatcaattaaaaacttagctgctgggacaatttgcygttggaactagaatattgaatttatctgtcaaaatattcagccacgatgggagcaattgttagttatatgctatttacaattgcttccttacatataaacaatctgaatccttgaggctgcaaccatttcatttgaaaggttttttttttttttttgagttatcccccaaacaattttagtgtgatttaggtgtcaggtataaagcattaaaacacagattaaccatgtaaatgtttcaattcttgatttaaattcaagtttcttcacaacttctcagaatggatcttttaaattccttgtttcttggtgccattttgtcaaggttgatttagattaaaacaaaaatctcataaaaatccrtaaattacagggcattttgacttcctgatggggttgttggattaaaaccaaatgataccaaaaaaagtaccccacaaagtcaactgaaaccactratgtgacaagtgtctactagttaagaaacacttatgcaacagagtttctgcaattcttccattatttctaccgaaccaggtaggtttgacataggaaattcattccttaaacaactgaaaacatggatattgtgtttgtttctttaacaaaaaaaaagaaaattaccagggaaatacatacctataaaaggaattcagtaaatacagatgaatagttttctgtctccctcctttcccttattcttactccctacaaaatcatttatacattcttaccctagattatttatcattttgtttttttaaaacaaaatgagcatgttatataacgtgcttttttctactcagtcatatattgtgatctctcttcccatgtcagcatatatagattcaagtagaccgtctatctgataataaatgccatttaagaagactttgcctaagaaaagtaatattactactactaataatatgtaatagtaagtaatcatttgtaatagtaatagctaacagttttgaatacttcttttgtcctaagcactggtccaagccctttgcacatgtgattatttaaccttcatagcagccctatggggcaggttctgacctgctagtctcctcactttgtagatgaagtagcygaaacacagaggtcacttgcttatagccacatagccagaaagcagaggagctggaatttgaacgcaggcagtcggcatctgsagtcacccatacttaccatcactcgatcagactgtgtttcagaggctaaattattttctgatccagcagtaatgttacctattatatgtctgtctgaatgyttttttttttttttttttttgaggcggagtcttgctctgttgcccaggctggagtgcaggggtgtgatctcagcttactgcaacctctgcttcctgggttcaagcgattctcctgcctcagcctcccaagtagctgrgattacaggcacccgacaccacatccagatgatttttgtatttttagtagagacggggtttcatcatgttggccaggctggtctcaaactcctgaccccaggtgatccacccaccttgacctcccaaagtggtgggattacaarcgttagacaccactcccagccctgaccttttgatgtcggttattgaaggtttggcctcccctcccctcccttcccctcccctctcttctcctcccctcccytcccytcccctctcttcccctcccctcccctcccctctcctccttttctttcttagttttgagacaggatttggctctgtcgcccatggtggagtgcagtggtgcaatctcagcccattgcaccctctgtctcccagactcaagccatcctctcaccttaacctcccgagtagctgggactacaggtgcatgccaccatgtctgcctaatttttgtatttttgttagaggcagggattcaccttgttgcccaggctggtctcgaactcttaggctcaagccatctgcctgccttggcttcccaaagtgttaggattacaggcgtgagccactgtgcctggcctgaagatttatgttttataggttttaccagtaaactatgccttaattatggagctcaataaataagaaatttagattgaaaagaatttcacaaatgaaaggactttttgtgttttgttttttaactcacatgactatgttttgaaataaaactgtcaaaatactgtcaaatggtgggtaaaaattaatattactgtagatttagctgtaataggttggaaattgtgcatttcattatgaatatatctgtcagctgtacaattcagtttttatagaattaaagaaaaggagcccaagtgggtttctataatttatgttatttagccctacataggtttgccttacatagtttgccttagaaaagctctctcctcaaactactgaaaatgtggataatgctagtctaacagaaaattgcgggtaacagaaagttgagggtaacatcaactttctgtaacccttatcaactttctgaggttgcagtgagccgagattgcgccattgcactccagcctgggtggcagagcaataytctgtctcaattaatcaatcaaccattcaataaatgtcaggcataaataaataaataagtaaatgtcagtgtttcttcgtaacagaaagaatattaactgtaaagacagattctcaagagagcttggtcctaagataaaataattttttaaagattttttattattgacgattccaaattcattcttcctgcctttatgtccctgttttcccatttccagtgaattggccctaatgtctctgcttttaaaatatattagaaatgaattacctctcacctttgccacccctgccttaggctaagccagtggttctcagctgctggagattttgctcccttccccatgggacttctggccatacctggagaccttttaggttgtcctaacattgggggtaccactggcatctgataggtagaggccagcaatgctgttaaacatcctacagtgcactggacagcccctctacaacaaagaattgttcagttcaaaatgttgatatagctccgaggccgagaaaccctggtgtaagccattaccatttctcatttgtagtattacaaagtcacctccattgggctattcttgtccgccacattctatttttcacaaagcagcattagttggctttaaaaaaatgcattttgaatcatgtcactttctttgcttaaaaccctctaatggcttcattaggtttagcataaagtccaagtccttttctctgaccttcaagtcctctacctattgttacacatttacaccctctgatacttggatctcctatgttaccaccctctcattgaacacttcggccacatcggctgccaaacctgtttgtgcctatagctccttgtccagaatatttgcacttcatattttgcatggctgactccctcttactatcacagtttttcccaaataaccctacagagaggatttccctggtcattttgtctaaaataactcttctttctttcctgttctctcatcctagctgtccttttcctgctttatgtttctttatagtattctttttctgtttcttgtctgtctcctgcactggaatataaaagtttatgagggctgggcatgcctgtaatcccagcactttgggaggccgaggcgggcggatcacctgaggtcaggagttcaagaccagcctggccaacatgacgaaaccctatgtctactaaaaatacaaaaattagccaggtatggtggcaggcatccgtagtcccagctactcaggaggctgaggcacgagaatcrcttgaacctgggagccagaggttgtagtaagccgagatcacgccactgcactttagcctgggtgacaagagtgagacccygtctcaaaataaaagaaagtctatgagggcaaaattcattgtctgtcatatagtaggtaccaaaaagggattttatattaaattacgataatattttactgttgtggctaaatacattaaaatgggatagaatttgtccaaaagtcaaaagagacaggagaatcatcatatgacaatagcaactgccatttaatgattgtccactgtgtactgtgcgctgtgcatatatttgtatatattagctctgaactccccgagagccctctgatgaagcctgctttggcctgtattgtggcctataagatgatgctcctcatattcccctccaggatccaaggctaggtgacccccactctgccatcaaactgaggagcaattggatgtggtagctctgctttctacaggtttattttacaaaagtagcttggagtgggcaastaccttgacctgacaacaggcagcatcaggttcaaatccagttctcttttactccaagcccgttcccaacatttcagattttcatagtgtttaggaagtgactgtgattcatgtcttcctgttgagtaggcttaattggcttcattttctgatatgaggactgcattataactccaggagcagtgtttttttggtttcaggtcctgtcctgagacagttgctcagtttccttcatttttaatgagcattgtctaaaagtggaaacttgacagtatatgaatatcatctaagctttcagagtatttttattgttggctaacaacataatcaaaatttgaaacgacatgaacaacatgtactatagtttgcacttacattttacatgagactgaaccagagcgtatgttgtgtaagtctttaagccttgtctgttgggacagaagtcaagaagtctcttgtgtctctgagcatatacttttgccctcatgaaccctgtcaaagggattccagatgtcctttgaacatttggtgccttagattcaagaggtgcatggcgtaacatggatttgtatcttgaaacattgcattctttccctggtttcgtgacagagttttttttttttttgtcgtaacctgagagatcatctcttctctcctcgtgcccccctcagcctccctggcttctgggaatcagggctctctccaggcaccagagaaggcaaaagcccagagcttcctgggatggcaaattgttctgagtttcagtgtgttcctgtacttttttttttttttttttttttgagacagagtctcgcactgtcacccaggctggagtgcagtggcgygatcttggctcactgcaacctctgcctcctgggttcaagcgattctcctgcctcagcctccygattagctgggcttacaggtgcacaccaccgtgcctggccaatttctgtgttttttaatagagatgrggtgtcacatgttggccaggctggtctcaagctcctggcctcaggtgatccacctgccttggcctcccaaagtgctgggattacaggtgtgagccaccrtggccagcccttgtgcgttttgagttgaagattatctcttgcttcttggcctcttgtatctgtcctcccactgactacctktgtgttctggtttttgttgttgttgttttttttttttttggtcttttttgttttttcatttgccagcagcttgtcataggaatgacacatactcagcagagtcagctttagacagctttttgcagacaagaacaacaaattcaccagtcagggaacaaagtgagagaaaaatgaagaacaatattagaaaagaatcctttgggaagctgcacaaaaaatgttatattaaaatcrataccagggcttgaccttttgtggtagtgtatattttaaagcctcctattgattctcttttaataacatgtttattctagtttactgacataagcctacagagaatacaaaaagaaaagatcaaattctttattacggtggtcatttaaatttgtctcagacatttcatatggctaatgttatatatgtatgtatgtaacatattcttatgcattgtaagactttgagatgttatgaaggtggcaaaggggatttttatttttgttggaaatactcttggccttgctgtgacatataaatatatctccttccttcaccatgaaattgctttttttttcttttttttttttcttttctgcatgtgtgtagaatacagaaaagtctcattttgattgttttttttttcttctcttaaaaaccatcgatagcttaatctgccgagtctgggaacatttggtgacagttctatgcataaagacagctgtcttttactgtataactaatggcaaaatgtcgaagaataggaaatcttcttacttgatccctttgatcactcaatcttgtaatttcaaagacagaaatatttattgcttttcacagtgtggggccatgcacatttcacttaggaagatagtcatcttaagggtgttgtccagtcatgaattggttgcactattcttatctcctcaggtttttttccattaggaaagaaacagaatcaattttcttacttcattcagatgatttcccccaacataacagatattaagaggtatccagaataacaggaaggacttgagagacatacctggaaaggttatcctgtaaatggcaaattaaatgagattcaacctgtagaacatcttgttaataggcttggggagaaataggatgctcggatctaattcatggttttaatataatagtcctgttgtttatgggacatataatatcagatgttgagaagccagagagtaattccaggaaggctgtaatgaattaraggacattttcaaagggcaagtaaattaatcaggaagctaaaaatcagaaagttgggacacgtrtattgtagcatgggaggagacagggaggctcagcagagatgtagcagggcatccctaaggaggtccagagagtggctagtttctctctacccttgtgtctttaaatgttggagggacctggagtgagcagccgtagtgatgatactgctgccattctgcacactgctgrtgcggggccagccattccgttaggattggtttctggacactgacctgcttgctagggtctcaaaaggtgagtgtcagaaaagctagcttataagtaaaggtaaaattcaaataaaactaagatttaaaactgtccaacttagaagtcagtttaactaatcccatggtagaattgagttatggtatatgtccaaaaagagactgagaacgagmcaataactaaagacatgggcacaatcaagtgggtctctcctaggtctgcccctgcttgcttctctctcttaccttgtgccattgtcaattctttattagcctggtctgctcttctgtgttttatcattaccccacctgtaacagcttcctagtacctatcaatatagatcaaagtgaaaatcacaaggcacatgatagtaataagtatttttttctagttacaaaaataactcacactgtttagaaaattagagaaatgcagccaaacaaagttaagaaaatgaaaatcatctataatctcactattcacacaaaaccacggtaaatattttggtacacaggcttatacacacaggagaaaaaaaataacaagtggtattatagtgtccttactatttttatgagctgctttatttttgctcataatatatcataaaaatatgttgtcagtacatatataartaacttaattgtagttcactattagwcatttacggttccaaataaatggttcagaatgtttcacttttatgaacactctgcattggatatycttattattaaatttacacatatccagtgttatttccttagggtaaatccctagaaatggaattactaggtcaaaggttatactaaatattattattgtcaaattgccctcaagaaattgtgttacttaattcaccaccagtatgaatccttgtttttttctcactgttgcaaactttgggaacatagtagttaaaccagtgttgtgttatgcccatatgaccatggttgctcgtatctgtttatttggctagtattttcattaawtttatttatttatttatttatttatttatgagacggagtcttgctctgttgcccaggctggagtgcagcggcgcgatctcagctcactgcaacctctaccttcccaggttcaagggattcttgtgcctcaggctcccaagtagctgggattacaggtgtgtgccaccatgcctggctaatttttgtatttttagtagagacagggtttcatcatgttggtcaggctggtctctaactctggacctcaggtgatctgcctgccttggccttgcaaactgctgggattacaggcgtgagccactgcgcccggcctattttcatttattttagatgggtggttactagtgggatggaatagtctttttgtgttagtactatgggagtttagatactttaattcttgccagatcattttaggttaatgttaagttaatatagtttaagaaatctgtaacttaataatgttctttgttagttgtctgtacatacaaaatcctgtcactgagacctatatgtagctggcgagatacaacagatatgcaataggtgagatatgatatagctgggaatastctaattgccctggagtggactcagtatttctaaaattgccacagcagatctggcgtaaatgtgatttagttaactggtgagtattacaccttatctataaatgtataattgtgccataagatcaaatgtcacagaagaaataaamcagctttgtgacatttctagctttataagtaaaacaataccctctatatagtagatactaaataaatacttgttgattattgaatttgaccattccttcatttttttgaaggataacttgatgtttgccttttgcttgttacatacaaaaaaaggaaaatcaaataamtttgtagattgaaatgaaaactccatgagaagcgaaaatcagtgactgagctttgggcttaaaaaattatatagcgtatacttttgtgatttttgtttcttgattctgtatgctgacctgattttcaaattcctttttaaaaatgagcacattaaacaaaatgaatgttgatcttaattctgagaaaataagtaaatatggttgttggatcttttcttgatcccacactaataagagatgcataggtctagttccttgttcaggttcaccctcgagtgaggatgagcctagagagacacatgcgcttcacccttaaaccacatatgctgacttaatataatgaatacacctaagtggtttagagatggaagagattttaggtttgttttttgtttgtttgataacaaaaataacccagaattgggaatcagaagaccagagtctggtcctgcctctctgcttattaactgagcagagattaatcacagtttctttaagctcagttttttcatatttaaaaatggaaacaattttaaaagcactaaatactgcttctattctacttttttgtaaagatcaatatattgaaataatatattgaaattgcattgaacccatgtacttttataatgtatttttaataacaaaaataagaatgattattattaccataaatacttctactataatctttggaataaactccctcattattacaaatatgacagcagtggtttgatacaaatgttaaatcagcagcatcccaaacacacatttttttcagtttgccgtgccatggtaatcaggtcactgaactcaaataaaatgtaccaacatttgaaaattgtcttcattgcaaagtgttatgttatttaaaaaagtttgcccactctccttgcctactgcagtttccccttcacattgcctttctcctctcttatctttcatctgctacttaattgtttcagtgtctttagttagtgtcctgttctcattctctttggatatacaacttctgggcttaagtggtcctcctgctctggcctctcagaaagctgagtttctaccatggcattagttaacctgacctctaggctasatggttttaaatccctcttgtatttgaattttacctttacttacaagctagctgtgctgtcacttaccttttgcttttacagctcacctttgcagtcagtcctatcttttgtgaactctgaagccactctggtatgctcctccttagatagatgactgataagatatatggaaaaactgatggatctggttttgttttggtaattcttacccaggtacacattaattctcatattaaatctttaaggcctgctgggtgtagtggctcatgcctgtaatcccagcactttgggaggctgaggcaggcagatcacctgaggtcaggagttaaagaccaacctggccaatatggtgaaaccccgtctctactgaaaaacaaaaacaaaaacaaaaattagctgggtatggtggcgggcaccagtaatcccagytacttgggaggctgaggcaggagaatcgctccacggcggaggttgcagtgaaccgagattgcgccattgtactgcagcctgggtgacaagagcaaaactccgtctcaaaaaaaaaaaaatctttaagatatctttcaggttcaaaattctaagtgttgactttctaatggaaattattttcatcaggaccctttgaagttttaaaaagggttaatgttagggttaaattgatttataaagatgatgtcatatgtttcttttcaaggtatttttatcctccgtgtatttttatctcagcagctatgtttgtagtaatagaacaggtgggttaggaagtagccagtgaaaggtggcagatcactttgggcaagagcttgagtcagcattgggcctcggcaagtgtaaaacagaagactgtgtaaatttgaacatggcaactgtaaattgcaatgcattgtcatagtaagaaaaaagaagtaaaattggtatttacagccaaatggtgcttttccactgtcacatatgatggacagtgacaaaattatcatctcagctatcacacttttgagtcatgccagatctttaagttttctgtgtctcatacagataaaaataaaggcttgattgtggcatttgttattcttgtttgcttttaaaactagttgtctatcttcttgtcttctcctgggattgaccccaaacccagaaaggttaatttactattggaagcccatttttacagcacacaggcctcaatttattttaagagcatgtttgccaactctgtgctgctttagccctgtaaacatgagtcttaagggaatttttaagaattggcaatagtggagtttcacattctgctagcagtcttctgcaagtcgtgtttcacattgtctctgaaacatttatctgagacactgccttctgaggttcatcttgattaattatatatatgtatatagatccttaatgctttcaggatttatttttcataaactatccgaattgacctccttggctgcttacattgttttccaccccatttccttcctcataggcatgtatacatactgcaactcctagacattcaaatacatgttttatttttcaataacttgggcatttcatttcaccctggaaaatgtaatcaaactacataacagtgtcattcattttcatttttatttttgctcaattgctatttaaaccaatggaaagttagtatcattgcaacatttactgtaatatgagtgtattgtatatgaaggtttcaggaggtggtcattattgtgtgacattaaatggaagagcaattttagtaagggttctatagatatttgataagaaaaagaatttgtaaatgtgttactatttaaatatactcccactctgagttaattctattaagggaagctaaaaatgaattacaaattgaagctatgttgtagcctcaaattgtctttttatatgagtgtttttttttttaacagtgcttaccttcacctaagttatctctataaggaatgctgtttgtaaactgttacgaactacaaataaaattatttttgtactatgaaagcctaattatcatggatttctaccattagcaaatatcaaacccacctaaatctcaggaaaaaacccaggggccaaaagttaatgtcttttggagttggagagatctgatttgaatgccagctttgtctcttagtaatctgtgatctcaagtcagtgatttacccttccaggcttcactttcttcagttaggaagccaagttaataagaatatctaccagataagcatgtttttcaaatgaagattaaataagataacatatataaagcacctggcacatattaaacttttgatacaaaatgcttattcttacagataactcttttctctctttgaagtgaagatcactagagtgtgatggttaagagtgtggtcctaggagtcagaccacttgggtttgaattccagcttcatgggttactagttctgagaccacttagtaaattacataacttcttgagggctcagatacctcctctgtcaggtggaggacaatgataactctagatgcctcatctgtaagatggaggacaataataactcttacctcagggttaccttcagcgttgttttgaggatcagatggttcattccaggtacagttcttagtacagcacagcgactcacacagaatcaaagtaaacgctctgtaaaaatgattatctatcgcatccatctgtgtattcattcatttcagagaatcgtttcctagttgtatagtgttaaaaatctgtctgctctcttctacatttgccctttttcattttttcttggctttatagtttctgaagattgtaaaagatctctttgttgatgaaaatggaagaaaaactagctaagtgaagctagatgagctttttctcttttgtaggagccattgctcctttctggaaagctatgccatgtgtaattccaaaagtgctaagtgagagaaataagaagactttttttcttatcagattaacaagtaattaaaaaaaacaacttagtttttagtttgaaaaatattccttttagttgacataagttttcactttgctattggtgctaaatggttgattgttgtatattgcttttttgcttgttcagataatcattttcaagggcttggaggccctctgtaaaaatccaaggatctctgcagctggaatgttgcagtgttagatgtgagagaaagggataacattgtgtttggcttttaaaaaagacattctgaaaggagatccggagggttagcagtacctgactctgctaatgtagttaatgcccygaaatgaaggtagtcagtggctttgcacacaaatatgtaattttaagaaytctcatttatatgccagaaggtaacatgcaaggattgagggcattgaatagtaggttaaacacaggccttgcagagagaaattaaatcatttttggtgagggagatgccatctaaagctatgccttrataaagatcttagaaattaacagtcacacagctgtatgttatgaggcgagaactgatgagaagttgtaacatgtacctctgtattgctttgaagttttggaatagaaatacctaacttgtgcctagctatgattttgagacttactgtagctctgtgctgtcctatggtcacaggtgactattaaacacttgaagtgtggttggtccaaacagaaatatgctctaaagtgtataccaaattccagagactcagtgtgacaaatataacatctctttactagtttattgtattgattacatgttgataatattttggatgtattgggctaaataaaatacatggttaaaattaattcggcctgattctttttagttttctaatgtggcttctagatgtagtctgcattatatttgcattagtcagtgttgctctaatatatttaaacataagacaattgcatgaaagtgacaacatcacataagtgaaaaaagctaaatcccagtaccctatctcactccccaatggtaaccatcattaattttttttttgtgtccttgtagacatttttctggtattctcttcttcccttaagtacgttgtagattatagaataatcataaaagtcaccttaatttaatagagatttctggattgtgctcggtaaaaatgttctaaatgaacatctatatgcctttttgtctcagttactcatacttgagaaaagtctaattactgaatctgtgtacctttrcagagataccactgttacctgataggattaggactggtgctcagcacgaatgatttttcattgaaattgtagcatcaattcttttaaatggtttaacagaagaaattgactctcaatgactctggtggcaattarggtctcatattgaacgaagagtattacctgtcattggcaaatgtatcaagttttctgcagtgtaaatttttaagcarttttgtttctctttgtcactttttgaaataattgttgataaaattgctgatctgataaaagtgagataggtgaatttagtagcattatataatgtcatgatataaaaaaggaatgatactatatttgatggtaaaatccatctgattttttaaacataatgctttgtataatgttgtaagcacataataaatgctcaataaatactttaatcaatgcttaaaatatgtgatatcaaattgaataatagatcattgagtgtcactgacaatttccttttctaaattaagatactttgtgaactatcaaaatatgacattaatgaaagtttagacattagaaaatgtttaacccaygtatttgtgcttatttttaaatactttaatcaatgcttaaaacatgtaatatcaaattgaataatagatcattgtcactgacaatttccttttctaaattaagatactttrtgaactatcaaaatatgacattaatgaaagtttagacattagaaaatgtttaacccacatatttgtgcttattttcctcytttatagaaacagaataaggcaatatacaaagtgccatttccttttattataataaccataatggaaatttcagtaaagaaagtataactaaagcagtaccttcctgaaacattgtaggtgctcaataaacagacttttctttgttcctattggttaatgcttaaccaaaatgcttaacagtatcgttaattggattccacaataatcatttgacatagagtgtactattaaccatcttcatgtgagaaaaccaatggtttggagatgttacaatgctaaattcagtatgtggcaaaatagagtctaaaacccagatattctaactctagattatattttagtgattgttgaaatggccattgcgaactggaaatgcagataaatattggaaattgggccttattctttgaatagtgttgtttgttttgagacagggtctctctctgtatcccaggctggagtgcagtggtgatcatggtgcactgcggcctcaacctcctgggctcaagcatgaatagtgttttatttttaaaatgctaacattcctaacattccagttaggaacactttaaagtcctttcttcagagcactgtgattttgggtattagttaactgatttgtcagtaaatcctcttctccttgctgttttaatgctaatttttaagacaggattgtttgyaaatgagacaaatccaataatctgtgcagattacccattgatttgattaaattgactcattgaccaactttgctgtgtgatattttagattaggtacttcccttagtagaagatgtggagacaagtcattatttgatctgaacttgctactttattacagtttcatgcatttttaaaaacaggagtaatcaaaatgacatgttgatgtaactggcagagttgattcctaaatgcacttgaagctagactacccattgttattttttgcactaaccttattattattttttccacctttggcaaaacatgtgagcttctagtaattctaaaatttctgatgaatgacatttgataagtggtgtgatcctgtgaatactgataagcactcgaaattcagttggtgaagcatcaatttcayacctgagaycccagttccaagtttaggttaaaggtttgcctggcgtccgcagtctttttctcaggtcccttgataagtgcagtcattccaaaccacatttttcttctgcatcaaatccaggcagcactcggaatcattaaatattaaaacttatattcagraacattattcattcataaatatttcattgcagcctaaactgcattgttcaaaacattttaggatgttatgcaactctgtcaaagtacattaacaaacttaagtcatgttgaactaagcaaaaaatgacagactgcatcacatacgtgttatagttgaatttttgtataggaagcattttgtgttgggatatttggaaattaccgtaaagataaaatggattgcagaggaagccagatataatgaatattcatcttctgtgtaacatctgctatacatcttaatgaaatttatagttatccctgaaatttttcttccttgacagtatttatttatttttaaaattattttaaccgggagttgaatatgagttgataccattctagctgcatataaaatgacagtattggatgcagggaccatttttcagatctccatgatagccatcatctccacagaattgaacttagacctcctgtgaaccatagagtaactgggaaacttttgatattcgcagagtgtaagagagtgatgagttcaagcattggtctctgacaaaatttgttytggattgctgtgaacacatttggtctcttgctgtttttttttttttttttttttttttttttacaaccctgttagttacagtgagaagccataaaattcttcctatgcaggaaaatggtagaagcattttttgtgtctaaaattgttctttcttaaaaagaaaagaaaaraatctttttctggtgtggtaacaaaaaattgaaatagcaaattcaaatagtagaaagtgtaaaaattcacaactgatgaggtgatagcatacttttttttggtacagtgacagtaatatagcttatgagctttatctgaagtaggtgaaatactgattatattttacttgagctatcattgacacaatggattagaacttaatgagggggaggtagtttgattttaaaacatccttgattacatagatttttttggaatggaggacagattaatcttcctgtgatatgtggatcaaaaactatataggcagccagtgggctcatcttgaacacctacagccgttctttcaaaaatgatagaaatggatattgtgaagtaaataatgaaggtggcatagtgaattcctgctggcagagagttaaattattcattttgttagtttagctaacatggttcatgctgcgtgggatttgagcactatgtcaatgactaatattgcataattaaaaagcctcagttcctcgggcttagaatgtagctggaatttagaaatggttgttaacatcgtggaaatatagttttatttgtataagtagatgctgtttacctagccgttttgaagttttgactttatgaaacatttgtgtagcatgtaggcagtatgccgaagatgtttttaacgatagttaatcttgcagtcccttccccttgctttgcgtcccaccccacggtgtttttcttcttgaaaggctgctctgtagtaaatggtccgtttcgaaagcctggtgagcacactccctcagcatcgcaccgctgcctcttccctttgcttatctcttccacattaggttgctgattagcgacagggcttggaaggattgccamttctgtaacgattcaatttgggggactgcataggcactgatacctttacaaagcaacgccgacattagtttattaccttctcaattttagcaactctgaagggaaagagacctaacataaacctcttttcatttttgtatgatataatcttacacacagtatttcatagtcagtcaattggactattttgttttatgcttcttcacggaatgtaattttacatgcatatttgtaactttgggataactttttagcactatttttgaagctcaggactctgtgaatggggaaaaacaaagagtggaaacacgttctgggtcacctggtagccasttgttgccttgtgatgtcaataactgcgtgtgcttttgcagttgctttagggccagttggatkgcagagcacgtaacagtgccctgcataaaggtccacagaagggtgggcttcattaggggaaagaagaaagatgagacatgtacatcaatgtttgaatcagaacatggagcattttactttgagggtcttgagctaagcgtttcggttcacataatcaagatatagcatagtgactagctatttggtttttttaccataaatctagaatacacattccagcacatgttttcctatgtgattttgagtaatctattgaacttctctaagctgtggtttctttagctctgaatggggactaacaactactatgtgggatttttgtgtggagtaaatgaaataacatacataaaacacctgttaaaatgcctggcacaaggaggtacttcacaaatggtagctattataatattattggtagtggaatattatgcatagtttttagtttaaatggtataatttgtatgttaaaattgttaatactaaaaataaaaaaatgaatggagtgagaaaatgaaggagcacataggcctgatgccttttgttaggatgagttggaattgtatgttattgtagacaccttaagagcaagtcctaggttttacrctctgtctcctgccggccaattccgcagcttcacactatggcctgcacattagattcacaaaaagtgcttttaaatgcacttcaatttcaggttacttcatttgtttattgtttttgtcttggatgtgaattctgaatggtaattcttcttgaagtatgtctatgatttcacttttgagtcaaagatggaaaatatcaagtgaggatacagcatagtgcctacagctaacaatattgtattataggcttaaattttagaagggtggactatatattaagtggtcttaagggagcggaaggaaactctgggaggtgatggacttgttaatggccttgatagtagtgatggcttcatgggtgtttacttattcctagactcatcaagatgtgtacattaagtatgtgcagctttctgtatgtcaatcatacctcaataaaatggttttaaaaaaagaaaataccaagtaagggaatgaacaggagttatcctaaaatgacagtaaagaaaatcctactgaatttcacattttttctctttctatacatgtttctaccattttgaggtgaaaattaaaaaatctagtatactgcttagtgtggctttaaaatcaatrtatttgtttttgaayttttttagtgtgatttcatagggaatactagaaataaaacatctgtcaaggaatgaattttttgcagatgagtagtgtcagagaggcatgaaattgattgctgtgatctaaggagaatgygctgtggagcaggcatggtgggtgctgatgttgtctgttggtctctctgtgtatgccaaggtgactttcaacagaaagatgagcttggtctaggggataaggccccttcaactcttggtatttcttttgaggttgtaaggagttgaggtaaaaaatatagggccatctttattcagaagtaagactgttggaaattgttttctaaggcctatgtttaactasctaataataacaattgttgtgattgtgttcaatgakataaaatttgattcttaagaggcgatttatccttttgctggagtgggtttcaagtagtttttcagaataaaattagttttgcagcatatattcctttggagaggggttgttctgttttctcatataacttcattagactcctagctttcaaaaacggatatcactcttccctcagattggctgacctttacagcaattggcggtgtctttctctaacatcatagaataggtgctggccatgaagtttaatcttgaacttacttctgtgtaatgtttactcaaagccatgctctgaaatataggcaatccatttatttcttgattgtctaagacctgtcttttcattatgtttgattattattagtgagctacaaaactggaccatgttgttctgtctctctatatcaaatttctcttatttgattgttttggtgttcacagttttcatcctacatatatagaaagacttcatatagtacttacagtgagtgggggagggggctatgttaaacctcaaggtgtctttttagaaaaatgtagcctatagtgaaaagatggtacaaggaaattatttccataggaactaatgtacagtgccccagattgccctatcttgcactttttacttattaactctgccctaaaattctttaagtaaycctttaatgttaaaacattaagatgaaatagacattttaaaaatggagaggattctgggagttggagacttgaagcatctctgcaccttctgctatcaatttcagtctcgccactagttgctgtttctcagaagcacatctgacgacagatgtgagccattgggctagttctggcaaagtgcmgggatcaacagtgttggccccagtctctgtgactgttcctgagataaccttttggttttcatgtccctgtcaactggtttgggtgggtgagggatggggagagactttctccaggttttcttaagagggggctgcaaactcatcagctgstggcataccactgggcctcagcagcagaggctgcctcatctcccaccacttagtggatccttccacttaaggcagcccaacagtgggacctgagctctggtgcgtaggcagatgaaaaagaaggggtcatctatggggcacagtaggcggagagaaagagacaaatgagaacttagaagaggtgtgtcttggaagaactcttggaatagttcagtggtgctttgatgtttgtagcattgacaacgattactacttgattttaatacaccctcaattttaagttgcattttgatttcatagatagtgaagagtagaagaaagtaacttcatgcatgttatatttgatgaattagactaaattccagaaggagataaagggaagagtttgagaggaggtgataattatgtgatataaaacatttcactgagctgaagaaaactggagtctgcaaattgaaaggactctttattctaggaggcactgatgagaaaacatgcacacctagtcatagacagctaaaatttcagaactctaaggataaagagaaagccttatgaacttccagatagaaagaacactaatttataaaggaaatgggatcagcctgggtttaggcttttcttctgccagactggaagctagaagatggaatgacacctaaaaggactgcaagcccacaattctctgttgagctcttactcagctgttacggtgaaaaagaggaccattgatatgcaaggatttagaaaatttattaattttaattctagcaggcagagtccattaaggagatcaaacacaccagttatttttatagagagaatttaatgtaagaattgttaatgaggcacttaagagctgaaaaggcaaaaacaaacaaaaaaaagtaactctaaagcagtactgtttaacagaaatattatgtgagcaatcattgtagttaattttctactagttctgtcacaagtaaaaaaggtagaaataattctggttttttctcagtatatctaaaataataacataaggagtataaaatttattttcataccaagtgttcaaaatccagtgtrtattttatgattaagcaagtcttggattggactagccacatttctgggctcagtagccgcatgtggctaatggggactgtattggacattgcagctccacagtatctcagatgtagcactgggggagcaatgggaagaggtagttgttaaaacattaaagcttggaggagaggctctgtgggatgtagctcagacgtctgaggaaggggcatttcctagctggtagactgctgtcatggagctctgaggagagacctgtgggtctgggactgagattttcaagagtgtgccagtaggtagggtcagtgtctccagaatggggtgcactgaggctgattttgcaagcagacttagcttgaacaaagtgcagactcaactgctgctgctgcaggagcaagtgctgctgctgctgggaagcagtgaggcccgagtgacgcgataggaagcaaatgggaaacagctccttgttcttccaccagccttgcagtttccctctggcttcccttgatgggtcctagtagggacccagctatgaagcagaaatgtgtttagagaccttgccttccccgccagctccacatcatgaagcagagagcagaagaggggtgagaagctgagagtcgtagccaaatgttgaacacagtagtccatcttaggataatacttaaaaaataattctaaccaaattaattacaacagagacttccatgtaggggaagatggagaggaggggaagcacccctgaggatcagtctttgccttgtgtacataaatgatagaccaggattgtctcataaagtgctaataaagattctcgaaattgaagaaaaatccttgaggaaaaaaaaaactaagagttttatgagtttcaaagtactgaactcttagctcagaattgggttgggggaaagtcaaagcattcaaacgatttcatcttactgggtttgctggagtagtgtttgaggaaatagttggaactgtgtttttaaacaacagtagagaaaagagtatgagattttttggtgggagttgggggagggtatggtaacttgatacaaccaggaaaatgaggaaaagggaaaaagtaaaattaatattaaacatgatataaaatggaagaaataagtatatcagttgtactgttaataattgtgactgggcacaattacccatttaaagatcaaggctgccacatgcacaataagagctatgtatttatatgaaatgcagttaaaacaaagtaatttgttttaaccttaataaaggttaaaaattaatggattggcaaagttgtgccaaacagaaagaaatatgaaaaaatgtacaatcaaagcttataaacactaaacagaataaagaagcaaattatgtaatgataacaagcacagtttataaagacagcagccattaacctttatgcatcaatcaaattagcagctcaatgtaagaatcaaaaatgattagaaattcaaagtctagttgatttacaaaaataataagggactttgtataattattttttccttaaaaatgtttactctggcttcatggaggagcatgctaagctttaacatttagcacatctagtataaaaagagacagaatgagttaggttgtgtgtgtgtgtgtgtgtgtgtgtgtgtgtatgtgtgtctgtgtaggggagcagaaaggccactcacatccacctctcagctccacatctgagaagctaaatgcaggtatagggtgagaggttgcattttggttcaagttggaaggtcttttgaaatcaaaaagaagaggagaattattgattgttttcctccatagggcttacaatggtaatgtcatctctttgtctggcctaaggtttccctagccttatcaatgaacataatttcaaaattcgagtcctggcaaaaacgtgtcccttrtgaaaaagaaacgtaagtgcaaaacaatgtaaatgatgtatgttttgtctacagaagtgtactgagattctcayrttatttcatagcttacggtcctctttatgagaccccacccatgtctctcaggtcacggaaccaggattattgccctagtttctgtcttcaggaggaagccatttcacattgtcatctgtccagggctcaagctgcccatcttggatggggccgctgtttgcgggaggagttgatagttggcttatgaaagggatttgcccagagatgtctgcatttgaccttaggttcctttttcttccagctgacttcatgattgtctagctccagcatcttagtaaatacatagcagcagtgcccattccagtgaaggatgctacaggggaggatgcatggggaggagtatagatattttctaaacaatagtaataggtcaagcatgagcatttcctcccataacttctgtaaaacaggttatttatttatttattttttgagatggagtttcgctcttgtctcccaggttggagtgcaatggcgtgatctcggctcactgcaacctctgcctcctgggttcaagagattcttctgcctcagcctctccagtagctgggattacaggcacccaccaccacgcccggctaatttttgtatttttagtagagttggggtttcaccacattggccattaagccctgctgataagacacagtttaatggtggtgtctttacctccccattcccaccattattcacccgtatattgaatattatgacatttgatgtgtactttaagataaaaagctgatgatctcggtttaagatgcctctaaatattcagttcaagttagacaaagaagtggccataggtcatttcagtagaggaagacaaggatactttgkggtgttgkgtaatttcctcctaggtagttttggttgtgaatttctgararagagtgggtscaggasccatggatataggaacattaacttatgaactaaaatcagaatacttttcaaatataaatgtatttttcagtgcagtaggagaaaatatttaagaagaaggtccaagagcatccaggacaggtggtacttgttcccaaatgagaactgaaatagggactttaggtataaagtaatatacaatgtgtaaatgggaggcaatcatctggaagggggagatgaaagctagttaggattatggctgtaggtaatccataattatagtcctaggctttcagttatgggctgagttttttttttttctcttgcatcattttgaagctatgcaggcatatttccagattgcaacaaaattttattgtgaattaaaataaaatcaccttttctmtgttcctttggaaaggaaggaaaccttgacttaaattctgagtgccattttcaatgctatttacacagaaatgtagatgaccaaaataaatgtcctcttggttttattcagaaccaggacttaatgctggttaaatacagtcctcacttgatatgcatggaggattggttccaggatccctaaggattccaaaaccctcagatgctcaagttccttatataaaatagtatagtacttgcatataactggtgtacttcctcccgtatactttacatcatctctagatgtacttacaatacaatgtaagcactatgtaaatagttgttatactgtatattaaaaatttgtatttttaaaaattgtgttactatttttttattttctttatttttttaagagacagggtttcattctgttgcccaggctggagtacagtgctgtgatcatagctcagtgcagcctccaaatcctgcagtcaagtgattctcctgctgtagcctccctagtagcttggacttacaagcaggtgccaccacacctgactgataaaaaawtttttttttgttagagatgggggctcactatgttgcccaggctggttctgaactcctggcttcaagtgatcctcccacctcatcctcctgagcagctgggattgcaggcatgagccactgagcctggcttttattatttatttttccctaaaaatttttgattcccatttggttaaacctgtggatgaggaacccattttatttaatttattgctaaattaccattatgtaaaatatatattgctaaataatcattatataaagagtacctatgttccataatatttataaaaatatgctcacactctgtattcattctttcaaaatatattttgaatgcttaccaagtgccaggtattatttaatgtggggattacaatggtatataagacaaagttctacccccatgccacttattttaatggtatctgtatatttgtgtgkgtgtgtgtgtgtgtgkgggkgtgtgtgtgtgtgtattttctgtaagaatgcaggctctgaagttgggctgagtttaattctggctatacctctcactggttttattttgggtaaatttgactatgggtaagtttcttatgacccttgaatgacctgagcgttaggaacactgatcccttgtgcagttgaaaatctgtatataacttttggctccctaaaaactgaactastaatagtcatctattgaccggaagccttaccaatagcagagtagattaacacatattttgtatgttatatgtattacatactgtattcttacaataaagtaagctagagtatagaaaatgttagtaagaaaatcataagcaagaaaaaatatatttattatttattaagtgtaagtagataatcataaaggtcttcatcctccttgtcttcaggctggagggttggttagtcttgctgtctctggtggtagaggcagaaaagatgaaaggacaggcagacatattatggaaatgccttataatttctgtctgactttttttgctttttttagtttctctaaaaatgtttctacatggtaccagttctcctcccactgtttgctttagtttcagtgactatatcttagatgggtccctgtcataaaataagtcatttgtagtcttggataatctgaacccttgtgccagattgtctaatgtcagttgtgttctggcactgcttcttctacatcttctcatygtctggcgctgtttcgaargcactcatcaccataatgtcgtccatcttctgttaattcstctggtgtggtgtctgttagttctggaatttctccaaggtccatcttgaagcccttcatctcccaccttttttggttatattcacaatctctttcatgatttccctggttgactctgttgtaaatcatgtgcaatatctggacacagtttcctccaggaggagtttgttgttttgggcttgatgactttcatggctttttctktaacaacagtggcatcttcatgaggtaatcctttcagacttcatgatgttctctctgtccgggttctcttccatagtgttgacagtccttttcatagattatcatgtctgatgaagaaaggtccttatgatcccctaatctataggctgaaataaaaacattctgtttgggggtaagtcaccactttgatgtgttcaatattgaagtcatggggttctgggtggctagaggcattgtccaatatcagaagaactttaaagggtagtcctttactggcaaggtattttctgatttcagggacaaatcattgatggaacctatctagaaaataggttcttattgtgtagaccttcttgtacaaccaaaagactggcagctcgtgtttatcttttccctatgaggctcaggggttagcagctctatagataaggacaattgtgccataaactcaactgcatttgcacaaaactagtagagatagcctatcccttcctatcttaaatctttgtacttgcttctcttctttactaatrtatgtctttcatgccatttattttctagagtagggcacttttgtctgcattaaaaatctgttcaggcagttatcctttcttctcaatgattttcttaatggcatctgggaactggtttgctgtttcytggtcagcagaagctgcttctcctattatcttgacatttttaagtaaaacctctttctcaaattatcaaacyatcctttgctggtattaaattcgcctttaatctatcacataatggagacttgacttttcctcaaatcgcattagagtctataggtaagcctttcctttcttagcaatccagcactcatatagaagttgwattttctttttttttttttyytttttyctttttctttttyytttttttattgatcattcttgggtgtttctcgcagagggggatttggcagggtcacaggacaatagtggagggaaggtcagcagataagtgaacaaaggtctctggttttcctaggcagaggaccctgcggccttccgcagtgtttrtgtccctgggtacttgagattagggagtggtgatgactcttaacgagcatgctgccttcaagcatctgtttaacaaagcacatcttgcaccacccttaatccattcaaccctgagtggacacagcacctgtttcagagagcacagggttgggggtaaggtcacagatcaacaggatcccaaggcagaagaatttttcttagtacagaacaaaatgaaaagtctcccatgtctacctctttctacacagacatggcaaccatccgatttctcaatcttttccccaccttctccccctttctattccacaaaaccgccatggtcatcatggcccgttctctgagctgttgagtacacnnnnnnnnnnnnnnnnnnnnnnnnnnnnnnnnnnnnnnnnnnnnnnnnnnnnnnnnnnnnnnnnnnnnnnnnnnnnnnnnnnnnnnnnnnnnnnnnnnnnnnnnnnnnnnnnnnnnnnnnnnnnnnnnnnnnnnnnnnnnnnnnnnnnnnnnnnnnnnnnnnnnnnnnnnnnnnnnnnnnnnnnnnnnnnnnnnnnnnnnnnnnnnnnnnnnnnnnnnnnnnnnnnnnnnnnnnnnnnnnnnnnnnnnnnnnnnnnnnnnnnnnnnnnnnnnnnnnnnnnnnnnnnnnnnnnnnnnnnnnnnnnnnnnnnnnnnnnnnnnnnnnnnnnnnnnnnnnnnnnnnnnnnnnnnnnnnnnnnnnnnnnnnnnnnnnnnnnnnnnnnnnnnnnnnnnnnnnnnnnnnnnnnnnnnnnnnnnnnnnnnnnnnnnnnnnnnnnnnnnnnnnnnnnnnnnnnnnnnnnnnnnnnnnnnnnnnnnnnnnnnnnnnnnnnnnnnnnnnnnnnnnnnnnnnnnnnnnnnnnnnnnnnnnnnnnnnnnnnnnnnnnnnnnnnnnnnnnnnnnnnnnnnnnnnnnnnnnnnnnnnnnnnnnnnnnnnnnnnnnnnnnnnnnnnnnnnnnnnnnnnnnnnnnnnnnnnnnnnnnnnnnnnnnnnnnnnnnnnnnnnnnnnnnnnnnnnnnnnnnnnnnnnnnnnnnnnnnnnnnnnnnnnnnnnnnnnnnnnnnnnnnnnnnnnnnnnnnnnnnnnnnnnnnnnnnnnnnnnnnnnnnnnnnnnnnnnnnnnnnnnnnttaggagctggagaccagcccggccaacacagcgaaaccccgtctccaccaaaaaaatacgaaaaccagtcaggcgtggcgccgcgcgcctgcaatcgcaggcactcggcaggctgaggcaggagaatcatgcatggaggttgcagtgagccgagatggcagcagtacagtccagctttggctcggcatcatggggagaccgtggaaagagagggagagggagaccgtggggagagggagaccatggggagagggagaccgtggggagagggagaccgtggggagagggagaccgtggggagagggagaccgtggggagagggagaccgtggggagagggagaggagggagagggagagkaggagcctttccgagaagttgtattttcaatacaagattaaaargtatttctcaaaacatgcaggggttttggacctgctggcatagctgcattgaaggcttcgtgaattttcttttctttttctacaacagtccttatgctggattcacttatctcaaagtggcaggaaactgcagctgcagacctcaatctatggtacttaccaagcaattcaacttttttttcctctaatgtcatgacttttctctgcttctcgggagcacttctagcatcactagtgacactttgtatgggtcccatgatgtgatgcaaagttatggtattgtaataaacaatgaaaaatacacgagaacctcaaaagatcactttttactgcagtatgcaatttactggagagactaactgctcactcgatgattagcatcacagtgtgttaagcagatactcgtaactcctgagctcgctacaatagcaacaggaggtgcctactgaattatagcaatacagtatgtactatagttaattttatgcagttatgacttaatactgcatctttacctctgtttacgtttccgtccactgcagatggtgccatgtacagtctgtttgtgtgcatacattttgatacattttaactttttgtttgagatagagtctcggtctgtcacccaggctggagtgcaatggcgtgatctcagctcactgcaacctctgcctcccgggtttaagcaattctccttgcctcagcctcccgagtagctgggattacaggygctaccaccatgcctggctaattttttgtatttttaatggagatggggtttcgccatgttrgctaggctggtctcgaactcctgacctcaggtaatccacccgtcttgcctcccaaagtgctgggattacaggcatgagctgccgcgcctggccaattttaactttttaataatagattcgtatatattttatgatagtgaatgataaaactgaccagaatcaacatattttatgcattcatgacatactttaaaaatttatttatatttatagatatgtgattcatctgtgagttttatcaaattgctacaagtcttcaaaaaaatgttcaatatatttattgaaaaaaaaatgcacatatgtggttctacacagtccaaacgtgtgttattgaaggttcagctgtacttaaaagttctgtaggcctcaattttacataatttctctgtgcctcagcttttcatccgaaatataattgatttaatagggttgttgtgaggattaaatgagttacacccatcaaatgcttacagttgtacctggtacgagtaagcataataaatgctaactctttttctgtcacacatgcagatattatatatgaatttaggctgggtgtggtggctttcgcctgtaatcctagcactctgggaggctgaggtgggtggatcacctgaggtcaggagttcaagaccagcctggccaacatggtgaaaccttgtctttactaaaaatacaaaaattagccaggcatggtggcacatgcctgtaatcccagctacttgggagactgaggcaggagaatcgcttgaatcccggaggtggaggttccagtgagccaagatcacaccactgcactctagcctgggagacagagtgagactccgtctcaaaaaaaagaaaaattaagatgccatattcatgtttatgtatttattttggaatctcaatccacatatattttcttccaggatttgaaacgatttgagctgagaagtgttaagcttctctgttcccttatttttgtcaagtcttattaatcaaaaactgtatacgtgttttgtcmttatttttaatagtctaataattayttcattgaattacccagcttagctcttctgtttaaaaatggatggtaaacagtatcttgaatgctggttcggcaggttctgacaaaatatgatgygttaaaataaaattcattgttagcattaaaatgacctttgaggttgtcgtcactcatttttctctttcagtgtttgaaatagcctttctgcatcaagtgcattgcagtatcttgtatatattgcctatgtataacggtcacggttcaactttagataagtcatttagtcaaatcactttatctctagcaatctccgtttcccatttattcttacccattatctgaagttcttatcaactttctctccatagtgtaatggccttatgtattacatttataaagtaattttctaagctagaattgtatagaattacttatgtgtcaacctacatgaagataaatctgagtatttgtgaatggccaaatgagcagtatccaaattcagaaaaacatttagggccattaaaagccaaaccactttgggaaaggggtggtaataatttagactctggcaaactctgacttagtgtagtatacacaaattttaaaagagcctattttaaaataaccgtgaataatgtaagatttaaaaactgtccttacatgaccacaaaggtgagtagtataatggaaactaattcctataggaaagtttactctttaagatgtttaagaagtatgactttggaagtcagatcaccatctttcacacctctgttgtacttctcagtttttctcatgttaaaaatggagatagtagctggtgtggtgacttgtgcttgtaatctcagcactttgggaggctgaggtggacagatcacttgagcccagttcaagaccacttgagcccagttcaagaccatgtggacaacatgctgaaacctcgtctccacaaaaaaaaaaacaacccaaaaatcagccaggcttggtggcatgcaactgtggtcccaactgcttgggaggctaaggcaagaggattgcttgagcctgggaggcagaggttgcagtgagccgagatcatgccactgcactccagcctgggcaagagagcaagaccatgtttcaaaaaaacaaaaaacaaaaaaactagagctagtaatgcctcccttatggaggtgaatgaagttcaatatgttaatgccttgctaaagttatctttaaaattctctttctactttcttaaaaacttgaggttctttagagtaaagtcaaactggctagtttttaccctgggactaaaatatagagaactagattttatacctgctgtccatgaaagttgaatgttttataagtagttaatttgttttcccatttaaaaggacatgtaataatatttattataggagatttggctggcttttaggaattcattttgctggtgtaccttaagtccctcgcctgattgacaatatactgaggaaagrgctaagttgctagggcttgaggtctaagggcagcactgactggtatttgtttcattaagcttaggcaagctatccaattacttaatgcaaacaagaaaagtttacactaaactcctacttctttgcttgaaactctagagaatttaaatgaggagagatatgtatttaaaagaaagaaatttaaatgaaacttaaatcagggacttaatgtagaatatattagagcaggagatctaaaatattaagtgggaaatgccaataaataaaaaaggaatgtattctctaagatacttggcatgtttagttttgttttgagataattcttaaatctttggaaacccaagttaataatgagagacttattttatctcctgcctttacatataaagtcctgccttcccttggtcagtgagagcctgggtcttctctccttagtgaagtgttcccaaaacaacatggcttctgattttatagctccactatctgggcagtagttttcagagaggcccagatggcagggctgtcttatttggttcaaaaagagaaaaattggttgacagctcatctaccttttgcagatggctgttgaatagtatagctccatgcggtataaaaccaaggggccagagaggaagctttgaaartaattgggggtttctgaaaacataagcagtttttctttgcaaagtggttttggctcagtaaagaatttacaggaaccattgaaagaggaaacttagaagaaaataattgccatgcaatattttggaggggagggttggggaaatggagaatggtacaattttgaagtttcaaatctattgcttttaaatgggaaatggtacaacttagaagcttctcatctttgggcactggtcaaaactgaacctcagtcagtataccattgaaactctgtcctccaagagaatctgaaagcaagtaaaattctttgcagaggtgatttcatgcctcagagacccttctaagtgtcacaggaatctaactgaaggaaatcctttcttggtgcttctggacccaactgatgtttcctctgcctaagacactttctccttccccatgttgctcagttaatgtcctgtagagctcaagttaaatatcagtcccacccatgcagtgtcatagatacctacctaactttttaaaaataatgcatctgttatttgtaatcatggctcatgaaagtagggactgtgtctcttgctcactacttcattctcagtaaccagagtagtccctttcacctagtaattatatactgaataaatttatgaattccagtgtgtagtttttgttgagtactgtagtgagaaatctcaggattacagtagaagtatatgtgcccatcgagtagaaattataacagtatcaasctgggagataatataatgcccctctgttttatttatcccctgccaccacctttttcaagattttttatggaatgaggaataatatgtttaaggtatagactttttakaatgtttatatgcaaaggaccataagattatatagtagttcaaccttcaaattttaaaactgaggaaactgaggcttattagattgtacagctaagttgttgataggaaatgagaatttgttcagagtcctactgccaaactccctgatgacaaaaaatttggtttcttaaacagtcaccatacagaccttaaaaaaagtttttttaaaatttataaacattcctttaaaaacatttgagaatttgtgcagttctatttgtaaggatgaatgaaagtataagaatttattaagaaaggaaaataatattctttttagtcagtttgcaccactgccaatcctctttcaatccaggtgtcaaatatagttaggtgttgatgttggaggggctctggactgttgtggcacctcctgttgtaggctatttaatgtagcctgggattatatcacagatgtgccacatctaacatggtggctargcccttggaggatacagtttgtctcgttagttgtttcttatatrccatcgccttgtgttcttttgcagtttgttttccttgttttgtttgtggttagaaatatgccatttatttatttattcattcattcattcacacatgcatacatcaacaactttttcttgcgtgtttgatatgtggcaggcacttttataagtatgggggatatagcagtgaacaaaaatagggcaaatcgttgtccttatggagctatggacaagagggaaaggaagcagcttgtgaaaggktctagctgctggagttagtagagtcaatttgtgattttagaagtccttagagatcataaaaataaagcagaatttattggtgaaaaattggaaaagatgatggagatggcattgtagttagtgaatttggagattgtcttcttcatttcgtaaaatcactgctttctctgtattcctacccgcatagtgggtactattattattactgctacttacctaacatttattgagtgtatattatgttatgggcattgtgctgagtgccttgtttatatagaacgctgtaaggtaggtattacactatttcattttacccatgagaataacaggactcaccggagattaaataaagtacttattcagataggaagtttagagccttgatttggacccagagtttgcatatctgtaccagtcatggcaagctaaatatgtttatttttattatcacattgaaggcttttgtgctcatgttttgcttctttttcattaacttgccaaaatccttatgatcctgtatttcttaaagttgaaccatgtagaactccatatgtaattaaaatctaagcyatacataagtaaactaaaatggaaaaaaaaagtagtaatttttaaacagtactttaaaattagatacaccaaatgtggtagatgtgataattcagttgwacagaattcattttatgttcatgaactaataatagaatttgaataaacattttatatatgtttgtaaagtgcctagcacagtgcttagtagttgatccataaatgatagtaattttattattttattttagtttccacctcactggtaaaaataggtaatgcttttttacttaggggtaagatgtccatacaaatgcgttaaatacagtattgtaatctgatatgataacctcagcagttatttgcacaatattctcatggggagcacttcatttttgatgttactttcatttacctccaggatttatttgagtacaagtgtattttggtaattaagggctgtagtcttaaactttagcatgcatcagaattctagagggcttatgaaaagacagtttgctaggcactatccctagagtttctgattcagcaagtgtgggatggaatcagagaagctgcatttctaacagactcccagctgatgctactgcagctggtttgtggactgtagttttagaactgctgttctaggaagtggtgtgacttctaattattgctgttctcttacaattacacatatccagtggtgttaatgtgttgatatcattgatgttgctgaatttattgtatggtccttgtgaaataatttagagaaatttggtttgtatgagtgtcattgtgcttattgcttaggaagtttcccaaaggttacttttgcattagagaatttcgaaatacagattttaasttgtttctagtcctctttttttttatttaagacacaaaactacacagctttgatttttaggggaaaaggatgataactttggamtatatctcacaaggtgacttttttttttctgttgtagttgatttctgagaattccagagtatcaggatgatgtagcaatttaaaaatagtaacacaaaattttatctctagtttttttcaaaaatctttttaaaactaaaatttgataagctagtactgagtagaatttggtgctcatcattcacacgtataaagtagatttcactcagaatttcacttacaccaacataacaattttacttttcctttttaaagcatagctataccttcagggatatgatggtatagtagggttattctctcaaagaagaaaaggcagtcagaaaatctttgttcatgagattagactgaaatcttcagtgattcagtgattactgaatgcctctatgtgccaggcactatggcaaaaatcagtgccaaagtaatttatctttatcatgtacaatgaggggttttagtgggttgtaacttaatatgatctaattgtgtgatgaggctactgagaaatctaatgcaatcttatgcttcattaatagaattagtattgtgtacagatctagggaagtaagattctcctgtcttagtttgctagagcatgtctggagggttaggtttagtttggagctaacagatcgattggagtcattccagaagtgaggagccctgcagttgaaaggcgtggtcatatttgcatatgaggattgttggaaaataggggtaatatactgggaggaaagatgtccttattagttccataatgtctggcttctctgctgtgctgtaacatccacaatgacagtgacctgtccatcttgtttatcgctgtgtcctcaatgcctagcacagtgcctggtgtgcattcagtaaatggacgagttgagtaagtttggagaaagagacgatggttaccttcaaatatttgtcatgtagatkgctttttttttttttttttaaacggagtctcattcgcccaggctagaatgcagtggcatgatctcagctcactgcrtcctctacctcccaggctcaagcagttctcctgcctcagcctcccaggtagctgggattacaggaatgtatcaccacgcccagcgaagttttgtatttttagtagagacggggtttcaccatgttggccaggctggtctygaactcctgacctcaagtggtccacttgccttggtctcccaaagtgctgggattacaggtgtgagctgccaccacgcctggcctagatggtttgttaattacttaaattttcagaggccaaatggaagcaccagggatggaatttttttggtgggcagattttaattttacataagaagaactttgtaaaacttagttatatttggcagccaaattaataagcttcttcatgtatttgaatttggttatttgaaatgcttgagtggaggctgcatggggatttacctctatacctgcttttttgatagattatgggccaagatgatttcagctgttgacctttttggctatgtgtttctatttttaaattatttcatttgatagaaaataatgtcaactaataaaatattttttctaacttagacaattcttgtcattttagactaaagcaagccaaagagctggaccgagagagggctgctgccaatgagcagttaaccagagccatccttcgggagaggatatgtagcgaggaggaacgcgctaaggcaaagcacctggtgagtattaaaaatgtaggagaaattttcttgcctacaaggaaatctctgatgtttgggaagagctaagtactctgtgccagcttttagtgttgataatattattcatgttctctttgctcagattttgatttttgccttttataagtagcttacagtttaggtttaaccatcaaggactttaaaggcaggtaactctggaagtattgaagaccaacatgcagacatgtgtacatgtttcacacctgaaggattgttgtctgcttttttttctttttctttcctttttttttttgagacggagtcttgctctgtcgcctaggctagagtgcagtggtgcgatctcagctcactgcaacctccgcctccggggttcaagtgattctccagcctcagcctcccgagtagctgagattataggcacctgccatcgtgcccagctaatttttgtatttatagtagagacggggtttcactatcttggccaggctggtcttgaactcctgaccatgtgatccacccgcctcggcttcccaaactgctgggattacaggygtgagccaccgagcccggcctgtcttctttttttgtcctttgcctttggttttattgtctttgaaacctcaggggtcagcaatgtaggcttctttctctcgtggctggcaactaccagatgttagtctggaagactctggcaaaggtgagtaaggtttgatcaatcactgcctggggtttagggaagagaaaatgtagagccagggccttggggaacagtcttttctaagataatttttttaaaaagaaaatattttttaatcttttaaaagattacatagacatgtttttgttgttgtctttaaaagtattacyaacagacagaagaaggtttaaaagacacccatcaatctgtctttctgatataaccatggtttacaccagtgtgtgttttcctcgagattatttttttctaggctttttaacatattgaaacatttagataatgctatagatggtgttaagcctcatgaacattttcctatgtcactgaacatttttctgaaatgtagtttttaatggctgaataatgttctgccttttgtattcaacataatttattaagcaatttcttattgttatttgatagataaaagtggagctgctctgggtgaaacctggagtgttgactgcttagcctccacttcggccttcctagaaacccagatgttactcctcggaacctttagtcctcattggagcacagttgggaactcactggacagggaaaatgggaccatggaatggagaactttgaactgaagagtgagggggattttcctagttcactaggcaattgggaaacactaaaactttctaagaagaaggctcatttctagtctctcccattctttaccttagtcacttctctgaaagaccaacccatgaccagctgcaaacagagaacatgaaaggaagtccatgcgtaatgaatcagtttcttcagtgacaaatctggggtcccggttgcatgggcaaatagtgaagccagaatagaggtggtagaccaagaaagaaatgtcagtggactgactggcagctgccctaagaacagtacatgtgttgagtggaacaaagggaataagagaggtggaagcaaagtcagtcattgtgaaaggggaataatttcagaattaaagacagtaagttttgagtaactcaactgaaaattaaatttgttgtacgtctaagctgaaggattttttgaggaagctgaaaaaatatcaggtcagtgggttgaaaagtcatttctatgtatattaaagtctccaaatttggaagctaaggatktagtggaggaggttaatagtgctcatgtttgaggaaggtacgagagcaaaactcttagtttccagcgggcagaagaataccttggttggcatttctctttgcctcccagcttttactcttttgaatcttatctttgaagcactctttctccacctctttttgcctgaatttggacatactgtcttactctcttagtttatggagaccagcaagattcaaaaactcaaaaaactcattaaatatatacacacactcagcaagacataaaaagagatttcacaaaaaaatgtgaaagtatcaaaagatttgttactcaacataactaaaatattaagcaacatgttttgattggaatagcatatctgcagtctgttctgttttacctaataaatcttgtctattgwctgtctttactgctttgtgtagctggtgaagcatgagaaactggcctcgtacattctgatttgtagatctcttatttacagattctggttgtgtggtatagatgacaaattgtagtactcacaactcctgtatttcagcatctgttgtaatatttgccaaatagagccctcaaagcacttagggaataaaagtggaatttatgccataggatgacagctgattgagagagtcccttccttcccagagtgttgtcagacatttgcatggtctgccatggccacagcaacatggctgccagtgacatttagttattgggcagttcccaatttatttaccagatttctccctttattgttgttatttattattatggaagacatacatattcattggatcaagattagaaaataaatacaaagrgatactaaaatcactcaatgtactacaattcagagatagttactgttaacattttggtttgttgtgtttatattcctttttacttcccactgagttggtataaaacatttgattttatgtgtataacggtatttctccaaacatagataatagtatacactcttttgtataactgttacaataaccttcacattaaaacatttaggccatgtggtaaaagtttttatactgataaatacgtttttgtgtggtcacattttaatggttgtgtttcactgagttttccactaattactaaattaatacaagaatattatagaacacttggaaaacaaaaaattacaaagaaaatcagtattgttataattctgtcatctatcattaakgtttagaggtataaagttctttctcccttccccatatgtatatattttatacatgctttagggtctcagattatgtatcccaccaccctccaaaccagtactgtgcggtgtggacagtgatcgcaagcctgctgttgtttgttagttccttgatccccagctggagaggtgggcatcttcagaacccataattgatgtgggagtcaccccagaaaggttagcattgctcctgctattttggagggcccctattgctgccattcttaattctaatatgtgggactctttgagtaatggccaagcattgcttcgttcctctttatttagaactcaaatgttgcagtctgcaggaaagtaaagattgtgtttcacacatgtgaagtaattaaaaagttgtctttcaggagagcgagggtgaaagcacgggagctgatgtgatgttgggactgtgaaataaaacgattcccaccccttaccccacaccccccacatctttctggctcactaacagctgacatttaggtttctgtctccttagatgtgagtccaggctttttcttcccacagttgttttagcagctagctttattgaagctctttgaagggcaaagtcatgatggccctgttgttgaagttttaaaataggatcagatcaaaactttcccctttggaagaattgctttagctggggaagctgttaatcccactctagattctggaagagtataccagccccttcctctactcagcactgagtgatgccagcattttaatcagttgactttatccagaggctttggaagaggcagtctactgataatgattttacctgcatgaaaatgttaaaagcaactcacgttcaaaatatgcttcttaggatcaggaaagcacctctgtagaagatgaagactgactagaaggacaggaccagggaatttgtaaagttaatgcaacttgatatgtgtattgtaaagatcttatatacgtgatctaatatttgctgtcattagattcttttttgaaattgaagagtagtgagttagtttttttgactttgcagttatattttctttttaaaattccagttaaaattttgactcactcttttttatgtcttactacattatgctggtttaatgttagatttttwaaattttaattatttttaaaaatttaagtagagacagagtcttgctatggatcttgaactcctggctcaagtgatccttctgccttggtctcccagggtgttgggattatagatgtgagccaccatgcccagccacatatttcttgttmtcatcacagaactatgtagtattttctcttcttttcttttttttttaaatctaaatgttaaaaagaagtctcaatttacttacttaaggcaatatttacttcaaaattcttccattactctttggacagatgttttattgagtgcttactgtatgaaatttactatgttaggtactaatgatctatgaataaaagacaaaatcttgtccttgaggaataaaaggtaaaagatacactaaaaataatgtttaaaaatgctaagtctgttatagagccatgctacttatagtcttgtgaggattcccacttttgggaaagccaggactttgtctttcttttaactaattgctatgtttgcatttatttattcaacaygtaattgagtgcctaatatatgccagtgctgagcaaacagtaagcagtcaatacatatttgttgattgaataaatgactgattgcatctactgaagccctggaaataggaggagaggaaatggggaagaatagaaaagattttctggggaaaggacccctgagctgactcttgaagtatgagtaggatttgctcccaaggttgaggagtgggatgaaacagccttaggtattgcaggcaaaagcttggaaacgtggrgatagggggacactactagaagttgctgagtgggaatcattgtggcagttagaacatagtctgttctttaagtgggtgtgtgtgtgcaggggattcacgacttaacccttgcctggcctggccctaggtcctgtttataattggtacctgattgccacaaaaagcctgctttgtcagtcttgtggtctctgttttaacgttaatgctggtcaatggttgtatctaaactgtaaaagagagggtgtataaagagacatgtccaacctcctatccctttatggtcgagacctcagtttttaagtttctctgaggtccccttggccaagagggggtccatttagtcagtcatggggtttagggtttgatttttagcttacactctaatgaagtatgaagggaagagcagaggaggaaatggctggaagcccagagaccagttagaaagccctgtgttaatccaggtgagaacaggtagtacccaaattagggcatggtagcagggatgcagaggaaagaagaggagtaggaactatttgggaggtagtattactaggattttagctttgaagggttgagagaaatgtcaagcctaactacaagcaaggtttctagtatcagtaacttcatatcatttgaaatacaaaaattagcaatcaatgtaaaaaacgtcctgggctaagcatagcrtgaagtctgacttcagtgtagcattgaggagggtcctggcctcagatactgcaccagttgtttgttcagctctgggcaagaacattagtcagatcattaggtatttttgtccctttctgcattgtccttcgtcatatatttattaaacacctactgtatcctaggcagyatttcccagggatgcaaagatgaattagatctggttgcttttcttcagagtctgaagttaagtgtcaggtttgtggggaaggttattcttgccttgtgtattttgtcccaacttaagctataatttttgaatttgtaaaaccttatactgtttagaaaaaaaaaaaacacagtaaaaaaaaaaaggatgggtgaatgcataaatttagtttttgaaaatttaagcgactgtttctccaaaatgtcacttttcatccccagtttgccttttgtctsaaatgcaccagtgaagcaatcaagaagaagaattgattaattttgtgctgtatgcctttcagttctgtattttgtttgtgcttcaaactgtgacagttgaaatttcatggtaaaaaagaaaacggttttgaatttgggatatagagaaaaatgactaaattaaaggaagcagataagaacactactgctgtccaagtgaggttctatccaacgaggaagggaaacaactggggttgtaattttgaaatgatcgacatggtttatactcaaaagttctgtgtaagagaagagtaagagtgatcacttggggtttttagtatcactgaaattagccaggtgaacgaaattgcagtgtaagcagtggtttcccgggttcttttatkgggcatttaaagataattttagaaatctgttgtttttgggtgcaatttagacttggattataacctctgttaaaactctctctggttatgtatgttgtgtactggttttcttgccctagacactaacctccaattatttggatatgtgtagagtattagtttgctttgaattccaaaaatgaagttaatgaattcgagcttttgcttttgacaactattgaaatatggtatttccacgttgaattggaaggatttgggccatttaggtgttagacatttttctcagtgttattggtgagaatgggctctggaatccatctgcaagtcccattctttctgactcttctctcttaatagcttaccaggaaattcaaagggaagcatccctcacgacaggtgggagccccctgtgcatttggatttagcagggtattagggcttctgggacaaagtatccagattctgttttctcctttgtgttctttgttatcacgtgtggcctctacctcctgtgtgttatggcagcattattattatcagctggaatgcatatacaaccttatgaagagactgtgaaccaagttttctgtggagtagcagggcagctttaggtatgtttgctactgcagtgaaaaaggagaaacgtgttttgtttcagtttgmctgcctaggctgcaygttaagatcccaaagaatgaataggactgcgattacagatttaaagtttgcttgtatcctgaaaacttgcccagattaatatatttctgaaatgtacattgtcagacccgctttcctcatctaggtcggcagaaatgcctaggttcttttttttttttttttgagacagggtcttacttgttgcccaggctggagtgcagtgcatgatcacggctcattgcagccttgacctcccaggctcaagtgatcctcccacctcaacctcctgagtagctgggactggaggcacattccaccatgtctggctaattttgttttattttatttatttatttatttatttatttatttatttatttatttaagaaacagcattttgccacgttgcccaggctggtctcaaactccygtgctcaggagatcctccctccttygcctcccaaagtgctgggattacaggcgtcagccacagcacccggccagaaatacctaggatcttaacatcaccaaatagcctctgagaagctcaatattatgctgactagatattgagggacctggaggtggagagcagtggagtgttctggtcctggagaactcactgccaagactctgggggcctatccagtcaacacggtgttgccattctccaaggaactgtgtcagactgtgtggccttttggrcagtgattagaaaagaagacagcacagttgagtagaatgctattgatgttcttggcaacaattagtcatatttaaggacagctagggggaataactctgcttagaatgtgttctcatattttctaagtgtgattttgaaaattcatyaagttacttgcaaaccagttggttcagggcagttcttgttgagtggtgtcctgtgtgttagccgtaataacttattgacatcctatcacttgggtcattatgggtgtccaggtgagatatggagagcactgcgtaaaagtccataggcaattaaggtgcaaagggctggttataattccatcactttatgatgacgtggcattcattgtgaacatatttacttcattgcctggtctgttggaattttatygaactgacatcataatctcatttcctactaaagaggctaagaaatacagcccttggtatttgctttaacctgcaacaaattaaaagttaagcataatcaagtctgtcagtccttaacaatcccaagtacatgttttgcacattatgttttgaatgagaatgtaaggcagatgagctccttatattcttacagcaatctttccagattgtcttcatggcaagtcacacaactgtcagttctgatrcagttcttgtgacttgttttcaacctattgtgcatggacctcaggtttagtgaattcagtattacattgaacagcaatattatttaccatgtgataaactatgtgatataccatgtgcaatgrcgcctgcttcattttcgtgtattggatgttaaatttttcacagtgttgaatatcacagctctgtattccttttctgtatccgtgcttttattgctttgatatgattcctaaatggcactgagttatgctttttctgtgtttcttgatgttctgacctgtgtcctgatttggsgatgggggcaggtggcagctatcttcatgtatcttgtaactattcccttacccataaagacattggacattttcttgctcactcttttctttactaactgtagtttaaggatgacttctcttgaaaataccaaacggcagaattaccaaatgaagtaaggcttccgttctctcaagagcaggaatctgtttacaaacctgcagtatttattacatacctcatttagcccattcatcattttaatagaaaaatgagtcattttagatgattctgaaataattcgaggtaagctacattgctgcaggcagaatatgatttacacagatagcaccatgctattttgaaaaaaatacagtggaatgatcagcaccaataatttatgattacttgtggtaaacttatcaaatgtcttcattgtcatagaaatttgttgattagataaagcatttagagttttctagctagcttttcccccttcttccatcttttatgacaaatgattacaaagttccatacttaccctctgcctgtttcaaacactgactgtaaatttaattccagatttgtttttaatattttcttgataagaaataacactagtcactgtcatgggccaattttattggagatgataaaacctactcatatacattttctgcttagaaattaaacttcatccatttacagtttctttagcccagtgtatgcacatattttaaatcctatcttacctatccataggttacatatttgactctcaggaacacaggtaactcattgcctggaaccatagctctgagccccaaaggcatcacaaagtgattctagttagtgtcttgaagcttatgagctttgctgataagcagcatcacagtaaaagcaatatttgtttttagatttagttttttttttttttcatttaactaaragccttcaactgtactatcttcttgggtgtttgatatgggcaggacatctatcattgattcctattagagatgataaagcaaacattcaaagagactgtgaaactaaatgttgcacagagatagagccagggttacaactctgatcttctgtgccgaggtgatcttattttgggcacaatttagcaaatttagttttgttgttgttctttgtttttaacgtgtaatggatttgatttattacattagaaagggaaatggacttttaggcacgtggtcaaagcagaaattactgcagctaagagtagaaagggcaactaatcgccatgcatgtgatgcacactcacaggaagtaaaacacacacacacacacacacacacacacacataaaacccatagcattatgagcctacttagcatagaggcaggcagccgtaactactcgaataggccttgtgtgttcttgcttagtgaaataatgtatgcacaatcataatgctatcagggattgagaataatttgtttaccagcgtgggtgagaaatattagcactaccatttccatmgaaaccattttgcatttaaaaagttctggcatgtcaaactgtaaatttcagtatttaaaaacattctcttatgtgaatccctgtattgcaaaagatactggtcaaaggaagtgctatttgtacactttcgtcaagtcatttttgaattttcttatttaaagaaagtttgccatggcctgtcatactttgggagaagtggttgatatagacacaaaaggacctggtttgtagcaattatccattcccttggcctcaaaggaatactagtatataaaggcagaaactttctctttttcttttgagactgagtctcaccctgttgtctaggctggagtgcagtggcgtgatcttggctcactgcaaccttccgcctcccgggttcaagtgattctcctgcctcagcctcctgattaactgggattacaggtgcacgcctccatgcccggctaatttttgtatttttagtagagacggggtttcaccatgttggtcaggctagtcttgaactcctgaccttgtgatctgcccgcctcggcctcccaaagtgctgggattacaggcatgagccactgtgcccggcctactcttttttatgtctaacataaagtcttcatttgtgcgggaggtaagagatgattcaattatttttgtcactttgaataataaagaagcattaatctgggagaatgcttgttgagagtagaggtgggcttgctgcaatagagtatttttaggaataaccgtgatatacattagcagtgtctactcgtagtgaattcagtcacttttgtattttcattgaattttatgagaaatttaaaggaagatattctacagtttgtttgtaaagccaagctctgaatagagtttgaaaaactatgccattgaccattttggagatttgttaagtttaaacaaacaaaaaaggaaacaaaaaattggggatgtagttgtataattgttaatgtatttttcaattatactttccacttccaagaataattatctcaacagcaggttaactaatgtattaaaaattagtttatttccaaaaaataagctcttttctcatagctctgatagaatgataggaaagagctggtaactgattttactgtatgtctactattgcaaaaactaacaactgagtattaacattgctagattatgtgtgtgtgtgtgtgtgtgtgtgtataatcgtttgtgttgcatagggtaaaggtagagacactaggaaattacaatttttttttttttttgagatggagtctyactgtatcgcccaggctggaatgcagtggtgcagtytccgctcactgcaagctccacctcctgggttcactccattctgcctcagcctcgcgagtagctgggactacaggcgcccattaccatgcctggctaatttttttgtatttttagtagagacggagtttcaccgtgttagccaggatggtctcgatctcccgacctcgtgatccgcccgccttggcctcccaaagtgctgggattataggcgtgagccacagtgcctggcaaaaaaaaaaaaaaaaaaaaaaaaaaaattacaattttaaaattcctttcttaaactttttactttgaaatatttttagcttacggtaaagttgtaagaatagtacaaagagcttgactctgattcatctgtttttaggcatttaccacactttatcattctatttctgcctacatatattatatatatatatatwtttttttttatttgggggaggggatcaattgagcatgggtagaagacatgctcatttacctcttaatacttctgcctcttagaaatcagtgtttcttacataatcaagtatagttgtcaaaatcaataaatttaacattgatgactattgtaatatttagcccaggtttcaattttgtcaattttctcaataatattctttatagcaactgttcctctggatacaggatgtattctaggatcatatattggcaactattatagttgatgtgtcttaaaattccatattaaacataatttgcaaacagtagtattaagatgaatacttttaacttcaatttatgagttactgctgtcattgctagagttttagtaagaagaaagtggaatgggcaaaaaagaggtgaagaatttcattcagacctatagattaatattctatattgtgggtgarttgaggaaaaaccattgttttggaaattttcttttcatgaactaaaaatgctttcagcatctgtatagatcccgtatcttcaaaatgcagcaggcatccaacttgcatcattaaaaactgttagagaataaactcttcctattttttgacaatttttgaacaataatttcatctgaaatagccttctctctgtccctctgcccttcccgtccaggtacaactccatgtaattttaggcaaattgcttccttttctttatgccctttgtttccgtctttttaaaatgaggacaaggtcgttaatgtagttctctttcaagtctcttaccttgatgaataaatatctaaatataggagttcttacagaattcgaagttctatatacgtataaattgagtttttataaagtaattttgttttatgaataggttaccaattccaagagtcacatttattttaattttctttggttattaaaaaagtccattttagaaaaagaaaaactgttaaagttgaaagcctctattttcttggctaaattggaattttgttattgattacttattctgattagtaaaagtggtttagtcacaggccgggcataaatgcttttagacagtcactgaattgaaagtgtcaacatgagagagggatccttttcttggaaatgggagcatgggatctttctgctaatacgtgtttgttggcttagaatgaagactcagagctttgttaggaaaataaacttaaattggcaacatggtgagtgtgaacctggagggcattatgctaagtgaaataaatgagatacagaaaaacaaacactgtatgttctcacttatatgtggaatctagaaaagttgaactcacagaagcaaagaatagaaaggtggttgccagaggcaggggactgggagaagtggggagatttggttaaagggtacaaagtttcagttataagatagatgaataagttctgtggatcgaaggtacagcattgtaactatagttctacagtatttttaataatactctattgtatacttgaaatttgccaagggaatggatcttaaatgttcttaaccgcacgcatgcattgtgtgcgwgcacacgcacaggtgtgagatgatagatgtgttaattaacttgattgtggtagtcattttatattgtatatgtatatataaagtcatcatgctgcatacctaaaacatatgtaatttttacttgtcagttacacmccagtaaaactggggaaaaataaagaaccggtgggaaaaaataattaagtgacccaaatttttgtatcatagtggatgaaacccctttgctgtctctaagcttaaacaaagattcatcttttcgaatggttgcttattttccatttctttcttcaactcattaaaacttaatatatttgtgggacagggtctttctctgttacccaggctggagtacagtggtgcaatcatagctcactgtagcctcgacctcctgggctcaagtgatcctcctgcttcagcctcccaaacagctgggattacaggtgtgtactaccacacctggctaatttattttttatcttttgtagagatgaggtctcactatgatgtctaggctgattttgaactcgtgggctcaatcgagcctcctttctaggcctcccaaagtgctgggatgacaggtgtgagaygctgcatcctgagcccctttttttgtttgttttttgttttggcgatagagtctgtcacacaggctggagtgcagtggcaccatatttgctcactgctacctccgcttctggtgttcaagcaattcttgtgctgcctcctgagtagctgggactatggatgcatgccaccatacctggtgaattttttgtatttttagtagagatggggtttcaccatgttggccaggctggtcttgaactcctgacctcagtgttctgcatgccttggcttcccaaagtgctaggattacaggcatgagccaccatgcctggccccatttgttaatttttaatgtgaccattagatcttctgttttgctaatttctgacgttgtttttctcctttctaaacacctccttgctccatgttgaattttaagcatatggacagtggcatcattagaaagtttcccatcattccctgtcatgcacaggtgatagaagaatgtattggtgcttcaaactgattattactttttacctccttgatgaactcaatatattattamgagagtggctcagtttcaaccctggaggcatcaaaaagaacaagttctaaataacatcctcctttagaatgcagcatattttaactgtgtctctccatcttgcacatcaccacttccaagctccatctctaactgtacatatgctctctgtgtgtatgataatactgctttccccgtcctctcttctcctctctcctctctttgaatatttttttttttgtgagccttaggaacatgtacactggtcccgtagagtgacacaacaaaagcaggctcttggtgtagtcaggttttgtccttgtaaatgacatggtacaartgcatgcggtggattaaaatatgttcaccctgacagaaatcttttagttgaagtgaaaaagcctccgtcaattctgattgcaacaaaggttgctgctgcgagtgagagggacttgccaagactgcaagtttttcaagctctattctggagatacgtttgttacttggttctcagctttgacttggttataatcttgtcttggcttgttctctttccagaatacactasttttcatttttctttggccttttctcaagatttatgaaagggggtatttagctttttgtctggcaaatagcaaaggctgtttgagttccctaatcaataattgtaaaataactagaaattgatctatgccagctgtaaacccatgcatgcatttattttttctttttctttttctttyttttttttttttttgagacggagttttgctctgtcgcccaggctggagtacagtggcacgatctcggctcactgcaacctctgtctccagggttcaagtgattctcccacctcaacctcctgagtagctgggattacaggtgcctgccaccatgccttgctaatttttgtattttcatcggagacagagtttcaccatgttggccgggctggtcttgaactcctgacctcaaatgatgtacccacctcagcctcccaaagtgttgggattataggcgtgagccaccatgcccagccccatccatgcatttctattaatgtctgctatccttgagaaactgtacataaaacatttttgtccccacatcactgaagataggacagaagcaagtgacagtcagacaactgtgtattaagggtatgctcttacagtgctcacagtttgatatatggctgtggggctgtttctctagatttgtaatacatactttgcaggtgaaagtttctggaatgtgagtatagcctcatttgggagttagagctcatttgggagttaggtgtaggtagaataacattgtgatttgaggctactgccaggttatgccttttcaaaaatagacttttcactcatttrgcatggcctcccctttcttctctrtttggcctgaaattcttaatttccctctctctcaagatagaattaagggcaagtgtgctggaagtgtttaatttggcargaccaccattgatagacacatatgttgcccgggcaaaaaagatgctggttaatatttggatgagaagggtacatgttttcttcctctcccagttgtggtgatacctgtcagtttgtcagatactattttgctaccttgtcactgtggaaatttcataagacctaagcttccaactggccagggcactgttattttgggaggacttacctgtgctcacagattatagtaagacacttattcttaaataacttagaagtaagagagaaatagtggtcttgggataaagcttgaaatgtactgagtggcttcagaacaagaatggcctgttgccgatggactatattaatacatctaaggaaaagatgtgccaatctttatttttcagtctttaaaacatggttttaaataaaaaccaagtaacaaatgtatctccagagtatttaatatcatgagacatgtttacagtgtgctgtttaatagaataaaaatcatgatactctttaatacctgtacatctccatggatggaaaccttcatagtaagattgttttttcttttccttttttttctcatacttctattttttttattatcacagcaaggtgtgagaatttttttcttatacttgaaaaatgcttttctgtgattgctaaagtctctgaaatgagtaagtattaatttacaaaatacatttcagccattaattattatttagaaaagaatacatgtatagaaagaaagaagagattgtaaaagaccagcaatggttgtgttcttctcctctgccctggtgtaacaactctggcccttgtaggtctctgccttttgtggagatgtttataataagccctcttagcctcatgcccgtcatacattcaggccgtaaagcttatcaaatagccatcctgttatgatttagctttccaggtacttggtctgcagaaagagtatatcttagcaggaggtcccacatatgtgttcttttggccagattttattttattttaaagcaataatttggcccattggttgattcgtaagtctgtgtaaatttctcagcctgttgacaaactagtcttccaaatgtgcaatactaagttcatccagagtaattctttaccttttgataggtggcctgaagttgtttctagtaatagctcctgtaccacgtgccaactgggcttttcattttcaaaagtttattgaagaaagaaaattgagggctgggcacagtggctcacgtctgtaatcccagcactttgggaggctgaggtgggtggatcacctgaggtcagaagcttgagacagcctgaccaacatggcgaaaccccatctctactaaaaatacaaaaattagccaggtgcggtggcgcagcctgtaatcccagctactcggaggctgaggcaggagaatcgcttgaactcaggaagcagaggttgcagtgagctgagatcgtggcactgcactgcagcctgggtgacagagtgagactctgtctcaaaaaaaaagaaaaaaagaaacttaagaagggtgtgccccagagggtgtgtgccccgggatgcccagtgaggtgagaccctcatcagattggagtggcgcagccatttcccagtttggccccaccattgtattgctattttagggccctagctcctactttcccttttattggacccttttctgggcacctttcgagtagatggggtcaacttaccttgcacaatcactgtacttctttttagaccttgaagaaatcttagtaatcaccctatctaatctctaccttttcttcatgaagaaagaggcccaggggttttgggaataaaccgaaagagtcagaaccagcctccaggtctccaggttccctgtctagggtatatttcagtctttgtggtggttttcagagaggctctcaggattgctgaacagagaacaagaaggcagggatctttctgcacatttgggctggcttgggattagcagttacactgagggtggggaagctctctccctctgctgggtaagccagacacacagagggcatttggggtagatcgctcttcagaagaggcatggagatgtatatttgtttttgtattctctcctgttttctgcctaatatgttgcagttttcttagcagcccttcccaccatttacctaactcctcagcctaagtggctgggcaaagattaatgtcataacttcctagatagtgaaactggtgtcttatgctgtaatctctcttgaatgatgaggaaaaggcctagactatcagttatcttcaagacgactgttacaatgagtgagatagtgagtaaatatctgtagcctctgtgtgttcttacttgaaacaaagaggcagaaatatggtcactgaatacagagaatgatgatcattgatagacctcattctgtgattataatgacattatattgtacttatgtggaattataataaagcttttacaatttataacwtgacttgcctgtcataaccaatgcccattgttttagcaagagtggactttttcttctcgctcttctttatgtctgtactgatgtgtgtttgtgtatgtatttgacttacatttccattgattgaagaattatttgtatagggcctactatatgctaggcattgtggtctatatgctgggtatacatcaaaatatatgtataaaaaatctttgccttaatagagcttacgtttcagtaagaggaattggtgtacaccatgcttgatagattttaagaaattggcttatgtgattgttgggactgtcaagtctgtaatcttcagggcaggccaacaggcttcagattcagggaagccttaatgttgcagtcttgtgtctgaatgcaatctggaggtagaattccctcttccttagagaacctcagcctttctctcttatggattcaactgactggatgaagcctgacaaagattctcttttttgagcaaaactttagtcaggctctgttaaatcctttctgaatagactgatcttaggtttccctcttgtagaatccactttgagcaagaatcccgctaagtcagttttcggaaaatcccccacccttgttatctgaccaccctggatattatcaccctggcattggcttcagcaatgatcctattcagtcagctccttatccttgatgtttcctcttgatacttttctattcgctgatcccccaccttgctccttggttataaatctctgctcttccttgttagaatcagaattgagccaatctcttcccctcactccaagacctcattgcattagttcctccacctattgccatgggccctcttgaataaagtctgctctgccgtcttaacaagtatgatgaacaactttttctttaacaggcccatccacattataaaaggtaatgttttattcaaagtctgaagatttaaatgttaatcacattaaaaaaaaaaaacaaaaaaccccaaaaaacaaacaaacaaaaaaccccagctagactggtgtttgaccaaacatctggatatcgtagtctagttgatggacattaaattaactgtgaaagcaattgcctccactttctagatgaaaaaaactaacaagtactttttgccctgcattgcaaatgatgtagaaagctaggcaatcatgttcgtaatatgcacaccaatggctgtagagtgtagaggtgtttgctttgttcacgaccatggttgtgggtcttttctgcataggtagggaagaacaatagttgattgaggaatgtcttccagcccaccccgcacacacacacacacacacacacacacacacacacacacacacamacacacmccctctgagggaaaaagcctcctttctaccttgacgttgttggtgatgtgccctgccacacagtgtgatagtttgggaccctatgacttccctgggctaaggcccatttagagaagggcctacgctgactcttccccagttgcagttaccgtttttgatggcttcccactttgcaattccttgatgtttttgctcagagaggaaacccatctctgcggtacatggtatggcctccatttttgaggaattttgtggargacaaggtcatggagcttgagacacatgcagtctgtgatcaggcttatgctttatctgagtaggaccacaatgagcctccgtcagggcaagctgtatggaygtctagaggtacaggcagatggcgagggacgtcgagtgcatacagaatggagatatctgctctacttggcccctcagtgggactgctgctgtcctggtggcttttctgggcaggattttgtggaatgttgggaattgtaccmtctgaggaattgggcctgctgctgtgggctccccttgtctctgaacattgtagagtccgtcttttgttgagatgctgaagacagcccaggttgagggctgtggtggccccatgttggcattgtcacatgccttcacctctcaaccactgctccaaaatttgtctctggatggttgcctgaggataatccctgaccctgtgtccacaaaggacgtgggttctgccagccctgacagyttcttccacattctcctaaactgtcaggccagcaaaatgtctagtgtcgtggccatgagcttcctcttgtaacagagccatgtaatcagacataggtgacaaaatgttgccatgcctcgattcattcagtagaatagcagcccatgggttttgtgctcctctgcaccaggtgctgtgtcaggagatagggacacaagatggagcagaatccttgctctcaagaagcttagagtggctgccatatacaccagagcaaggcggacccccatgtgccttggaagcacatggcaggcctgctgctgccctaaccctcctgcctrwccctctgcctgggacatcctcccctgctttctaccacacctctcagccctcttttaaactttgcctttcatttcatcccatagcataaatatctcattcttcaagaagccttcctgatttcctaacacagaaatgatcacaatcttctccatatttccaaactcttttatgactcttttatggctagggcaacccgataatttatcatccaaactgggaaagtgaaaggaggcactgttaattatacggagacaacacacataaactgggatgctccaggcaaaccaagacgtatggtcaccctacttatgacctttactcctgtttgagtaaaatacagtctgttcaagtatggccatgttcaaatgtgaagtccgtccttggggtgggagaggcagaagttatttatacttgcatttccatactgggatttacatgcaacaggagctcactaacacttcctgaatggaatttatgcagttcaccatacatgtcctaagttgagcagacctgctgggacctccaggatagctggcagggagaagagaatcagtctgaataggcagagctggggtcagggaggctcagctgtggactggctcctttgagttgtccagtagtccagtcttggtataatggcaatttggtcccatgctgggctgcatttggtcaacctaaggtcagatctgttctgttatgtgagcatgaagtcaggatgtccctcagggcagtctggaaggtggtggagctgtggttcctgagtagacataggagcctcgttgtggggagaaatagagcctccccgaaggtagacaggtgacaggctctgtttctccatgctgtggctggcaccttcagagtcttcattacatctcaatacctcctgccaatatattaaattcacagcattggagaaggttataatcacttagtaaggccgcggaaagttacgtggagtgaaggactctataaggctcattttatagactagctatcactgaggaatttccttgatggatgacattagttcatggacttttacatataaatgaaggacttgccgtttaaacagtcctttcactggccagagtaggcagctattggcataatgaagtgaggtattgaatataatattgagtttattaccacatggttctgaaataagtaaataatggatacatttatttctactttatagatggctgtgagagacctctttagaacacttcaaaggtcttttgaaaagtgcagtattttactgccaccttccctgttgtcataattctttagtgccttgrggccaactcccattggaaaggtggacacttaaaatccttttgtaggtaatgagcatttggttttactgcagccaataatttggactccagtggaaagctgttagtacaaacttttgagcctacaatactataacactttttatcagacacgtatgatcagctaactctatatggcctatgtttatagtatttggtatgaaagtgaactgctcatctctctattcaagactggcttgagtactttcctttctttagttaaaataactcaggcttgatattagttccttagacaagattgtttactatttgattctttcatacacttcttgtccttcactggctcttatgaaatctgtagccaacttttaaagttgcgaattttgtgccaacctcattttctccatcaattgtggatgcaggtggaaaagaaagagctgtgcagttctagcatcgagaggctcaagtctggccggtcattaaagtccctctgccaaacaattagagagtataaatgccccagtggattcagacttacagggtgggacctaggcatgtgtatttttaaaatacaccattctaatgcttaaccctcgatgtgaaaaatggattaaggacatgaaagaggcaagatgtcattctcctcttgctgctggttggcagcccagtagttgggttggctttggtcttgcctagcaaacctgctggtcagtgccaaggcctctgtgcccatatgcactttcaagcttcctccacattgtatgacagtgaaatctgtattaagcatgtatgtagcagtcatgctcttcatgtttttaaggaaaatatttctactcatctttcctcttgggcctctcccttgatgccacctccttcctattaggtcttagagaagagagcactggctttagagacaaaagacatgatttatgggctcttcaactaatgagcttgtgatgtttagctagtcacctcacttacctgagcttcagtttcctctcctctgaaatcaagatggcattttcatcatagctttcttggtaggatcaaatgaggcaatgtattaatataagcaagcactttgtaaaactgcaaattctatatttcttaataaatatatttttgatatccagtcctatagcttagcgacagggatatgttctgggaaatgcatcattaggcaattttgttgttgtgtcaacatcatataatgtacttacacaaacctagatggtatatcctactacataccctacatacctaggctatatggtataaccatgcacagtcaccgttcagtatgcagtctgtcactgaccaaagtgtagttatakggcttcgtatatgtgtttcccacagtggctggatcagtgcacctcatccaaatggttgatcaacaaatattcccaacaggttatagaaagaagrttctcagagtaatgatgtgtttctattgcttctttctaaatacttcccttctccttgcacccctccctgtaaagccagggactctatttcttgattcattcctaggaaataggatttcttttgcctacagttagtatctagttttggagacccactagttgatgtgtggagtttcctccttggccttttcaacagtttaattctgatcacgttcttaaaacaatatttcactacttctgattttcctaattatcatgcagacaaacagtgggggatcatgacattagaattagtgagtggcttatgatttttgcctcagaaagagaaactcttgctgtttttctctccccttgagcaacacagcagtaatgaatgagcaggtccggagtactttatgatagatggttaagggtgctgtgcctcagccaacaggcctgtttccctagcatctgtcacaattcagagtcattagcatacctttaatggtttcttttcaaaataatttctactagggcatttagaatgcatcarggaaaaatattgagttgtagagatgaggaattttaaatgtagacaaatggttttcattcccttggatgtaattttgataaaatcaagaaaccacatagcaacctactatggagtataacataattcacagcatttaatgtgctatctgggaattactttttcaggctttctaaaatagttaatgaaaaaaaaccttctttaaaaaataacaaatttaatgtaaaaaaatgtttaaagttgctgtttgccagcacccttaactccacaacagtcttcctcctggtgtgtgtggatggcccgttggctgtcttacatactctgtcttatgatcaatcagggaatcaatgtgatttgcatcttataagatgacaaatgttttgtaaggtatatgccatttttactagtactggtaaatattaggctcgttatttatttagttgtgagggggagatcttcagagaagcaaattaagccacatctttttcctaaaatgtcaaagttgagtgagataaggtctctattagattttttataatgcatttactctattttggactggggggtacactgtacatgtttgttatgtgggtatattgcatgatgctgaggtttagcatgtagtcgatcccgtcacccaggtagtgaatgtagtacccaatagttagtttttcactatgacttatttctttaaaaaagccaaatgacctctttacttttgaaacatgcaaatcaatgtatacttttctcacagttatttgaataatagttatatttactaaggatgcwcttttttaatatctactgatatattttttcatatttaatgttttacaacagaattatgaagagggcagaacacaaagtatcccatattcctaaacacaaytgagaacctcctggaggaaagctgatgtggtcaggtttatacagctgaccattggaarggccagagcttctaacttgtgtctactttttgtgtctaractagccattctgtgctactctacaatgatctttgtagccttaccaatattataattttcatactgcactcctaactcctttgtgaagaggtggtatttttttctatatttttttcttggtgattagraagcaaataatttgattttcacaagtcttaagacatattttattaactttagggtctgaatattggtttctcttatttgtttgaaatactgacactatatgagggcatttattctttgctaggtgtgttacttttaaaaattattgggttgtttaaaattcagaatctgttcattgaattgaagaaaagtatttttccatttccagagtacatctcgtacatttttgcattctggaacaattactgttatgctacttaggcaaataaacataggctcattagaagatggaacttgtgattttaaacttcattagtatgtatttttgttcatttctcatccacagggtccaagaaagctcagtatcttcttgttccgggcagtgggattgagtaggggagcaggaaataggcgtttgtcctctctcttttaagatgagtcctgggaggcgtgcttgtcactttccttcacattctgttggtcagtactcagttgcccatacatatccagcatcaagggaagctaggaaatatcttgtttttccctaggatgatatgagccatgcaaaaattcagaggccctgttatagatagatatatgaagagttagtatctgccacagttatatggtcttcaaaaatgatatttgagctttctgatgcaaagccaattttcaaaactatttagatatttaacatttcttgacaactcctttgcgattgtaaatcacattgacgttttgattatatgtattcatttgaaagcactaaatactattattttcctagttattgtggtgctaaagagttgtcagtaaaatctagaatctttaaataaattttgaaaagggatgacggaccaaatggaattctaattacttgatttcaacacatttctctttcatttgaatcttttaagagaaaagtgaaaagcaacattatccttgagaatttctctctcagcatctaagcagccgttttaattacagaaaatgtcttcaaaatctgttttgccattttaaagttttggctgtgaaaaagtcaattgtcagtgtgtaatggtggaaaaaatatcttaaaaagccattgatatagtatgttcagtagacatgtgttacttgaacactagtagttgattttccatagaaactttttcctcttgagtttgggtatcgttgttggtaataaacatccctgcagaactgactgcgatttcacatgaattgtttaaaaataaaccaaaattacacattatatattccctctcccaaaggaatctccttgggaagctgttacgttttctactatagctgcccttatcgaagtttcgrtcctaccctcccttctccttctccgtccctcactcttccaccattttcttcccctctttcttttctttctgtctatcaagagttgcatgaaaaagcacatctctttgaccagcctccaaggtgataaatcttcatcagctgagaataaatttgatttttggaaacagccagcagtcagagtcaaggtcagtgggtaataaaactatagtaacattttgagttagagatggggagtgactgtaaagtagtgagcccatttttcttgagtttttggaaggcaaagaaggaaatcccaaaacaggaaatctcagtttatkgtgtatatttgttaaaaacaaaagaaaacaaaacaaaaaactagtcttgtttgataatgacattgcaagttttgtatattatttatttatttttgtatttgtgactttttccccccaatggttgtgtctttcaactgactgtgggatccttgtcacacttttattttatgttgataatccttttggcattttaaatgatatctgtatgtcatattgaaatacagtaattaaagtggcacaacataggaggaaatcaaatttcatttaatgtttaattacataaattgactacctgatagatttttttttaaatttggagtttaacatttgaaaattggcaggaaggttttaatgcttgttttaaacatagtcatcatctagatctgtactatcaaatgcaatgatattacttattataacattatcaaatgttatatgtagtgccatcaatttatattgttttcaaagtgtaacttttaaaaatagagatattcagcagttatactaaacatttgagtctttcaatgtctgttaaatgtaaaacttgatatttattaaaagagaattttaaacttagaaaaacagtggttttcatttctgtatttcctttgaatttgtttggtatctcattttttcaggctataatttagaaactttttattttacatgcttactggccatcagaagagttttttttctttactccaacttcatgtgtaaagttttaaaataaagtgaagatgttagtgaatttgttttgaaaggaaggaaggaaaagaaattagtacaaaagctaaataggtatgcttagatattgagataaagtgcctcctgtttctggttatttctactacatggcttatttcattcaatttttgtttaataaaattatgccttcaactaygataataataaatttaaagcattaacagtagtgattagctaattataagaaagttattttattaagatatctaattgtctacttgctttaaaaataaccatttattttccgtaaaaagcagtaatcttcattagattttctagtatctgtcttgtaaataagtactcattggtccactttttgagaaagaggaaaggtttataactgtttagcagaaaagtatggtggtttgtgtacattttctggtagaagagacaactgtcgaagctcagcagcttggcaaatgttttagggtggtataaaagttactgtggatttgaacattaagaaacaataagaataaatataaaatttagatatttcttctgattaaaaacattatctaaatacattgtaatataattcgctcatttattcatccattcatttggtaaactatcacatatttcagggtataatctcagtaataaagatgcaagtttgcataaaaatagaatccatcactgtggagctcagtctgatatataccaggttttactccatatttataaaattataaaccratatatttatactctaattaaaaatggaatatatttttataaaattagactaggagactcatcatttttggatataaatttttggagttaattcttartgacctgtaacaataaaagttkaatgtttgccattccctactgagtggagctccaaatgacatgaaattccagttttaactcagatcttgagcaaactgagcaacaccatagaggagctcttctcagttatgttcctgccctagtagtttaaaactggctgatttttattctatagtatttatagagtacctactatggaccaggcactgcttggtgcttatttttatatatcaggtacatttcaaaggtattaaaataattttgaatttttcactgttctctttctctttctctctgtctgtatataacagtgagaaatgtgtgtacattatatgtatatgtgtgtgtatacacacacacacacacacatatataaaggccaagtaaatttttagttaaattgaattattccttaatggttacgtgagaatatcttatcaagtctaaatatagtaatcatcagtatgattttttatgtttgatgtaataagaatgtgtctaattttatgcattttataattattgaatgtatctttggacagtgtgcatacagatagttctggttatcattttcaataaaaatgtttatctgaacttttgtaactctgccctctgaagattatgcttcatagaatttctcatgttcatgagcataattgctaactggtgtttatgtagattgcattgaacaatctttaggaagaaaaaagcacattataccattttcttttcaaatttaattgagaaaatcttgtgagcacctcctgtgtgcctagtgtcaatgcctacattttagttgagcttcaagatttatctaagtatcttagtttttctttttataagttcttttaaaacttttattaaagcaagatgagtgttattaaatgggttgcacaaatgaccactaactcgtagtaatgttaccttatcagcttactctcatatgtgttttcttcagacccctcttttggtcttttccattctcatgcttcctacctatcacttgtaaagaagtttgaggtcatttaatcacatctaaaccattttaacttttaatagacaataggaattcattttggtgcttggcaaccccattgatatgtacttgtgtgaatatgtttatacatatatgtacaatattaaagaaatctcatccattcttttatatttatttaccacaaaaataaagttctggaataccatgccttacttgaaaagcattatttctgagtattttcacatttatttaattaatygttttaatgttaggtagtgctggcttaaggggaacctttttgaaagctgaatttttaaaacaatgaaaacccaagaagtcttcatgatttttaatggcaattttaaaaaagcactctcattaatgtcaggaacagattaaaatatgcattctttatatttttcaggaagtactaaccaatgccgttagacaagagaaaaaagtagaagggaaaacatggaaaggaggaagtaaaatttccattatttttagattgtatacctgcaaaatgaagaaagccagctgacaaacttttataagctgagagaattcagttaggtaactgcctataaagtcaataaagaagttctttatgtactcataagtaacgagaacaaagaaagtttagagtaggctttcattttggaataataattttgtaacatattgacagttatattaaaacaaatgcaaatgtttattatacaaaatgtttattatacaaaaatttgcaccagtagatttgaaaacgtaaaacatccataatcctaccactcctgatgactagtgttaatactkgctgtttgattcctgtttttaccatgcatatatacttctggggagtgtatggataggatggaggaggtacaaatttcggctcatattttactactatttatacatttttttttacaacaatgtaattattttattacaacaatattttttacagcaataaaaatgtaatatttctattatagcaatgtattgtgactatttttttcatattactaatattccagctattcttttaatgtatattttggatatttgaccatttttccatttttggatatttgtggtgttttcttttttttttttctttatccttttttactattcccgacaatgctaaraaraatgtcttcttggctaaatcttagccaatctgcactcctgctctctcagatcactcagccctgctagagtcttgatagmggagcagttggagaatcaagggagatgatgatattaaaaccaacagtactgtgttcctaatttttgggttgccagcagttgtaaggcaccctgtgtcaccaagaagtcagcaattgattggttaaaggggaggatttgagaattgtacattgattgctaaggagcaattaatgacttgatattgatgacttattttctgtttttgataaatttctaaaagcaaatttgctgtttaaagagtatattttaatgttttctttctgtacatgcatgctagtaggagctcatgcccacacagagaaaactttctctcttgaaagtttctatcagtttatattcctaccagcaatatgtggtgggaattacttgcctacttattagcattgggtgttacaagttctgttgttatttatcagtttgaaagtgaggaagatttcacttttatctgtggttcttagatgaagagacagatagtgaaatagagagacatcgccagacatatgtggctaacctgaattgctcattcataactttccttttcagtaatgtcttaacatattttttataagaccccctcattgtttgcatatataagttttacttttagatagtcaaatctgtcagtcttttccttttatagtaactatatgcttagagtggtttgtctccctttaaaatttatttaagtcatcactgctttatttgtacttttgttttcaatttttttactaatgaaattttaattcagtcttgtgtttattttggcatgtggtatctcaccagctttttctaaacagttttgccagtagtagctttttgaataagtaatttatctattctctttagagttgtcttggctattttatattaagttctcatgtagaattaaggctgtttctggtctttgaattctgtccaattggtatatttaccaattcttgaaccagcacaacattattatttattgtatatttacactcaaaaaatatttgtcaaggcaattccccagtcatgactattaattttcaacatttctttgctagtatgatttatctgttcttgaaaacgaacattagtctcttttcattaagcattttaaatactcaagtctctttgttgttctttgtgcatttagatacctttatgcagtatctggaatgtatgtataaattgaaatttttgtgcttctaatatttagatatagtaggtagtttattcatgaaaaggtctatttcttagagtatgcttaagttaagacaaaaaataggatcttttcatgcttattttttatcctttattttttcttctcattgttggcttgggttcctttctctctgtttgcaaccagaccctttattacttgtgcatggttggacatgctgtaagcaatagagacctcytgcagcaaaccagatacctagtggtaggctgcacatgggatgtagcttttcttattaacaaaccacgttagtttattcacctttgaacttattgtagccaactcttcttcatttcattatgaacaaagagaattacttgtgtgctttttcagaggacatttgtgttatatgtttttctccattcatgttttatagatgttgtcayagagcatcttcatgtctgtaataccagtctagatcccatcatattatttttagctcttcaatgtatttcttatggatatcttcttttaatataaaaacacaggagaaacagaaaattcttccaatgtataaagccgcaggattcaataatgtaaaattacagtgggttctgttaraatcttcagagaattgcaattattaacactgagtaattttcttctttcttaacttgtagttgttagagaacaatttagaaaattgatgcttctgtcaaaagtctggatgggtaggatacaygctcagtgtggatatgacaacattaagaactccacaacttttactaactatgaaaaaaagaatatattttatactccattaaactgttacacatcatcaataattacatcaacccgtgttcttgtctgtatcaagggtgataaactagtcactgtagagagtttttctagtgactgtaacagtattcccctttcctcctgcccgtgtgactttctgccccttccctctctccaccgctctttcttattagaagtgtgttgtctcctgaatgtttccagccaatgaatataggcctagaattgtatagggacccagcagggatagttcaggaagtcacgtgacttagagtgatttgytttctagctctactgctttctgaatatattcctttgggcacagtccagtctttgtatctcagttttctcatctttcaaatgagcataggtacttacttcagagaactgttttgagagtttgaagagatatgtgaaagtgctttgaaactgtgatgattatgttaaattcctattgctatggttatttttgacaatgttaatcaggactggcagacccacagacagattccacaggtggacttgggaacccaagagctgttgttgttgatctcccatcccgtcctgtgcttttcagaaatggctccgtgcctccctgactgcactcctgccccatcagatcactcagccatcccaggctcttagcagaggagcagttggagaagcaggggagatgatggtattaaaacccaacggtattgtgttcctcatttttggtgttgccagtaatataaggaacccagtataaccaggaagtggtaaacgtggagggtttgagaattaaacattgactgcaaaggaggataaaaatatcagaaataaggtggtggtgtttgaagtgtcagaatggcatggctgttatggtgggtggctgatggtcttagtgggggtattttgaagaggacaaggaaagccattgttgtgagctgaagtgtgggtccgttgagaagtagggagcacctcagtgtcatgtagctgaggatggcctgaggattatagcatccatgtggggcctaggcagtaactgcacccttgcagggaactaccctgtcatgaagctgtaagatatcaagtgccttgttttaagtattatcttcaaggataactatgaatccaagaactgttatcatcaatatttagctatttcttaacattggatatagtctcaaatttgaggagagaaatgcaaagaactgttgcctcaccataacctttttgttacaattgaacacatagatcataatgctttagtgggtagaattgtgtaagaatgaataaaatcaggcacatataagatcggaaagcatcagttttacagtattttgagaggaaactggccactgagaaagtggcttcttgggttatattggaatttggatcttggatgcagagtccaagatctaagatttcccctggactcttctactaaaaatgaaaactgacagggcgggtggaacaataccttaactcatccactcctgcatggtaataaaacttgttcagtaaagccatgtactttccacctgatgccccatgcctagctttattgacacctgtcaaggatgtctttcttaacaagctcacttatttccacccaagtcaatggaataaactcttagactgaagtgaataatggaggcttgtgattgttagaagccatcacagcagtagtggaaaaaatgactgctgaaagccagacgttgaaggaagagagaaaatataaaaagtagaaactatattaaagtgcttcagtggtgaatattcctaaggacggccatggtttattcctacaacaaaaccaaacccctgaaccgctccaccactttcaatccaattgcctgtaaggatgcagggaatgaaatactctgaggaaagatttcccttacagatggccacaaaatttaatcagggattcacagtgtatcaagggataggccttggttatatagaaaatgcacttaaatggaacaccttatttcccagggatgccagataattgagttatacctaaaatcttgaactgtctgactagcacacatgcatacacatctagcttctgtgtgctgagaggtgttaaatggtttggaaactgtaattaagtagctgaaattgtgctgcagaaccactataagcattgcctcatgtagtatttcaaccttaagtgctaaaatttcatctgagtagctgtgactaatctagtctttatttgtaacacattcaaattaggaggtgtatgttcttgtccaygtactttctcattagcactaatattgctaatgggagtgacaaatgtattatgttttttccttcgatcactcacgccttttagataactagctttttagaggaggtaattttccttgtgatacatttatggagctctgtgtttaacagatttactcaaaagaatatgtccgtagggactgtttattagttgataggctccggggaaaacaagtttggattaatcagtttgaatcacagaagaaattgtgatggcagttagtgtaaatgggaatagcacatactcatttgttcctaaatgtctttccagcattttccgcctagtttatttgaacttggaaggttctttcctaggctgtttactttgacacttgaacacaccctcttcattcttcctttccaaattttcgtttgttcaaaggactccttaatgtttagagagtcactgaacagtgtttggtacagtcataaataacaaagaagatacattctgaaaaatgcatcattgtgtgaatactagagagtgtacttacacaaccctaggtggcatcggctactacacacctaggctaaatagtatagcctgttgctcctaggctacaaacctgtgtagcagattcctgtacttaatacaattataacacaatggtaactctttgtgtatctaaacatatttataaaggtacagtaaaaatatagcataaaagataaaaatggtatacttgtatagggctcttaccatgaatggagcttgcaggactggaggttgctctgggcaagtcagtgagtgatgagtaaacatgaaggcctaggacattgttgtatactattactatagaatttgtaaacattgtatacttaagttatgctaaattaagcttattttaaatattatgctacagtgctgcaacagctatgagttactgtgtgataggaaatgttcaactccattgtaatctgggaccactgtcacacatgtgctccatcgttgaccgagaccagttttatatggagtaactatatttaaaagtgtaaagccatcttcttcttttaaagaatactgatttcattaagggccagtacattcggttattgttttccctccaccttcttagcaggtactgtttccttgtaagagatcaagaatgacactcaccagggatagactacctgctgctaccaagtgtcccctgctcccaaacatgcactcaacttcacacccagtggggtcagtgggttgtgtagacctcgcagccgcatctcctcttggagcactcttctcctcatctccccagggctcagagatctaaacgtcctgggaaccttctcctttcctgtttgcttgttgccggtgtcggggacacactgcaggtttaaagtgtgagcccagtggaggagagctgtcagtttggactgtggcttatggggatagctttcttgcattccaatttccattcgataggcacttttccttagacaatattataaggagtagttagtttacctgggactcctgagttttgatggtgatgtactttagctgtgtattgaattaaataagaacttgcctaggctgcctgtgttgatttccaaaattaaatttcaagtgactctggaaccacccatttccaagttgtgtactgtttcagtcttttcttggtgagttacttaaggtttttaccccagcttttgggaatagatgtattacgtgttcatttgggtgcagaggaaagaatattgactttggaatcaagaaactagactacgaatccttattctcatttgccttactttgagcaagtcatttaacctcaatgagccttagtatttccatctgttaaatagggtatgattcatagctacaatatgtaccacacaacatgattttgagcattatatggtataatgtagatgaaagtgccttgtaagttgttaggaagggatgtaaatgaaagatacaactatgtaatatttaataattagaacaatagctgtgtttggcaggtctctaaaatatcataaattttcataagttgttgaaggcatttgctggggttttaaaattcctgccattttatagaaacacttcatgtattatttttaagtaatacaggtttttaatgaattaattttcttaatggctgtatgtttgtaagtaaaacaccttacagtaataaggtactttgaaaaggaaatgtcttttaacaaatgaaagatcagttcagtctctttatgtagcacaggctgaaataccagccatcatattaaatcttaatcagtaacaaagtttcactaattacaagagctggtttatatattgggtaaattgctgtttgtaaacgttggattatattaactaacactgctaattgccagccacagcctaagtgtaagattttctgaaagcttccattagtagcttgaagtaggcactgctgcctaatatttcagtcagtgaggaaaggcaggtaatgacattatgaatacaattataatgcaggccaatttcttctaaaatgcatggaagtattattactttaccaggagtctttgaaatatgatttatttaatgcattccagcccccataatattaagatataattgagatgtgaagtttaaaaaattgtatgcagtcagtatggtacatgaatcatagactaaattgcttataattttaaaggcacttaggggaattgtgaaatttatataatgcattcttatgtttggaaaaggttataagaacaatagtccagttattttagtatttcagtcccaaaaataggattttttgagttgctattaaacctaagatagctgtatacatgagcaaatccaaatctttctatgtccagttctcattcactactttttgtgagttttttctttaaacctctcatatttatcaaagctgttgagtggtatataatttctataaaggccataatctagtttttataaactgtacaactgaatgaatgacagcaacataaatgttgccagcatgtttaagaagggaatcagttaaatggtacttggaattttgatgattattgctttgaaaagactgaaaatcacaggtcttggctttatagtttaattacttgcttaacaattgctagtgattcactaaatcacaaggcttccaaacaaataacatcagtaactctgctrtgcctgagcaactccaattttcttgacaatggctaccaaactgtgtttagcctaatataaactgttagtttaactgcaagcaatgggggcttcaagcatgctattgatgagatgccagcaaattgagccctttgccactggtgacacttgtgtcaagaataactttagcacgttttatcaagaccagttggagaagcaaatatagtaattatccacatcctttttggatattaggtttaataataatgagtgctgtccagctttccagagtttctaattaataattggttcttaagaacacagcatgtggtttctcacagtttgaataagattgggaaatagggcaagcttaaggtcctgcatacttttatgggcctgatagaaaaggcagtttaaaagaagagcaagttgtaggaagacattcaggtgtgctggtgtgaaaatttaatttgtgcctttattgacctctgctccctgaccttgctgtgtcttaactttgtggcatttccatgagtacactgctcttccttcttgcccttttgcaaccgcaagcttttgatttcaaatggactcttccagaattagatgaatttctcagtttttactttggtagcagctacagtcttttgctcacttgaaaatgatcttatcccctgttctttagtactttatcattgaaataatggaaaataagcatgttagacctgcatttaagaggggacaataatgcctgtcatttatcgggtgcttactcatgccgggcactatactaactccacgtacgttcttaaattgttaaagcatgaggtggttgtattcttgtgcctatgcaatggttagaatgtcccttctaaaactcacatcaaaatttaattgccattgtgagagtgggcctctcagtgcactcgtgaatggattactgctgttatctcaggtgtaggcagttgtccaggcaatggtctcctgatgaaaggataagtttggcccccatcctctctctgttttgtgtgctcacttgctcttctgccttctgccaaaggataatgcagcaagaaactcctcaccaaatgccaagcagatgctggcgccatgcccttggactttgcaacctccagaaccatgagctaaacaaacttcttttctttacaaattacccagtctttggtattctgttacagcagcagaaattgactaaacaccctatgatagaaaggargcttagaaaagtgaagtgatttgtctagagtcaccagtcagtttggctccagactcatgctctgggctactatgccaaaccatctctttagtataaatgtgttttcttagtataaytgtgaacattaccagttcagatataggcactatatgaaatatgacccttcttggtatagatggatatttacaaaaattttaaaattacaacctgcaagaatatattttacatcctgacccagagtacacacagattttaattcatacataggaagtactactacttgtgatttattgttttctgccttcttaaagtttctattttattgtattttcatattaaaaatgctagtgtgatatgctaaaatgatataatagtccaatartaggtagcaacctccagtctgaaaaatcactgagagtcagtgctggccttgtagggttcatgtggctgagcgaaatctgtgttccactagttttacttttgctcatgtgctgcctcaggtacttgtacttctaattttgttagttttctaattttgtgaggccttgaatagttttgccagtaggcatttgtgagtgattggattctgaggcaggattaataattttcctgaggctgtctcttgccatttcatcgtggtcctttgggggtccagtggagtttggattacacgagtatactcagaacttgtctttccagaggcttcctccctttttttataaagctcttttattccaggcatgttcattatggcaactgaaggaaactgaagtacaaaaatattatttctccacttgtatcttttccatattgtgcgggagatagtataagaaatgtgttataaatagaaattgagaagatgcagaatagtctcatctttatcatcttgtaccccttgtcagacctaccaaagtactggctaaaaggctagactaaggttattgccccatgtgtctttgcctagaatgaactagcagtgtaggagcggcatcacctagcgctcttttgaaataaggtgtccatgtcatctcattcagtcctttttgaggaagcaaacatttgttgagtatctactccatgatggccctgtttcaggctctagagttataatggggaatgtgatacacaggccgctgctctcttggagtgtgtattctagtgggaaagacggtcattaaatacgaaagcaactaggtatataactatatatttggtttcagaatcaggtaagcatatgaagaacagcgatgtggggtcagatgatagagaactgtggactgcagcatttccctgcttatctgtgtcccaccccatggattgtgaatttctctaggatatagaaatcctccagagatcctcaatgtgtgagcccaggaccacgataggattttcatttgtgaaaggcctgtaactcagtgagaggatgtttcaaggaatagaaccaaatgcggtgtgtagagcagtagcattggcatcacctggaaacttatcacaagtgggactttccagcccatcttggacctactgaagcagaatctgcaatttaacaagatccccaggtgaatccttaggcaaatcagaagtttgagaagtttgagtagtggttctcagccttggctgctgtagagaaggagagttaggtccagtaagtccctcccagtgaaatgctattcagctaaacctttaatctgccagggtggaaatcatcaggtgccccagctttaytcacttctgcaatacccattaagtttaggctgaaggcaaggcaacttcttctgtacctttgacatccacccacaacccagataggctacctgaaacaagtccttcacccattattattaagaaatcccactggcacactctggtcctgtatgtgtgtccccaggacctggcacattgtctcttcttctgctcagacatgagagcccttttgccagtgggcccctttgcccagggattcttttcacctttcctgtgcctgagtgagtaataaagttttctgttatgtactatcattggatcagatgacatctagttttttaatggtgttttttgttaatcgagtacatttatgagattgggggtacccaagtttgggctaagtcagactatggatcatctttaacagaaatcttggttctcagacatcactcccaaccagtgaaatcagcatctctgcaaattgggacctagtatttttcaaaactctccagtgattccaaagggcagctgagattctagagggaaaatctattttatgttgttagggccatagaacattttagaagagccttatgataaagtctggctgatgttttgcacatagtcattgaaatacatacttctcgtgatgtgtatggcatgctgagcacaccatcagaaatcacgtggccccttcttataaaactatggcagaactgagagcagcagagcagagtaaccagagttaaatttgagtcaccataatgagattaccattagattctgtggaaaatgtgttgcaacaaatatgactcagttgataagtgcaaattgcattttgcccttgatgcaaaataactgttctgtttaacgttcaggatgtttttgcctgttgttttcatctaactcagaacggagtctgcttaacaaatgtatgaaactggtcaagacctcggttttccatctgaatctgaaggtgacccttgtttaaaacttcatactctgggcggtctttttgtgtcagccttgctttttgccattttctttttcagatgacrcaaaacagacaagatcagctgggagcccttcaaagccagctctaaatggaattaaaagaaggtattctgaggcaggaaatagttgttagatgaagggcctcatggggaatgattttgaggtccttagattttatgaagttggataagtcagggctctgagtcatggtttagaagaggagctcaggtggaaaaattgaaaggaggtctcctcaattttgtaggatgtaaaaatgagaaaatttagcaaaaaaggtttatgtgctaataatgagcctgatttgaaatattggccttccagcactttgatatgtgtctatcagtggtctgcctttgacgtgaaggccctgtgtgcggcagcttaacttgtgaatcctcactaaaggggaacagtgggagacggcagcctcagagtgcatgaatggcagtgattggctggcaagttgcgtaggccaataagcagtgccttccagggtaaagacctagggaagcgccttgtttttgctttgtcttagtgtctgcatgtgtttgacaagtgaacaataaaatgtgctgtttgattccacactgtcttgattcttttctgtgtccctcctgcmatctttctttttcatgtcacattacatgaggctcttttcacctctctctcctgaccctgagttctagtgttcattgctctctctcacccaggatgtgctctaattggcaaaactataacctggtagcagcagttcactattttagtttcctaattggtgtcaggggctgctggcagagcccggccatgttggattgattgatagatcagctgctgtgagtgtcaggcttccatctgaccaacaggtttattgcttttgaaacttaaaaattaatatggtaaatatatcctgcagtgtccatagtgggtctgaaaaaaaataaactattyatcattcaggagcacttccaatgttacctgaaggtcccttgggtttgcaactcaaaattttgttctatttctgactcacagctggctgttttcttgctttcatgatgcagtgtaaagctgcattatatttcccactgcctgctgcacagtgggtttcttcttttcagaagtaatgcagacagggtgttaaatgtgtgtgtcggggtagggggaggggaggcagcatcgaacccattcttcctacagaacttaaaatttacaagctcatttacactggtcagtcagagtgtagatagttaatgttgaatcagaaaaatgatataaattctttttcaagaggtatttcatttaattgacattgatattgaagatgtaacttagcatttaggcatctgagtaatcatcatcgaatataatgattagtttacccacattaatgcctaaaattatacggaaggctaaaaagtactgcattttaaaatctagttttaatactttgattagcgctttatgttctagtataagaaaaacaatacagtgaccttaacgagatcagctgttaccagtgagcaaaccactttcatgtttttgttgcttctagttcctgtagaaaagtacttcatcatttatagcaatttttcttttgtagaaagataagtttgggtcaatcttcaacaaacattgtgcaaaatgtcttgataacaatactgtcttatatttgtttgcattgtactggttttccaaataacttttatgtatgttatctcatgtggtccttagaaaaatccaaagttaataattattatttaacatttattgatgaggggaatgcgaatcaaaaagttcagtaactggatggaaatcactgctgcaacatacgtgagtagatcgtgacttgatccctacttgtcactcttgttactccacttctggagtttttccacaagagtgtgctgccctctatgtggtgagtgctgtattagtgcttccggggttacaaagcaacctcaaaacttgaactctcttgggtcttaaattctagttagaagactgatacctgcatatagatagaagcacaaagtgcaaaagggctgagtaattcaggccctggagatgggactgggccataggggtgaatgaggagaaaacctggtacaatttcttagaagagtaagtgtcagagctgcaaggggcatagggatttgaaatgtgtctggcatccatcttgagagaaaagctggatcgaaaaggtatagcgatgggagaacatgggttctactttaggatgttgagtaacttaatgttgcaagaacttagggtgctggggtgagggagggctgataacaggacaggtgtggagggtagagaacagccaaactgcctctggtggaattgttgctgggcaaaaggatagcggggaagaaagggcgaaatatgttagaaatgtggtatagccttccaaacaagtggaaacactctgcattcgaggattgttcatgggaattcaaatgatgagattatatgtgggagacattgctgaggttggaatgaaattaagagtgggggccaggtgcagtggctcacgcctgtaatcccagcactttgggaggctgaggcgggcagattgcctgaggtcaggagtttgagaccagtctggccaacatggtgagacccactctctaccaaaaatacaaaaaaattagccgggcatggtggcatgcccctgtaatcccagctactcgggaggctgaggcaggggaattgcttgaaccagggaggtggaggttgcagtgagcggagattgcaccactgcactccagcctgggtaacagaacgagactccygtctcaaaaaaaaaaaaaaaaaaaattaggagtgggaggttaagaaggaggaagtgagttaggcaacaccataaagcttactccggcttgaagactgataagaatcacatttctgtttaagatttctgtcacttaggtttattttgaaccagcaaacaagcaattccaagggtatgtaatgagttaaggacccaagtgactggataaggctttctcttgccttagtttctcacagagtaaatccaaaattctgttgtcattacagccatcatgcaggaaataatatgccatattcgtggcaatcagaaccataggttctgtgactttcatatgttaagctgaggaaagacgcctctcagctctcaagcatctacccctttaccataaaggaaagcttcctgtgcccactcatgaattctcttcctgtctctctgggcccaccatagccctggtcatggagtatggcaagaagtaaaagatgactgcagtgtggagctcagtgactagcaagatattgacagctttagattgggttaaggacaagttatgtttcatattgctgtgtttgaggtcccttcaggatattcttgtagctgtgttcattaaataagttggaaacatatgtctggaactagggagagcagccaggaatagagagagttatgggaatccttctcaaagagatgaagctctgggaatgggtgagattgccaagaaatagtatgtggagagaagaaagaagacaagggcagaattttggagaatacttacctgtaagcagcaggctgagaaagagttgcatgggagactatgcaggagccatctgcaaggcagatggaggatgaaccatgagtgttcaagcagccaacaaaagagagagagagagagtcaagaagtgagggatccgtcagaggtgaagtttccagagacagccagtgaaatgagcctcagtgagaaactggttgaaccatcagttgctatcatttgtaacatacataataaaaaatagtgttgaaatcagaacccaggtttcaggtggttaaaaaagaggaaaagggaaaagccaggatagttattattctatgaagattttaagctttgaaagaaaggtgataaagattatgtaccttgaagaagtagtttttttgggtggttttccttaaaggtattaatatgtttgagagtcgagggwaagaagccaatggcaagagaaggataaaaaatgtaagaaagaggtgataataagttgatggagcaaaatctcaggatttgaggagggagtaggttcgagggtagaaatagtccttggaaagagaaggagaaccctgcttcagggtaagagacggagaaaagcarggatgacctgagcaaatttaaaagggagggaggattcctcctgaatggcctccattttctcaattaagggatttattgatattttgtatccttctacgttaatgctgagtctatttattttattttattttattttttgatggagtcttgctctgttgctctggctggagtgcagtggcatgaactaggctcactgcaacctccgcctcccaggttcaagtgattctcctgcttcagcctctccagtagctgggattacaggcatgcaccaccatgcctggctaatttttgtatatttagtagagatggggtttcactatgttggccaggctggtcttgaactcctgacctcaggtgatccacccaccttggcctcccgaagtgctgggattacaggcgttagccaccacacctgkccccatttattctttagagtaggaggctaagacagcccaaggggtacacagtcagataagacacttgtgatgcaattctattccagtgtcctgagaagtgcatcttcattgctaatcagatattgatattgcttccctaagttaattggccccttcctggcacatctttcctaacttcagcgttcacccaggcctcatagaattctttcactttttatcctttatccatgatgtcactctcttcatgttacaagtcttggctggcctgtccccttcctcattctgactaggaagatgggattccctctgaatcaggcctggactccagcctccaactagagtccccagcctactctttagctggggtttagtggactctcttctggaacctggctcggttctgtgcctcgatgagagaaggaggcttgggttgccttatggggcctatttcacaactatataaatcaattttttttgtatgaataaatgaatatgttaggagatccttcagggtaaagatgtctttaggagtaggttgagatacttcacaggtaagatggtcccttttaaaaaattaaaaggaagtcttaaagacgtctgacagatttgttttctgtaaggttagttttttcttgctgaaacctacttatgagtcctaagattgtgttcctccagtgcttatgaaatctgttctgactttctgacagtggaaatggacatctagttccaagaataggcttaaattaaagattgtcaattttaaacagtttaatagatatgtaaggaatggagctattttaacagcgtctttcattttttgaaaaataacacatgctttagaaattcaagctgtttttaaccaatcgcttccatctaacttaacagcagctgttgcacactattataaaaggcctgggcgagatacagtgttgaaaacttggtgagtctgagatttgttacatattttatcaagttacctgctgtccctgcatttacagatatgctagattgtttgatgtctacttttctggatgaggagcagatgtggttgacggctgttaagttaggaatgcatgcagaggttcccgagacttggtgtgtatattcaaagaacagggactttctcatttagcttctttgtgcctaataaacacagctaaggaaggaatcagaagcattagtagtttgtagaacatttatggttttcagtgaaaccactttctatactgcattttgggcaatgagctaatatgtattgtatgggcttgttacagtgggctcttaactgtttgtgggtctaatctgggggcatgggtttatatgtaatctttatgaagacattgcaatagcctgtgctccctaaagttccctcagactttgaattctaatcatagctgtattccataatagagagctgcttataaaaagacatctcagtagagattcttggtaaacaggatggattctgatgttttgttaaaacgaaaatacctatrcagttacccctctgtatccatgggttttgcatttttaaattcacccatccatggattaaaaatatttggaaaaaaaaacaacaatacaacaacaaaaaatacacattaaaaacaatacaatgtagtagttatttacatagcatttacattgtgttagatagaagtaatctagaaatgatttaaagtatgtgggaagatgtgcctaggttatatacaaatatgatgccattttacatgagggacttgagcatctgtggactttggtatctgaagggggtcctggaaccaatcctctgcagatamcaggggatgactatatatcaaaagtgcagcttacagaatgcaaatatgtacattatctcatttgcgcctcacaaattccttttacggatagaatacttccttttcagtctctagactctccatgtgcagtctcgtccacacccaacaggccatcagatctcagccatcagatataaaccagcagctccaggatctatattctaatgctgtacttttcaacatgtaactctgaactagtcttcccttcccactgtcagcttcttcagaaactggtgttctctttctcagtgattgagactgccatctctgtccgaaatctagctattctccttgctacccctctacccctttccaaactctactgataccagtaacttataagttgggattccaaacttgctgtcttggacattgttctggccttcatttggcctgtactgcttcaagcatatcccaactagtctacttgcctctgtgttccacattgcctctggaatggtgtatctgattcctatgcaagaaactccgtagtggcttgccatggtctacagctaaatctggcacttcagaatggtagatggctcatcctcatagtctgccttgcttgcttttgctacttcatctctggccatttttctaagtgcagcttggacttcacctccctgaaccattggtaggtgctgaacctactatagtatttcaggctgccatccctccatgctttaatacctttccttgtgaatatacatttgcattttcccccatccccaactcgtttttgaggctcatcttttggaaacgttttcgttatgaagtttgttgttgctctgtgtttgtgctccacttctctagtggtcagtaagctcttagaggacaagtacgatgtggtattcctctctttttctagctgggatatatacttgtgttatagctggggtatatacgtgtgcggtgagtgcttgctgaagatcgtacagatatgagtctgcacaaatattaattaaataaccaaatgtaagtaacagaaactaaataaaaaccttacattactgtcctgaaggtgtaacttggggatgaagtggggatggggacccgtgtcccgtgtaaataargcatttaattaagtgcaattttaacatttaaagttggcacctggacaaatttttactcccaacatttacatcttaaaaagtagtaaactttgctggaaagtggtagtgaaatttctgtcattttgaaataaataccagagtcacagtagtaccaggttaatgcatgatgtttcagtggcttgtacttgcagctttgcactataatcaggttcttttaaaattagtcttacttaaatgagaaactgtctccctcctttttttttcttttttttaaaataagagcctctcccttttctaatggggacagcatccttttcttctaccatttctcccattcctactccattattggtattatctcataaggattgttttgtgttttgagaatttattttttcctcaaagctccctcacctatttcctccaaacagacagaattcaaagaaagaatagcccttctttcatccattataaatgatttttcatttgagcatgtcattttgcttttttgttccaatggagatcaaagggatacaggttcacccccagtgttcagcagttcttttcagttctggaccttaaagaaatgggatctggttgaatttgttgcagacttagatctctctccaggcatgtggcactcagatgctgggtgttgctgcatgccgagtgctgtatgtgtacgtgtgttttaagacggtgaaagagctggaaatttggtgtttcatacattttgatgcatgtgccaaagatacacatcttaaaggaatatatttgtgttgaaatattacttgtttctatttaagctaagtggggagtcctttaaagatctctatctaagaatatctgctccacagtttgaactctggcatcatgaaaattttgaatgaatattctatagttgctaggctttacaaaaaagaggtttaaaaaatattttacttctttactatgaccagaaccagtgagacccttttaaatgaactctaggtggtttatagtctcaatttcaagtcgtggtagggcaagatgaggagagattaatttttacctatacttaaaaccaagaataatgaattggactttaactgtgagacactgacacattaataaattaaaaataatcgagctttttttaaataccctgctttgtacttcattctgtgatttatgtatgtgtgtcatactattattgtgagactagtgtgagatgttaggccaaaactgtaccactactgtttgattattattagtcttcaaaatttccataagatgcatttcatatttcactatgcagtcctttctcattcctagtctcatcattgtcacctaatcttacccttctgactgatcttactctcatggaaatgccaaaatttcttttgcctcctattccttatttctccagctgtggtcaaagtcccatttttcttctagttgaattgaatggctactccaagatttataagacaaatgttattcttattgttctgatgaattgcatagtttattactgttgtctacaaaggaatgtaatattctctaaaaatctaagactccattcacttattgcatagagctaataaattaaacaattcatctatgtgttaatttttgtgcttaatctttctcattccttctctaaatcaagttgaacttccatgtatctgtttctttttaatgttaggatagcaaagtgtttacataaggattttagggactaaagaccaaaaatatttctggctgctgggaaatcagattggtggtggggtctatcttcaagtttatttcccattgacaaggcatatttgaaaaaatatgtttatttggattaagaacttgggttctgatttgttgtactattttatatgtaattttatggctgaggatctgaacgtacattagaaccctcatgtaaactctcaggtttataaactgatacccctgttgctatgaatttttttgaaaaaatcttattcaacgtaactactatattccagctggttgtacgtcccaaaagtctggtcattgtataaatggaattatttttattttcttccctctgaatatttggcatatttacttttatctatgtctaatcttatctcttatccatatggaaaggcgagtttgaagtgtccagtcacacaaatctgtctgtctataaatagacagccatactttatccaactgtgctgaaacacatagacatttaaaaccaaatgaaatatcaacccaactttcggaaaaggactattcatgtcctttttgaatctaaattaaaaaattattagaagggcctattggtgcatttgaattttgatcaattttggtttgaattttcagtcaagtttattgtgacattgttgggacaatatctgttgtgacatatatttgaaaggtgtatgctttgtgcctataagagcaagacaatattctgattgtcttgaattcctattctaagtgactgtttcaktctggtgttccttcttggccgttttcagatcctgcatgttggggaatgagtaggtttttcacatgatgattgtacatgtaagttttaatgctcagcacaatcatggatggataggtttgatgaatcaacatcatttggaatgaagtttcctcattattggccaagggttgtgatttagaaaagtaagaagtagttgctttgctggtaggttgccccatacttgaaatacagggtagctatttgtaagtaaacgtaagacaaggttgggagtcttaactgtggctaaaccctgagagtgaataaaactatataaaaattgattaacacacttggattatgaagtcaaataatcagaatagtttcttgcccaagtgggaaatatgacttacgcctttcaaagccacaatggacattttgatcaaagtttatcagtagtatctgctagtaagtttgcttaaaaaaaaaaaaagtatagagaggaagagaagcagggatataatattgaggcctcttttaatgagtaggcagaatatgggaatggacctggcctggactcacatgagtgagttgcattgcagtgggatactggcagtttttaaaactctggtgttctatttgrtgtttggaaatggtgaactgagtactgatgattaatgagcacagggattagtggtgatattagtaattttgcttggcacaggtcacatttaatgcctatgaacagatttttgaggcaggagaggtttggtcaacccccttcttccttcttaagggtccagtgcttgtgctgtacccgccctttgtcttcatgtctacccacaggtctcaggcagcttcccaggcacacccatgcttacctgaagccattgcctccttttccacgtcctacctcctgcctaccaagctgggaacagtttttttcctttactctgtccatttctctttgtgagcttaagaaagctggtcaagtctagctcagctatacatcacatcaaggaaaagctgtagaagtgaggcagctcttctctgcacttcttatggactgtttctagccgtgaatccttgggtagtcatttgctcttgttaagtctttctttcctcctctgaatagagatgtggcgtaaagggaaggatttctcaagtcctctgaaaatataaattctttgtctgtggaaatcataagatctgtagggaaattagacttctcaccaacccagtgtcatcatcctctgagacgtggtgataagaagtgcccttcaggctttgcaggctgccttaggaccattttctaatggaaaaatgcattcagaattccaaacacttgccttagaatttartcctcagaaaatgacttaatccttttttgtgttttgttgttgttgttgttgttgttgttgttgtgtgtgtcatatatttctgttttgtatttaataaaggtctcaagctcttctttatttcagtrtatttacctatcaattgggattgttgatacctccttcaaataaatattgggtttatttactgtttacttttaggatgagcstaatatgcagagacttgcagattattaatcttattactttgaaaaagaactgtttcaaggggtgaatactgaaacttgtcccagtacttggaattttcttgcttttattacatttcctaaatgaaatttcagagcctggaggaaagtagtggtgtaagtatatttcaagtatatataattggtttgaattctttggtagagagaaatttataaaattatagtatcattatgagtgtagtttaackttttgcttaatgtatatatagaccctcaaatcttttttaaattggagccataatttactcaaatataataaaagagcgaaaatattgttcagtttacatatatcagtgttttccttctcttgttctatacttaatgatattccatgggttttgcttcttcctggtggtgatttatcttgaggaaatggggcatgatagctggaaaataacctctatcaattgccattttatccaaagcaatgcccgttactgtactccttccccagccagtactggaggtaagtggacagaaaataagtgatgtttagaattatcaacaaagaagccgagctgtctcagcatgtaaggtttgctgttttcattacaaattataaggccaggttttttttttttaaggcagtctgtagatagtttttttctttgatctgagactacttaaaaaatacagatgcatataaacaatacaacaattaagtgaacaatgattacatgcttattttgaggcatagcaagcctatgattctaagtgaagtaccaagcacctgaacttgtattggatgggccatttgtttacttgcttctaaaacacacaaaagcattctgtcagcatctggaaccttcatgaccatttttgctttttcatgacgacagagtaaacaaataaacaacaataaataaaacaagttgagacagtatttgtcttgtgtgtgttcggtcattcagcgaatgaatagtgtatttaaatcatctgtttctctgatttttgggggacttgcatgtcagataagcatctcctttgtattgctatttattttcttccccaaagtgttaggaaggccaggttttctagttttgtttgtttgtttaagcaccatattctctattagagcaggggccagcaaactttttctgtaaagggccaggtagtaaatattttaggctttgcctgccataggttctcttgcaattcttatctctgtcattgtagcgtgaaagtagcgacagaaaatgagtaatgaatggatgggttttgttccgataaaactttatttccaaaaggcaagatttgggccatagtttgttgatgccagcattagagtgayaattcttgttctttgtgtattcatttatacagccctgctccatggactactcatgttataataaagggatagagaagggcatgatgacgatgtgcgttcccagtgtgctagctgtggctctacccctttttctctcacttaagaaaacttcccagaaacccgagaagtgagagcattttcccccagggaaaaccttgaattgtgtaacatgtaaatccatgggaatcttcagcactttattattagcatcagattttttgtcagactcctcacagctgtccaacatacaccaacttgtagctatatggtcttttagaagtggtgttagagggctagtcatttggagttaacggtttgggtcccaaggagcacagtcgccaaagctgaagcaagacaagacatctttgctcatccagtagtgtatcatgggccactcaaagcttagtgtgcacgaaagactctcatttgttgtttatagaggcgtgtgactaaactgagcccaacagcagtatgccttgtgtttcatattcttagatcttttcctgtctctatctcttgcaagttagaattactacagatgttgaaaacatttgactggatttagccaagttgaaagtatattttataatattttggtgagggagttagatcaacttgtcgtagattactatttggtcaaggaaaggcagacaatttatgtggggtcttctaagaataaacccaactatggccgggcacagtggctcacgcctgtaatcccagcactttgggaggccgaggcgggcggatcacgaggtcaggagattgagaccatcctggttaacacgatgaaaccccgtctctactaacaaaaatacaaaaaattagccaggcatgctggcgggcgcctgtagtcccagctacttgggaagctgaggcaggagaatggtgtgaacccgggaggcggagcttgcagtgagccgagatcgcgccactgcactccagcctgggcgacagagcaagactccgtctcaaaaaaaaaaaaaaaaaaaaaaaaaaagaataaacccaactatataggattagagtaaaattaatgatgatgatgattcagatacagtataagctcttatctgaccttcacagaatctacctcgtggagaaaacagcttcccattccctcataagacttgctttgcagtgtccatggcacattgatgctcatcactggtagactttctgacactcctgtgcgtttcttatctgttaagtcagctgcttaccaagtcagttgtgcttgcttattcacctatttgccagtagtttctattacataattttattaagtgccatgtcagctgtagctgtttctatgaaaaataagaggaatgctttgggaagacttgtaaaggtgatctacttaaaaacttgctcttgaattaggtataggcaagaggactgtggaggattagggggaaatctagaagggttctgcactcagattgagtcttttaagtcttttagttctcactgacctttaaagaaaacagttgaaaatgtagataatctgcagagaactcagcagaaccatactggaggaaaagggctgatactcatrtgagacaattgggaaataatttgttacttagatatgttattgcaactttattgtgaagtacatacatatctttttaattgtttttcacttactggtctcgattgtatctgagtgtttcacaaatgtgtcacgcactgtgccagggctttacccaaactctcttatttaattctcccagcagcccattgaggagggtccgatggttagcttcattttactgatggggaatctaaagcctgggtagcccatgaagtcttcccatggtcctaaagcaaataaatgctagatctgagattcagtttccttctctccctaattatatcatccccctgccagcagccaactcaaggcttttcaatgctatagatttttttgaatacagtggtaggtgagatcttaactcattatgaatcactaagccagtctttattagaatcaaacctgggggttgtcacagaatgaattagctttagtttagtgcagagaatatagacaaaatgacttaaatcttcaccgtgttgtccctatgtcttttctttgctgcgttctgatcttttctcttttgtttgctcacatacctgcttggaatggatatattgtttttacctcttaaacatgcttttakgtatataatttgatgctcaaaagatgagtaataggaaaggtttttttttttttttttttttgagatggagtctcactctgtcacccaggctggagggcagtggcgcgatctytgctcactgcaagctccgcctcccgagttcacgtcattctcctgcctcagcctcccgagtaactgggactacaggcgcccgccaacacacccggctaattttttgtawttttagtagagacgggggtttcaccgtgttaaccaggatggtctcgatctcctgacctcgtgatctgcccgcctcagcctctcaaagtgccgagattacaggcgtgagccacctggcacccagcctagggcaggtatttttaggtccatttttttaggtgaagaaactaaggttcaaaaattaaaatgaaccacaagagtttagagtttaaatatataggaaagatccacattgcagttgaaaagttgaataaagaaatgtttggctgtataatacagatacttagttaaaagaggagagggttgaggggatcactttttyctactatgtgcagaagtatgatatagaggattacgactggctcttttctagttatgtctgagtatgggattaatttttttttttgtaagaattcaatttcagcaggggggatttagtttaaagatggaaactagttcccccttagatggaaagtctgttgtttaatctttttccatagggttgtatataacagttttagattctgtccagattcaaaataataaactagacagcagggtccaaagttctrccattatatctaatgattgtaatttttaaaaacaacaatgcagtcataaacttggattcagtctgtaacatttgcatgcactcagactttattataaatgcagtaatcttcccttacccactgaggattccttccaagacccccctgtggatgcctgaaatgcagatggtaccaaaccctatatgtataactttttttctccatacatacatactgtgataaattttaatttataaattagggatagtagccaggcatggtggttcacacctataatcccagtactttgggaggctgaggtgggaggactgcttgagtcccagaaatttgagaccagcctgggcaaatatagagagaccccatctctaccaaaaataaaattagctgggcatgatggtgcacactggtggtcccagctactcaggaggytgaggtgggaggatcacttgaagccccrgaggttgaggccacagtaagccatgattccaccactgcattccaacctgagtgacagagtgaggccttttctttttaaaaaaggcatagtaagagattaatagcaataactaataataaattaaaacaattataacaatatactrtaataaaagttatgtgaatatcatctctctcactcaatatcttattgtacagtactcacttattttcggactatggttgaccttggataaagggggaactactgtaattttctaccatgttcttttcattctagagcaaataaaggatggtgatatgaaacaaagtatttaggtaaaaagaggcttctcaataagatttcatttatatcagtttgtaatattgcctactgagcaatttagttatatttctaattctgtgaaagagcactttcatggtagacccagacaacagtaaaggaattaggatgaagagtggaactacacataatggatttaaaattagtagtgtggatttttaaaatcaaaatggaattcagagatgagaagggttgtttaaccagatcattgggaaataattagaaaaacagacagtcagtagacacaagaaacttggaaatctaccttcagtggggaggcatagtcgtttgctgaaccatcacccatatgtattgattctgcagtgtgtgatcccagaacaatgctcattttgctttaccaaaaaaaaaaaaaatttttttattaaaaaattaaaaaaaaaccaaactcaccacaaagcacaatattacacacaccaactatgtcatgtccttagtacccattgttccctgagttcacaaagttaaacattaacgaagaagttcaaggattggctaggtagcaataggagcaaagattaaaagaatgaagaatgtatctgctaagtcagggataggaaatcttctctcttaagtactatgaattatcttgagaagaaaagaaatcagagcacaagtaaaatagttggggtgggattaatgcttagggatttttggagtcagaaatttgaaatgctcaattgacctattttgaacttcaaaacaaaacaattcacatatgttttagctcactaagtgcaagaacaaagagtgaggcaataaaattgtagaagaagaaatgagcaaagaaaaaaagatacaagagagtggaaaaaagtttctggtaagtggaaggatagataagggaggggacggatatggggaacagctcaaaaggaaagaccagagggaaccgtgcaggagtgagaaaaatcatcctcatctgccctccacatgccacttccagaactttcttatggttcccggcctgtgtttctgccccctaactgggctcagtctgttttaaggtgtttcccagttgtcctgtccctgaccccatgtttccccaaagtccgttcctccttaccatagctcgaaatccttgcygctctcttccagtggatgaccttgagagcttgttgaggtaaataggattgcagagtgtttttttgttgatttggtttttttttttttgagatggagtactgctctgtcacctaggctggagtgcagtggcatgatcttggctgactgcaacctctcctgcctgagcctccctaatagctgggactacaggcgcctgccaccacacccggctaatttttgtatttttggtagagacagggtttcaccatgctggccaggctcgtctcaaactccggacctcaggtaatctgcccgcctcagcctcctgaagtgctgggattacaggcatgggccaccacgcctagcctctttgttgaacttaatattattcttctttattttcgctttctcagtgaagctttcttcctcatcgtttccaagttgttgtgtttcggtaatctgattatctgtcatttcagagtccctgtcctcccactgagccacatgcgcacacacatctctgtcaggcacccctgtcatgtaaggcacgttgggtctgccagagcggcaccccttgttccaactttcaggtttaatgcttgagaacatttgaaggctgttgtctggaaaagataagtgtttttatatttctttgaattttaggagttgtctaccacaacaaataaactagatcacactttttaagttcaatacttattatcctcattctgtggaaaaaatatattttctattaatcatgtacataatagtactaattatgggccactttggctgaacacagttttatgcttaggcttacataattaaggttgtaatgttatttctggatctttgaggcattagtagagatcactgatgaagtaaactgacaaacataactccttttctttggaaaagatggatgctgtctgctaaactaatcaagttatagagccttaggccgggtgtgtcggctcatgcctgtaatcccggcactttgggaggccaaggtgggcggatcatgaggtcaggagtttaagatcatcctggccaacatggtgaaaccccatctctactaaacacacacacacacacacacacacacacacacacacacacacacgccaggcatggtggtgggcatctgtaatcccagctactcgggaggctgagacaggagtgtcacttcaacccaagaggcagaggttgcagtgagccaagatcatgccattgcactccagcctggaagcctgggcaatagagcaagactccatctcaaaaaaaaaaaaaaaaaaaaagaaaaagaaaacgtttacagagcctttttctgttgataagtacaccttgaaatacctggctccgaagcacccattggctggatttgctgcctaacagtgtgctgtctcagcgtagttgcttcccagtgggtcccattggtgtcacgttattgtcagtctcttcagtctatcttaaaagcctttctttccttccctctgctgctagtaacctggcctgagccccctgtggtgcctctctgtgcagattccgctatcattcattctccacacttgttcatcctggacatgatgtggtaagaaatcatggcttcagaatcggtagacctccctgttgcaggatgtggatatttggtgagatttttcttggcatagccaatgtaaagaagactgttcaggtactcttgtgtgtggccagagcctgagtgctgcctatgcttccacctttagggctttgtgcattctattccctctgcctgggggacctgtttttttgcctgatggatgaattcctacccagactcttggattcatctctaaatttacctcccttagggaagccttttctgactccagaggcataatttccccttctctaaagttccatgcctcccttaatcatcatattatattgtgacttaaaaaatttatttgtctccccatttgactttgagatccttgaatcagggtttggttcatcattgatagtacctatcacagtttccagaggttgttggacttgggggatagccacatttttggcttcgttgaagcagaggaaatggaaggtggattcccttcactttggaatctcaacattctttttctctggcctccttcagcatgtgtccttgacacagttggggttttgatttattgatgttctgggtttttcatcacatggtagacagtgtcatttgttgtgatgttctagttggcacagtgcatgtgggctgctgagcagaaccaagtattgtcattgtggcagttacagtttttatttaacaaacatatagaaaatttaagcastttacatattaaaccatttgacctcataacatctttatgtgggaggtactgttagtagtcccatctttggccgggcgcagtggctcatgcctgtaatcccagcactttggaaggccaaggagggtggatcacttgaggctgggagtttgagaccagcctggctaacatggtgaaaccttgtctctactaaaaatatgaaaattagccgggtgtggtggcgcacgcctgtagtcccagctacctgggaggctgaggcaggagaatcacttgaacccaggaggcagacattgcagtgggccgagatcatgccactgcactccagcctgggtaacagagtgagactttgtctcaaagaaaaaaaaaatcctgtcttatagatgaggaaactgacacacagagaggttaaagtaacttgcccaatatcacatagctagtaggtgggagagccaacatttcaagccaggaaggagctctggctatgggctaacatgtaatttactcccatacttcactgccagcatcattttacctttaaccactagtagtttatctgtcttcttatttcagagaagggaggatgtctcagatcagaaccttgggccaggcaacagttactaaccagaaattgtttccattatattttccctattatcttccacttagacagttgaatctgattttctaattatggtagttatataaagacttctcataattattcaacttttgaaatagagctaatttaaagaaaaatatcaagtgaatagcagtaggtattaaatggtggcctatataacaaaagtcctgaaggtgatacattacatattaatggataggatattgtgagtagttgcttacagagggtgaagaattatgaatagggcagctttctggtttggccgatgtaattcacgtttgttgtgtttgcaaaggtaagggaacctaaagatggaaaacttagtagcaattgaggggataagagggcatagaaaggacatgggtagacatgttaatgttccattattaacctacattgcatgtgtattcaattattcagctccgatttggtttatatttagtgatctcactcataccaagggggttctactggatagcaaagttttatacatttgacttgctttgggcaataaacatggggacagatgataaaagaagggttatggagagccaaaaggcagttgctatgaagccatcacaaaagacactaaaccgatggggagcagagcaaaggtttgtctggaaaatacaagttaggctgaagttgggatgacccaaggtaagttttaaatataacggtacatgctacttgtattttcccaaatcactacttstgcacttctacaacaaacttctgctttctcacaggacttttatggaaggaagaaaagtaatttgaatcccttrggcctttttataggtccattgtcagcgtcttgtgtctgccttgacccatttgcattctggtggttgctgggaacagtaagataacctatgaatagtccttgtccttccagtgtgatctgaaaggtctttgctgctctgtgcctgaagagaacattgacaggtagttaatgatgttctcgggttgcttctagctctttgtagatgggggtggccagtcatctcatggctacttccttgactgggaccccttcccatattgttcctattagtttttaattccaagagggtgggctgctctctgtccttgctttagtgttgatgtgttcatttagacactgggcatgccttgtgagtctactggactgtgtttgtggaactcccatctcttcttgcccttttaacccttattcttcatgactgagaatgggccatgcttctttttgagcctaatctgttattgcatctgctgctcttaattatgctccttttatgcccttaattactcctcttggttttctgttagtttttcttctccttgtgttactctttcacccttagcatatctgacagtcaggatagtactgtggcaaactgtcagccagctcccgttgattggtaatgcttacgtagtgagctgtgttgggaaaggttgtgtagccttactcagactcggtagggtcaggaaagacagtgctggctgagcaacgtctgctatgagcatgggagtcaggagcagtgacatccttgcctctgtcttccatgtcttagaagcatataattgctagcccttttctgatctgtaacgtgctgctgtgttcagtttgagaaagttagagggggtcagcttggatgaagagaaatggaaatagttaagctgcctgcttagagctatctcttggcacaagagagatggagaaaatgacacatagaagtgttcaatattaaactgagagacagatatacaaagggaaactgcagaaatatactttgttctattcaccattctctgtcaaaaatctgcttgaattcccaatagtttattagtataagaaagttaaggaataaagagtatgcatttagttaaacctacttgtgtctgtcaggagcctgaacaatacaggcaagtataggagccagggcaactctttctgctctcctagacatgcatcaagcatgtggggggcacttgttatggagttgcaggcactatgctggactctgatcatacagtaataaaaagaaataccccctgcccttggcaagttttaccggtacaaatacagttgtccctaggtatacacagtggatgggttccagggccgcccttaatatatccaaatctgtgcatatttaagtcccacagttggccctgcagaacttgtggatagaaagtttatgcttaggttttgtatcctgtgactactgtattttggatctgctttgagttggaaaaagtctgcttataagtgcacttgctcagttcaaatccatgtttcaagggtcaagtgtgtatgcttggtaccagtttttcatgggaaagctcatacctgattattttctcattcttactccagcctctaagcaataacactttgtacattgcctcatgcataggagtttctctgtaaccattgctgaatgaattgtgtgctgtaggttgcaagtgccatgaagtttctaaaagaaaatggtcaatagagcctggtatggctttgtagagaagaagataaaggtagttgtgttaataatgagagagtagttgattaaaaaataaatacaacatcatcttgaccacttattggctgtgtaactgtgccaatccctttcacttctgtgaccctcattgtgctccactgtgaagttgggagtgataattttggcaagatttgtttattttagcattcctctgctatatagtattgtaggtgtattagtctgttctcatgctgctataaagaactgcttgagatttgtttttctgttgttgttgttttttgtttgttttttgagatggaggctcgctctgtcacctagatgggagtgcagtggcacgatcttggcccactgcaacctccacttcctgggttcaagcgattctcctgcctcagcctcccaagtagctgggacgacagatgcgcaccacacctggctaatttttgtgtttttattagagacggggtttcaccatgttggccagactggtctcgagctcctgacctcaagtgatccatctgcttcagcctcccaaagtgcggggacagcgtgaaccaccacacctggtcttgggcaatttataaaggaaagaggtttaattgactcacagttctgcagggttgggaggcctcaggaaacttaaaatcatggtggaaggggaagcaaacatgtccttcttcacggtgtggcaggaaggaaaagtgccaaacaaacgggggaaaagcctcttataaaaccatcagatctcatgagaacagcatggggataactgcccccatgattcaattacctcttaccgggtccctctcacaacacgtggagattatgggaactacaattgaagatgagatttgcagggggacacagccaaaccatatccctagacatagctttgagaatttaattaagacctagcattattttgagaattaaatgatataacaaatatgagataactttataacattctaaagtactacacaactattagttattattcttctttgttatttagaagcagctttccccagactcgtgagttcagggatctattcctttgygtctgtcttccattttgttcaagtgtccacaggaccctaaatgagcctgcctggcctggacccagtacttacaagggcttatgcttgtgactttcttcttcgggtatcttagcagcttgttggagaggatggagtctttatcagaggagagtctagagttttaacctttagaccatgccttaaaaaccaagggcctcagatatgaaaggatacttataagaagaaagtgcaggttactttgactcatattttgaagatggcatactaaacaacatctcagtgaaatatctgaacaaatattaaaattaagacatttaaaaatttatatctagagccagcatgatttttctaaggtttgggactttatatagtagcctcttatttagggtaaaggacttaaaatttgcaaatttgaatttttgatggaaggacattggtacttttgtcaagttggacacaggaatactcccagttacgttttcctgcaccgtggcagcatgattctcttaaacaccagattctgaaccgcagaccaagactgatggttaaagcaaacaattcctaatacctcataatgatttgtcccaaatttccttctcttycattaattatattttccttaattaattaattttatgttagaatagcgtgactgatctcttaaatatatccgtggcctatcttcaaattgcctagtttcggtggtgattctatttggagatttttctgtggcatagtcatggtatgtattgtgttaattcttgtacatttccctgggtttttgrccgtggtttgtttttttcagttctgcagttcactgccctctcactagaatttatacctttcctttagaagatatttagaaagggctggtagaaacatagctgtcattcagcacatgcaggtcctgttatatcacacttggatcctttcaacaggccctttaatggtttccctactggcattctcccctctttctaatccatcctacataccaagattaatcttcctaaaatactgtttccaytgtgctcaaaaacctttagcggcccccccatggcctacaggatgaagtccagacctcttagccagttaagtcttcctacagactagttctcacttattttctggccctcttactgtaattccctcttcaactgataggcttgctgaggcctcctttcttcccttctctgtgtctctgtttcttgtcccctttcttgcgatggcctttgaccctatctctgcccatccaaatcctactcatctggctttcaagttctagtccagttgatgaaatcctttattttcctggcagcatttactgtccttattgtatattatattctattatggttgcttgtgtttacaagctgtgcactgccctctaccccaatttataagttcctgaaaaacgtggcatctgtagacaggaatggattcttggtagttttatagctctgtgtgtaaatgggagctttaggattgtggtttatgatcattgaatgagatgcaatagacaagttatttattgtagtctgtcctgtcttgttcagtgactgagggtcttgtacaacacaggttttcattgagtgcttattcaataaatgaatagatatattaagtttattttgttcttcaggtgtgtaaattattttagcatttaacttaacatgttagcatgtatatagggtatggtttatttcctctggtgggaagagacacattcagaatgcctgagagtcatttatgggtgatcatgaattgtgtattctgcttagatcaggctttgtgtttagagctgagtaagttggtgtcctggccattctacccaccaaattgcaaagttctccaaagtgttacaggagctatttggatagtagatcaattaatagttttatgttacgtttcatctccggaggatgcaggctacctcaggtgacagaaagctacaggaggacaaaagatagctttctgcaaagacctgctaggcagtcttttttttacaaatattccagctggttgtcagctcttccttgatcatgtcatcattactgccgtattcatctgacaccagacaaaaagaaaaaaggaaaaagattggggcgggggttggggagggaattccttcagcgctaaaaccagtcttgtcacactgcaggggcaccgtgtttggttttaataatctcatgtcattattagtagtaaaatataaatctgtttcttagaactttttagaaaagaattttgaaaaggttatgaaatggtactcaatgctcatctttcaggaaagaggtggagggggtgttaacttgctaactgtcattacactgcttgttttcagtttcagattaatagcaggtggtatgcagttttcaaagcaaacaggcttttttgttcggttagaaaaagcactaattgtttactgtagcctagaatattttgtgcaaagtgacaaatggcaaggatcacaaaacatttaacatttaaaataaattgatagctggctaatattgtaaattttttaattaaaaattttcttaaattgatagataacattgtatgtatttatcatgtacaatgtgatgttttgaagtatatatcatacattgtggaatttttaaatccagctaattaccaaatgctttatctcacatagttataatttttgtggccagtgcagttaacatccactctctttgcatagtattgtaaatgtgtaaaggatcaagccagcacttcagcaaaatatttctcttaccatactaattgagttacgtgtcttggttatttatgcttaatatatttgtctgttactttccgtgaatatattttcatgcagctattttgatttctggcaatatccttttgtccactctgcagtacagtactcatctcgattagtaaatgcctctggagaggaattgcatcttagaagctctgcagatgatcagcccatccaaatggacggttaatacatgcttttaaatacgtctctgtgtatgtggtggcaggagtggggtggttggtgatgttatgtttggaataacatattaaggatttctatttttggattcttatttacaggtaagttttttttttctttaattaggcatttttttcccctcaacttttattttaatttccagggtacatgtgcaggatgtgcaggtttgttacgtaggtaaacatgtgcacaggtcatcccatcacctaggtgttaagcccagcatccattagctagtattcctgatgctctccctcccgacagccccccagcaggccccagtgtgtgttgtttccccccatgtgtccatgtgttctcattgttcagctcccacttataagtgagaacatggggtatttcagtttctgtttctgtgttagtttgctgaggttaacgacatccggctctatccatgtccctgcaaaggacatgatctcattcctttttatggcttttttaaattagtattattatactttaagttctagggtacatgtacacaacgtgcaggtttgttacataggtatacatgtgccatgttggtttgctgcacccattaactcgtcgtttacattaggtatttatcctaatgctatccctccccctgccccccaccccacgacaggcccccgtgtgtgattttgttccccgccttgcgtcaaagtgttctcattgttcaattcccacctatgaatgagaacatgcagtgtttggttttctgtccttgtgatagatagtttgctgagaatgatggtttccagcttcatccatgtcctggcataggacatgaactcgtcctttcttatggctgcatagtattccatggtgtatatgtgccacattttcttaatccagtctatcattgatggacatttgggttggttccaaatttttgctattgtgaatagtgctgcaataaacatacgtgtgcatgtgtctttatagtaggatgatttataatcctttgggtatatacccaggaatgggatggatgggtcaaatggtatttctagttctagatccctgaggaatcgccacactgccttccacagtggttgaactagtttgcagtcccaccaacagtgtaaaagtgttcctatttctccacatcctctccagcacctgttgtttcctgactttttaatgattgccattctaactggtgtgagatggtatctcattgtggcattgatttgcatttctctgatgactaatgatgatgagcattttttcatgtgtcatttgcaggtaggtttttaagaatattgagatattgcttagtatgctaactttaaaatgtgagtcagaataatctgtattctattcttaactcatgactagttagctttgtgatcctaaaagtgtctttaacttctaagggccttggtttctaaggtatattcctgcctctgccttaaatatgtaaaaaaaagttgtgggttttttttttttctagacacaaagtcttgctgtgtcatccaggcttggagtacagtggcatgatcatagctcactgcagccttgacctcctgggctcaaatgatcctcctgcctcagcctcctgagtcactgggactacaggcgcatgccaccatgcccagctgatttttttttaaatcttttgtagagatgaggtctcatgttgcccgggctggtcttgaactcctgacctcaaatgatccccccacytcagcctcccaaaatgctggcattacaggcatgagccaccatgcctgtcctttgttcaagtatttttgatagctgagaaatatggcatcagacgtcactcatgtttgtcattaagatgattttacatgtaatatactcacatgcagtttaaaaggcttaagggtgggaatctctttcctctggtctggaatctgatcagttagttcctcagttcgaatacttgcgaagagctttctagcatctgatcaaatgatgccttaatgaaaatcctacccacagtaagatgagttttaagtcagaaaggcaatatgtaattaaaacaataactatagccataagcaggccggatacccatgccaggtagttaagaatattctgacttccccagaaggcaagaccaaacgagaattatgaggttgtttttgttgttgttgttgttgttgggttcaaacctagagatggatctgcctggtgagctctcctgggaagagtcagaaattctgtgttcatgagacagctcttccagcttgtggatttcaggcaggtcacttttctgcaacttgtttccttaactgtaagataaaaaaataaaaaggttgtgtagaaactgtactacagttggccctttgtgtccacggcttctgcatctgcagattcaaccaaccaaggattgaaaatattcagaaaaaaaccccaatataacaactaaaaagaatacaaataaaaaataaatacaggataataattacttacatagcatttacattgtattaggcattataagtaatctagagatgctttaacatgtatgggaggaggtacatagtttatatgcaaatactatgccattttatatcagggacttgagcgtttgtggatttgggtcttggggagttgtggaaccaatcccttgcagatactgagagacaattgtacttgcttcacattgctgtgcagtgaggctttctagtgtgattatatagttacaggtctttcaaggtgacaaaggatgttaaaaattgtaagttgacaatggtgatcatgtctattcctgagtaccttgacagcaaaactctggtatgacaggagtttctagaatttgggattgtggagctctctgcctcgttttggtcttcccataccagagtattgttcacaaatagtgatgtgaacaagctaagtctttttttattattttttatttttatttattatactttaagttctagggtacatgtgcacaacgtgtaggtttgttacatatgtatacatgtgccatgttggtgtgctgcacccattaactggttatttacattaggtatttctcctaatgctatccctccccactccccctacctcacaacaggcccgggtgtgtgatgttccccttcctgtgtccaagtgttctcattgttcagttcccacctatgagtgagaacatgtggtgtttggttttctgtccttgtgatagtttgctgagaatgatggtttccagcttcatccatgtcccagcaaaggacatgaactcatcattttttatggctgcgtagtattccatggtgtatatatgccacattttcttaatccagtctatcattgatggacatttgggttggttccaagtctttgctattgtgagtagtgctgcaataaacatacgtatgtgtgtgtctttatagcagcatgacttataatcctttgggtatatacccagtaatgggatggctgggtcaaatggtatttctagttctagatccctgaggaatcgccacactgtcttccacagtggttgaactagtttacagtcccaccaacagtgtaaaagtgttcctatttctccctatcctctccagcacctgttgtttcctgactttttaatgattgccattctaaatgagatggtatctcattgtggtttttgacaagaaatggggaaaggattccctatttaacaaatggtgctgggaaaactggctagccatatgtagaaagctgaaactggatcccttccttacaccttatacaaaaattaattcaagatggattaaagacttaaatgttagacctaaaaccataaaaaccctagaagaaaaaaccctagaagaaaacctaggcaataccattcaggaataggcatgggcaaggacttcatgactaaaacaccaaaagcaatggcaacaaaaaccaaaattgacaaatcggatctaattaaactaaagagcttctgcacagcaaaagaaactgtcatcagagtgaacaggcaacctacagaatgggagaaaatttttgcaatctacttatctgacaaagggctaatatccagaatctacaatgaactcaaacaaatttacaagaaaaaaacaatcaaccccatcaacaagtaggcgaaggatatgaacagacacttctcaaaagaagacatttatgtagccaaacagacacatgaacagatctgatcatcactggccatcagagaagaacaaagctaagtctaaaccagccaggcctgaggactgagtcagacaagaggaccccctgcctccctcctgtggcctttgcctttgcctcagggtggcttctttaatgggcagatgatggcatgtctctcttcagtcacctccatcccrgcactgaggtggctgatttccatcctatcttgtgtgcgctgttgctttctattcagatgactcgtgctttgagcgcattctcttctttccattgctcccttctaagacttctttccctttttaccatgtttaggcctcaggttatcatttgttattcccaagatcttatctcttaacttattttccttgattagataagccggaggctttgtacagaggctgaaggttttcaagaattccctcactacgggtttggggaaaactgggatgttgtaaagggctgagtgttctgttgtactttcattaccagtgacccattgtggaagatttctttagaaagtaatttttatcccttaagtgattttccaaattctatttttctttttttctctctctgttttttgttttttgagagggaggcttgctctgtcgcccaggctggagttcagtggtgctatctcggctcactgcaacgtccgcctccccggttcaagcaattctcctgcctcagcctcctgagtagctgggaccacaggtgcccaccaccacacccagctaatttttgtttttttagtagagacggggtttcaccatattggtcaggccggtcttgaactcctgacctcaggtgatccacccgacttggccttccaaagtgctgggtttacaggccaccatgcctagcctccaaattctatttttcttagaatatagtagagttgcatcttaaggatttagttttaaaatcagcatgtaaggtaaacatttcttttgttcaaaattattcttttgagtccagcactgctagtttttttttccattctgggtcagtagttttctttagttgagcactagatgaaagtgctggctttcatttaaaggtttgtgaatgaatcttgtataagttcaaccactagagttccattcactgggaaaagatgctcactctgtgagggtatgtgggagatgagacagatcaagaggagagctgatgtatgcctccggtctcaggctttcttgtggagtaagtggagccctgggtactactgaaattatctctctccctccatcaccttgggcagttgagtttgcataagttaaatgtccgtatgatgtaattgtaccagcttctgtaaagaaacataaacaggatgaacatgcctgattattttctggcctttctcatttttatatagaagataagaatgagtgtgatttggttagcagcaatgagttgaggttattttagaaaagtggccccttgcagccccaatcttacctatttgagtttgccaggtggtatgaggttcaggaggcagcccagcgaatattgctaaggcttaggctctgttctagtagttgcaaacccactgctggtgccaagtcaggcagagaaggaacgctgctgccacacagtgtctgcccctggcatccaggtgtcacatacacacggttatttccaaatgttgtttaatgtgtgcccctagcatcctagcagtttggcagaagaacatacacatttattgaatttcctctggcctagctgcttagtagattccaaatgaataatagaagaaatgttgtggtaaatgtaacgcatgaaatgtgggtgttagaggggtcttagatattatttagcctatcctctgaattgtacagataagagacagatccagaaaggtgaggtgatctgctatagaccatgagttagctgccaagatggaatggaagctttaattgtctgatgcctattttgttgctttttctacttgatagaacttatggatcaaatagtattccataagttcaatcggatttactctgcctggcctgcataagtgaagcaattctaaagggaactgatacatacaaacacatgtaaacctcattctctgctggtttacattctgtttgaagtggaagttgatgtttgctgtcatcattttgttttgtgttaattaacaaatctgattatgtggcggccataggagcgtgccctttagctctatgtttaagagaacctgcctcaaagggtgtggtgcagttagctgacagcatcgagctgctgcacctttgggatccaccatgcgctctggggctccccatcagcctggctaagattttcccagagctgcgtatgatcttccttccttccctcctgttgctggtgtcagacctgcagcacagtctgaggctctcctgctttcttctgctccttytytcctccacccttcccacacatgcccccataatcagtctcttgtactttatgtcttagtgagaggtgacagcgtgctggcagtcctcacagccctcgctcgctctcggcgcctcctctgcctgggctcccagtttggtggcacttgaggagcccttcagcccaccgctgcactgtgggagcccctttctgggctggccaaggccagagcccgctccctcagcttgtagggaggtgtggagggggaggcgcgagcgggaaccggggctgtgtgcggcgcttgcaggccagctggagttccgggtgggtgtgggcttggcgggccctgcactcggagcagccggccggccctgccggccccgggcaatgaggggcttagcacctgggccagtggctgcagagggtgtactgggtcccccagcagtgccagcccaccggcgctgcgctcgatttctcgccgggccttagctgccttcccgtggggcaaggctcgggacctgcagcccgccatgygtgagcctcccacccgctccgtgggctcctgtgcggcccgagcctcctcgacgagcgccaccccctgctccacagcgcccagtcccatcgaccacccaagggctgaggagtgcgggcgcacggcgcgggactggcaggcaactccacctgcagcctgggtgcgggatccactgggtgaagccagctgggctcctgagtctggtggggatgtggagaacctttgtgtctagctcagggtttgtgaatgcaccaatcgacactctgtatctagctactctggtggggccttggagaacctttgtgtccacactctgtatctagctaatctgatggggacgtggagaatctttgtgtctagctcagggattgtaaacgcaccaatcagcgccctgtcaaaacagaccactcggctctaccaatcagcaggatgtgggtggggccagaaaagagaatataaaagcaggctgccccagccagcagtggcaacccgctcgggtccctttccacactgtggaagctttgttctttggctctctgcaataaatcttgctactgctcactctttgggtccacactgcctttatgagctgtaacactcaccgcgaaggtctgcagcttcactcctgaagccagggagaccacgagcccaccgggaggaacaaacaactccagacacgccgccttaagagctgtaacactcaccgcgaaggtctgcagcttcactcctgagccagcgagaccacgaacccgccagaaggaagaaactccgaacacatctgaacatcagaaggaacaaactccggacacgctgcctttaagaactgtaacactcactgcgagggtccgcggcttcattcttgaagtcagtgagaccaagaacccaccaattccggacacattagcatctgcattccagaagacctgaaccgacatagtatacaggtggatttgaagttatttttagtgtagtgtgcaataatggttgcagaaaatctttaaaaacaaatctttatgttgaatagggctgaaaattgctacaaatgtttgattagtmattttttacattttcttctcttaacttcaagccagcatgagaagaaataaagtcagagcaatgggaagtacactgctgtcaagaggcaggagtcccagaaccaattctctttctgaccttcaagaattcccttagcagacaaagagcttggagcctcgcttacttcctagaaaatgaactgagtgatctctggatgttttcttcagctctgaatgtgaaacagattgcaagaaaagaggttgagtggccaattggtcccaatagtgtgaacattaagtctaaatttaaattgaacaaatacaagttagtacaaagaaaaggaattcagaagttgtgcggtaattgtctccatgttgttgtccaatttacttgtcagttcactgacaccaaataccttggtgcagatagtgcagtttaactggcgtctctatgtcagagtgcttctgagatttttaatctccatggtaaaacaagattatatgtaagtgcctggaaatggaagttttattccccacaatatggaataagaagatagagatatttgagtataattgcaccttaagttatgtaactcaaaatgcttagtatttcttcccactctgtactcacaacagctgtggtttagagttgagaccaccctgcttttaccagtgatggtagcattcagtagttgataacgccaatctgtgctgcagctgcctttaatagtaaaaaccccttcctgctctaagtccatataatcacacagttttatagaatatggcctcttttaccactttttcctctttcagtgctaattcttagctttgaagtttttaagtttgctagtgatactgtgacatacagtccttaatttgttttatagaatgtagctttttggagctgtgttttatattcagttgctgaatttgattcaccatggtcttttaggcttgttagctgtttatattcacttgtgtctttcataaacatgtagtagctgaagccattgtcattagagaagataagactgcttgtgttagaattctgaaaccctagccattcatttgagttttgattcagcatttatttaatgtttcttatgggttggggattgtgacgagtgttcttgttttaaatggatgttgggcggagagcacagagcatatgccactgaactgatgcagtgatatgtttcagcacctttcatgttgaaatgtcatgttactttgtaacatgaaacttgtaagttataatggaatcacaatatgccttgttctcaggaattatatataaaatatttaacaacaggtatggcatagtcactgcccaagcagaacaaatgttaaacaaccagaaccagtttgtgtcaatggaatctcagccttgcctgatctgaacataagttaaatggattcaaagtcttatatgtgatagaagctttgattctagttttaccagaagttgtagaaaagaacgagcttttgtacatattttatatattttctcactggggaatgatttcattacattacaaagatttgagccactctcattgcttttgtaccttacgcctttgcaattcaacccaaccaccagatgatagataacacaagcagacccaaccccaatctacaatatgtacagacatttattgaacaaaactttattagaaatccagtacaaaatgattcatatgacccgttttgtaaaactcaatgaagttgcagttttctgttcttttaagtattttctttgcaagaaagtttcacctgagacagatgaggctttttgtatttgatctcaaacaaccaacaatcctcttgtagtagtctgttcttacactgctaataaagacatacctgagactgggtaatttatgaagaaaaagaggtttaatggactcacagttccacatagctggggagacctcacaatcatggcggaaggcaaaggaagagcaatgtcacttcttacatagtggcaggcaaagagagcttgtgcagaggaattcccctttataaaacaatcatatctcatgagacttattcactgtcatgaggacagcacaggaaaaaccttcccccattattcagttacttcccagtgggtcccgtgcatgacacgtgggaattaggggagctacaattcaagatgagatttaggtggggacacagccaaaccatatcacctcttaaacctgtggttttccacagaaggcgattttgcctcctaggcaacatttcgcaatgtctggagacattttgcttgtcacaactcagagtagggggtagtgctgctgggctgtacggattagaggccacgagtactgctaaacattctacagtatgtaagatctgtctccataacaaagaattatctggtccaaattgttgatagtgccaaggatgagaatctttgtcttaaacacatggctggatacagagctttttagggatcaattctgaggtaccactcctacagtaaaagctagaggcctcattggatttctttaacctgttcatgcagcatatgtaggagtgtctttataatatggcagctaattctgatatctttgtgagagctctcattttactgataagaactcatatctaacatttatcatgctggttaatggaccattttcaccaataaaatcccatttccagcagtcattttgctaattagcaaaacatcactgttgattaagacatggatgactgaagcccttctagtagcctcctacttttygagcttctaataagaatacttgctgattgctcctggattgtgcattcctgagtaacatgctggcagcacctaattcagagcttacataataatgtacatacataataatgtacacataaaatcacactgtatatcatgtggtagtttgaactaaatcgtagacattaggacagatttccttcccagaagctgtacctacttactttgtacaaactcttgccctcagtgcagttcatttgattcagctactgtgtactgagtgtttccttgtggaaagtacagatctagcttgagccaaagatacaggcagagaggaggaaagcccttctcttgtctcagagagtttacagttaaggagaggagtagtgggtaagtaagcatgtatcatacaaggtaaaagcaaaaacaagtgccataggaaacatattgaaaggttttattagctgcaaaagtaggagaagcagctagggtatgacttggcaaagactctggaagtaatatccaagagtggtttggaacatgggtgcagggctgggtcagtgcatggtratgtggtgattccgaagagtcaacatgggcacccaagtcttctgtctcctcactgagtttcttactgtgtcatagtgctaataacatccaaattatgaaataaaactagaaaactggaggagtaaatgtatagtttacaattgttccctctctctcaagctatagaagaaagtttataaaattggttctaatttcatccagcactgcattttgcttcttttgttaagcgctatgatatacataaaagttatgagagaacttctgggataatttaaagcaaaacaccaccagatcactttctattcaaaatttgtgtactccaacaacctcctgtctttattcaatgttggctttactttttaatttcaaaaatcattcatttttggctctgcattcttatttaagagaatagcagatatacttttgcattagtccattttcacactgctataaagaaatacccgagactgggtagtttataaaggaaagaggtttaattgtctcacaatttcacatggctgaggaggcctcaggaaccttacaatcatagcagaaggcaaaggggaagcaggcaccttttttacaaggtggcaggagaaagagcctgtgaaagagaaaccttcagacacttacagaaccatcagatctcatgagagcttgctcttgatcactggaactgctcgtgggaaaccgcccccatgatccaaccacttcccaccaggtctgtcccttgacacgtggagattatggagattacagtttgagatgaaatttgggtagggacacagagccaaaccatgtcattccaccctggcccctgccaaatataagattctttttacatttcaaaattaatcaggccttcctcacagtcccccagagtcttaactcattcaagcattaacccaaaagtccaagtccaaagtctcatttgagacaaggaaagtcccttctatgtaggagcctgtaaaatcaaaagtaagtaagttacttccaagataaagtgggggtactggcattgggtaagcgctctcattccaaatcagagaaattggccaaaataaggaggctacaggccccacgcragtctgaaatccagcagggcagtcatgaagtcttaaagctctaaaataatctcctttgactccatgtctcatgtctagttcaccctcatgcaagaggtgggctcccatggccttagatagcttcgcccctgtgtttttgcagggtactgcccccatgctgctctcatgggctggcattgagtgcctgtgacrtttccaggtgcactgtgcaagctgtcagtggatctaccattctggggtctagaggacagtggccctcttctcacaggtccactaggcagtgccccagtagggactctgcgtgggggctccaaccccccatttcccttctgcactgccctagcagaggttcttcatgagggctttgcccctgcagcagacttctgcctggatatccaggcttttccatacatcctctgaaatctaggtggaggttcgcaaacctcaattcttgacttctgtgcgcctgcaggcccaacatcacatgaaagctgctaaggcttggggcttgcaccctctgaagcagtggcctgagctataccttggcctcttttagccacggctagagctggagctgctgggacycagggcaccaagtcctgaggctgcacacagcagcagtgccctgggtctggtccaggcaaccgtttttccttcctaggcctctggacctacgatgggaggggcttctgtgaagtcctctgacatgccctggagacattttccccattgtcttggtgattaacattcagctccttgttaatcttacaaatctttgcagctggcttgaatttctccccagaaaaataggtttttcttttctaccacatggtcaggctgccaattttccaaacttttatgccctgcttcccttttaaacataagttccaatttcacatcatctctctcaagttcaaagtttcacagttctctagggtaggggcaaaatgccaccagtgtctttgctaaagcatagcaagtgtcacctttgctccagttcccagtaagttcctcatatctatcttgagaccacctcagcctggacttcattgtccatatcactatcagcattttggtcaaaaccgttcaacaagtctctcagaagttccaractttcccatatcttcctttcatcttctgagatctccaaattgtcccaacgtctgtccattacccagttccaaacttgcttccacattttctgtatctttatagcagtgccccactaccttggtaccagttaactgtattatttcattttcacactgctataaagatactacccaagagtagttaatttataaaagaaagagatttaattaactcacagttacgcttcctgggaaggcctcaggaaacttacaatcatggtggaaggcaaagggaaagcaggaaccttcttcacacggcaagccagagagtgaaagagcatgtgaaggaggaaccgtcaaatgcttataaaaccatcagatcttgtgagcacccactcactatcacaagaatagcagggggaacctcccccattatccattcacctcccatctggtccatccctcaacatgtggggattatggggattacagttcaagataagatttgggtgcagacacagagccaaaccatatcataccccaaggtggcaaaggacatgatcagttggctgttttctgtatgttattagtatgaagaaacttaaaatgtcgatcagggctcttgaaactctgagaaggggaagacaaaacaagcaccaaaaccagctgccttgatctaatcctgggtgcttgggtttgagttccagacttcagattaggaagtctattggaagaatgggcttttgtatttcatctctctggtctatgttcaccttatattaggtgttatagtgttagtggacatcagtgcagtttaacatttccagctgggatctgcttatagctgatgtttatgcctccaaatagtcattgaaaagtatgataataggttggacatcatttaagttcacctaggtgagttaccctactgaaggtcaccctctgatatggtttggaaaacagtgctggaagtataatactttgtgtattaatgccacttggtaaagactcattgaaccctatgtaatttctcctaacaaaagcctagaattcaattaattgaatacatggctactttaattattctgttaacagctaattgatattcacagtgatcatgttttacagcttctaaatgcaatattmccttacaagtttatggttcggcctcctttgatatttcagttctttttctgttttatgtcagcatataattttcttaggttcgtatatattgcacctcatatgtagttttgacaagaaataaagctctttttcctactcttatttgctcatctgcctatgtgagttgtaaaacagattttgcctaccatagattatccatattatagtgaaagattagtctttctcagttctttatatgtatgcttcagattgttaaaagatttagaatgaaaggatatatggttacagggatgtcctgtttatattgttaagagagttgttgccttttctaaatcctagtaatctctggcttcatagtcttatctcatggaaagttgagtaggtacctgctttgttttttaccctgagctattaaaaatggaatactgacatttcaaggaactttgtcatttaaaatatacaagctttgcccatagcacagaaccttgccttaaaatgccttgtgcttgatatacaaagtaacagtacattatctgtgctaagtggttgtgttgtcaccgagttcccaatgccatgcagttggtgccacacttgagtccccaggagcaaccagggctaaaagggcgtagtaatgccgaaaagtgtgtgctatgaagatttagcctggactattcatgggaaggtaaagtttctatcagcccagtatgttatattcataatcccagttttctcttgtataaactttattatagcctttgttgtaaagccccttcaagtctattctgaaaagagacaagtctttaaggaagtaaacatacgtacttcacttttaatctagctatcaacaccaagttaagacatcaaaatgttcgtgttgggttccttaaacttgatttccatattttctttgtttctcttgaattataggatattctagttttccataatgatccacttaagtacattgtgtcacattttccagcccagttacgttatcccgaatctggcaagatctgaaaactattcaatacatatttcttctaggaatagcaaatagtagatggggaaaaatgttttatattattttttcccaagatatggttctatatcaataaataatgttgtagtcctctttgtttttatttgttcatttacagtgattctctgttagagagctctacggagtttcatttccttgcagtaggtttactacttttttaaagttgaatgtgactctccatcctcagcagctattagcttagtcaatgtattctaggcttatttaagtttcaggattcatatcgtgtgacttttcctcctagcatcatattaactgtttcaaagcaatgtgctattaaagtgttgtggccatgtttcttactttgttattcttcccagtggatctcaaactattgattctgtttgcaatccagggaaagatgtgtgctgctggcctataacttggtggtgttgggtcttaggaaatattgccctctttggtctttagtgtacacatctgagctttggacatgttattttaaactttttcaaggatcatatcttagaaaagtgagtgagcatatagctgtacaccctttatttaggttgtaatcagctcttcaaaattaaatttgttgattgatgcggtgtcctcagcaggctcaagtgttgaattctcttagtgttttctaaataatgataatggaatatccattatgatttyttttgcattttaaaaaatctcactttgtgaacaaagggaacattacctagtatgagtgttttaatagccagggtagataatgccatacattgaatgggggagaaaaccaggtgctgatacattcaggatttagtaggtaatacaatttccatgctatctataactgttcaagttgttaaattttttgaattgttaatataattatttaataggttcactcttttagatgccctcagtgctacatttccatctcatagtcaagtgtaaacatatggaatattgatgtttaaaagattttttctgatcacagaagtactaactgttcattataggaaataagaaacagtccaaataatatatcccactacatatatcataactactataacatcttaccatactttacacttttttccatgtccatataaacaagtactcaaccttctctgtccctcccttctgctcctccctcccccatttctcatgcaaaattaggagcttagggcacatgctattttatgacgtgttttttttctcacttaatattttgagttttaaaaaattaattttctgttacgatatcagctttcaaggactcttactgtttgattatatggctggatcaaaatctttataatcaatatcctattgtcagattatatcttatttacccaaacatctattgttcactcttagttgttgctttaaataatgctggttgcattttcttagaygtaaatactcttatattttaatatttgctaggattgaatgcctggaagtgaaattggccacataagaagattaatgataataatgatttatacacacattcacacatttatagttattattataaattttagtatacttaatttatattcatttttaaaatttatgtagttaaattcattctttctgatatacagttctatgagttttgacaagtgcatgtaattatataaccgccaccacaatcaagaaacatattcatttgctcaccttaaaaaatttcttccttttgccccttgactataaagtatgtttctttttaattctgaacatataaagaagcaaaaataagaaaatagataccgcccataagtctaccagtctgctgtaacctctgttgacattttgtaaaatatccttctgcttttttgtttgtttttgtttttttatttttgttttttctcttcgtcttccttacaaaaaaagaggttatactgcctttatatagctttttttcttttttcttttttaagtggtatactttgagtacatatttcatttagccattggattggtttgtttttatttctctgcaattctaaacaaccttgtaatgaagtttaaacaaccctataatgaatatctttgcatatagtacttgagtaccataagtagagtttttagatctggtacataggtatattttaaagacttgttaattttatccagttgatttataaaatgggtataccaatttatattctgaccagcagtgtataggagagcctattttcttatatccttgccaatattgagtatttttattttacatttttgttaattggtagatgaataatgacaccatattaccttaattggtattatctgatttgatgtggggttgggtttttctcatgtgtttattatttgtatttttcgtgtgttgatttctagtttatattatttgtgtatatttcttttgttgtttttcggtggggagaggagtgggggatgaggcttcttttttcagtgctctatatgttaataayattaactctcccagttacatgttgggatttcttttcctgtttttgttacttgcttcttctttggattttataatgcttttgttttatgcagtttcttatgagtctattctttttcattttctttatttatattttgggtttttatgttgaatttaaagaggtcttttctctttagattatgtagtcatgtatattagatttgaaattcatttactttttgtttcatattcttaacagtctaataaaatttttactatgttgtaccagggagccatagattatatacttgtatatgaatgtactttaatctaatcttaacattgtatttgtttttatttattcatatgcttccaagcagcatgtacttttcattgaaatcttctattcaaactgtaacagcatagtgacattaaaatgtgtctcaagttaagcatttcctttttattttttctccattaccttctttggcttgcattttaaatattatccatcagattttgtgtgtgtgtgaaattaggaaaaaacagtacttatgttgttaaataactgtttattttatttttaacatgctgcaggatattgaagacaaagtaagtagcaaaacaataacctataaatgtgcaagtagttcacctaaactaagcagatagttgagtagacaggcaccttgacatctgaaacagacaatacttgatcatttagcaaaagaattttggtgaaatagcacaaggatgggaatgcctaaatatatacttgttaatggatggctggatgcatacaattaaagaaatgtatacactttacatattaaaagtaatatatatactttgtttattaaaagatacacacaaaaaatatatatatctatatatagtgtgtgtgtatatatatgtatatatacacacatatatacatatatacacatatatatacacacacacactttcttataagttgtagtcaggcatatattcagcattcactgagcaaaaaatatgttgaaaacaaaatctaactcagagtgatataggaaagtctcatccctcagagataaaggccaattaaacataatattcaagataccaacattagtttaagaaatgcatttttttttacaaatcttgaaaaatatcggtaagtagccatcttcatcattgtttaaagaaccaaaaatattatacttgttttgattttgttttaaaaaatcttgtaaattgaaagtacaataactaaagcttttaaaattacttttaaatatggttatttattatgattattttgaattattgaaataaacaattatggtagtttttgtttccactcttccataacaattaattctttacataaagggaaatagaacaatgtatgtatttatttgcaggtaattaactgttcttaaacacaagatttatgtacaaaatgttatttaggcattacttttttgttcaaaaaagagccatgtatcttatgcccaggataaaattaaagtttcattgtacaaaatattaatccttgaaattactctttgatagggaagttaaataagagtctgttatgtgctgtattctgacgtttcctaatatatttggacaaaataggacacagctgttacagcgggaaaaaaaatacaatgcggacttcttctttacatttaaatacagcaatcatcatcttaatgtttttctatggcagagacctaatagattgcaaaaatcttcagatttgtattcttatttctaatgcaatttattcttgacttttgctttgctgttgctgctttttcttgatatagtatattcctcatttctttttttaggctaggcagctggaagagaaagaccgagtgctaaagaagcaggatgcattctacaaagaacagctggctagactggaggagagggtatgactattttttatcattgattctattaccacatctgctgttttcttgtatatttatttaraaattaataaattagaacttcaactgcttttcctggttgtaaagtggccaggaagtgaagaagcaaagcaggtagttagttcgtcctctgtaacaatgtcattttttctttggtcactttggaatggttgcgttatttgttcactgatgcattttaccacttgggacctaccgcaaatacttttcttatatgtttagaatctacatagcctccaggtcagacagtacactgctactcttatctctcccagacattgactaaactttagtacactcttaaaaatggtagtgttttaaaggatatatttatcttcttttatcttttctttttttgcttttttctttttgaaatggaatctcactctgtcgcccagactggagtctagtggcatgatcttggttcactgcaacctccacctaccaggttcaagtgattcccatgccttagcctcctgagtagctggaattacaggcatgcaccaccatgcctggctgatttttgtatttttattagagacagggtttcaccatgttggccatgctggtcttgagctcctggcctcaagtcatctgcctccctcagcctcccaaagtgctaggattacaggcatgagccactgcacctggcaggatatatcttctttctgaaaactcagtttcactgcatttgtagtttagaaatgaatgtctccttcaggagaggtagataggagctgaatagcagaagttaaacatgagttaggagaaggaaaagagatayggcgtcaagtcagcatgggtctagwattggacagagatggacaaaagaaggcagtgagtttaagaatgagagtttgagcaccttatcagtgcccttttcaataaagtagattggttatctagattaatttcatacatagaccatgaggttgcagagtaagctctctctcttttgaatgaaaccctccaaattttatttgttgaaaatgttatttgataagaaaataggaaaaaataagaaatacactattaaccctcactcagtacagttatgtatatgttaaatgtgtttgctgtctccatatgttaccgaactgagtacctcttgaatgtagggagcattttctcattcatgtagcagatatttacttaagcaccctggtcttgtgccagcagctatgtactagtgaagaaaatgaggtaaacatctgtcttcatggagcttaaattcaattaaaaccagaatacatattgtatggcaggttatgataatttcgggaggaataaaatgggaaaagagagtcccagggctggggtttaggcatggagttgggtacagagggaagaactctctgttgagatgacatttgggaagaggcctatggtaatagggaagcaagccattgccaaaaccgtgaagmaggcgtgaacttggcatgtttgggaaggctggggggtttgggagcagatgaaccctctggctgctgtgttgggcaagagttgaagcaacagagaattagtaagaaattacggcagtaattcggaaaagggatgactggtgtgggtctgagtgccgacaggggaagtaatgaaatgtggttcggtattttaaaggtagagctgaccagatttgctgatggctttgaacatgagtgaagaaagaataaactctaggtttatggcttttataactagaaggtttttccacaggtgaagattcttaagatatggattgggatgttggtggtggaggaaatcaggagtttgattgtggatatgttaagctcaggacacttaagacattgaagtagagatgttgaataggcataaagtgaaatggtttagagaatgtcagtaatttttcctgtaaagggctggatagtaaatattttaggctttgcacaccacatttggtttctgtgcagctccccacctctgcctttgtaatgtggaatcagagaaagccaactgtaaatgaatgagtgtggctctgttctaattgaaagaccctgaagtatgaagctcatatagttttcacacatcacaaaattttgcttaaatttttttccaaccacttaaaaatgtaaaaccaaaaacaggtactgggcctgatttggctccctcrttgtagtgggcagaactctgatttagagcacaaggctctgatgtcagatgccttggattcaaatttctgacctggcatttccctgctgtgtaatgtggagcatcttatttttcctctcagttgtttcatatattaagtgatgatttaatagtacttacctcacttgttaaatgagctaatactcataaagcacctgtaatagtatgtagcacagagtaaccattcacccactaattgttttacttctatacctagagcattgtacatggcttagagtttgtattagtctgttttctcactgctataatgagctgcttgagactgggtaatttatgaagggaagaagtttaattgacccacagttctccatggctagggaggcctcaggaaacttacaattacggcagaaggtgaaagggaagcaggcacctttttcacatggtggcaggagagagagaatgcgtgcaggggaaactacttttaaaccatcagatctgagaactctctcacttatcacaagaacagcctggggaaaccacacccatgatccagttacctcccaccaggtccctccctcaacatgtgggtatcacaattcaagatgagatttgggtgcagacacagagccaaaccatatcagagttagtaaatgttaaatgagtgaaagtgaaagtttttgaggtgatatacttggcacctgcttttcctcacccaatgacagttttctttgtcatcaggttttactatgttaggtaccttataaacttgcctttaattattgtcaggttcaagaaaaggcactgaaaaatattctcccatttctcatagactcaccaatttgattggtacaaacgtctgagaagatttgtttctggcagattgaacttatctgctcaacaactgctcaacaaataaactgttaggctttttggcaccaagtagaacaagtggtagaagattagatagacacgatatgataagatcaaattattgtgaatatatatatatatatatatataatatattatatatagaatatattgttttcctttttgaagatcagcctgggaagtggtcatcctacagttgaaactgaaatctgagaagcaccagtgagcttagaaagctaaggtggaatatatacactgctgttacttaatactcgataactccacattaagtaaaagaaagaatgttagacaaggagtcagaaggtatgcttttgtcatstggctgttcggcaattcacctaatcccttgtggtgtctggttctttatctgcaaaatggggatatactctgttccttgctcatcttcatggtgattgggggtagatcagatgagtgtgtaaaagccccttgaaagctggaaagagcttaacaaatatcagctgttgccatgaaagaatatttgcttactttccattgtgtataagataacgataatcatakaattaatattattcaacttccttgtgtcttttgcacatttctgtacagtcctgtttttgtttgttactgtcattctcaaagtactcaagttgaattttgtcactttggatttcttccaggaatatgtgagagacatttaggtctctaatgatgaagtattttctaggcgtaatgcaaaagattgtaaagagattttcttctgtattgtgatgrcagtgagaattacaatgtctaactatttctattaggaattctgcacacacttttgtattagacagtgtaaaaatgctgaatccattaattcgtattgtaagaaatgattctaatattaatataatttgcagaatcatctaacttactaggaaatccaggttgcctgtggtttaaaagtggacataagcacatatcttttcctcttttaactaaatgaagtgatgaaactataaagtagataccagatggtgtatcattaatggagagggatgttgcatcaacgagtcttttacagaatcattctgagggagattcctgagataaccttaccatctgcgcatcaactagattaacacagcaattgtacacgttatcactttttgatgacttgaactattcatttatattggcttgatgcagatttcttttgagagtatgaatcaaagtgcactgaacatgtgaagtacatttagttctgtaatacagcttgatttgcctcttggatctatttcaataaactgcttgttaattagataattcccatgtgtgaatggaactccctctacccaggtatttatattggccacttcacccaggagtctgatataattttcttctttcactaacttgttaggagtaataagtgtaatttaactggacactgatttcaccctttttagaatgagttttcaaaagcagcgacactttactgagagagaaggtcaaagccatttgaaaagattttttaagtccttatttcatactcaaatgttgctaagttatcaatggcatctctgtgaacattagagatatcacatttaggtgtcttgcctaattgaaagatacttagagagtattaattcctgattattggtataagagacatagatagtattaattcctggttggtgatttcatgagaggaagttgagaacagctttcaaagagaaggttcttaagtgtttctacgaagtagtctccaagtctcacagggaattctgttttttttgttttcccaactttatttttgtttgttgtataattgacaaatatgtccataatgctttatacctctttatgatagccacattttgtttataatacttgtgattagttatgtgtgtttatcttgtacactcctgaggacacagagctaattttcatatttctgtattttctatttttttcttttgtttttgaggttccataacttgcatatttctgtattttctacaaatagcacagtgaatgaatcctagattttctaagcttatactatgaagttatgtttatgcaattagtgtatagttttaaaatacacacaaatgtttagtatcttcttcactagccatttaaattcataatttaattctatcctgggagaaagtcaagtttaactttgaatattttgttattgtttatagcatccttattaacatgctgatgataacatttactgagcatttacattgtgattggcactttgcatggattgtctcattttatacttaccaacaaccctgtgtggctgtgcgccctattgtttaggtgaaggcttaaagtaattcacctaagaacatacagccaaaatatgatagatctggatttgagccaggttccatgcttaagcatttagctgctgtctagtaccaacttgaagatgttcattctgtatgtaaatcctgctgattgtagcattagttctttgtgtggtaagttagctcttaccagcttctaatacaactttttgggtcctgacgttatgatttgattaatgctacctcataacctaaaagtgttaagcattcaaaaatgcataattttctcccagaatttgacatttcctgggaaaatttgaccaaaaaagaataagtaaggtcttattacctagcgattacagcatgatacccctaagagttattttaatatcgagttgtgcttctttcacgttgaaataagaaatttatagtcattaaagcagcttaaaaatttcttcttgaggtcttcattcacttgctcatactttgattaatactgccttccatcttttcatctctttscatcttctggaaagaaagcaaaccttttttttttttttttttttttttttttttacttttgacaaagtgttctgatagttatttcatcagagtttggatcgttgtgtgttcttcaggaaaatgtgtatttttcaggagtctgttggtcctgtgggagggaagcgaggggtaggaccgtggttatcgtgtcatagagggcagaagccacagtctcccatgggtcttccaggatgaagggccttgtctccccaggacatgttgaagacttgagctctttgataatgtgttttgcatgtataacttctccattatgaatttgaattgatttgctctatggcatccactttgctcttggctttcctaagaatgatggggttttggctcagcatgaagccctcttggcttgaggagctgagggaaatcagaaaatttagttaggtataatacaatgttgagtaacccagtgatgtggcatgcatttgttctttgagaactcctccctacacctccccccactgcatttacaatttatttgcattcttaaatatgaagatatgtttgtaagatgggccacttaaaatattattctatgtgctgtatgtaaaaaatggaagactaattttattaggttagttttccatggcatataatcaaatagatgcctccttgtctataaacatattacctattattcatcatgtgcttactatattgaagatctgctaagtgtataccatccttcaaaattctttcccatgtcaggatctttgcctttgttgttccctgggatgctgtttcccacctctgaatagctgtctctgactcccttacaagttttaggctttcctaatgactatcagaaactagacttctgaaccctgtctctaactgtcatatcaacctatttatttgtttgaaagcactcttccagatctataattagtttactcattatttgttaacttgttcatgactgccttcccagtcatccagtagaagttccacgaaggcagaaactttgtcttagacacacctgaatcccttatctggtgaatcataaatgccagtgtggcatggattgctttcagttttcagacacctctggatttcagcagcaatttgcatacagactgcaggaaatctcacagaattaaaagggagagagaattagataagctgggcaaaagagaataatacaaagagaatggtgaaaaataaattgccattaagaagaaaagtatattactagtttgtcacctgtggagagagttgctaaytaaattctaaggtcatgcttacatcaaatgagcaatttttaaaagtctctcacttatggcagatgacatgtcttttattgcatcataaagtgttgggctcatctgtatgattaattggcttttgattgtgtgtgacttcttctttctcaattagtacctttgcttctgtgctcctctgtgtgaagcttggggaaaaaataatgccaacaatgataataatgagaaatgacaacagaacaggttattgtcagcccagagtgcttcttatgggaagaaattatgtatttttactaccaggtgaagtctgtcattgtaaaatatttcagtgagtgaagctggatcaaccttttcaagggattaatgcaggatggattcacaattagtctactgacatctgagatactaaaatataaacagtcgttttttggagatggggagataacttaaacttggtttatgggattaagaaaccgtttgatattcccccctgcgacgtgctttctaaacagttgccaatgattttaggtgatgtggttaactcattttggccctgcaatgtgacagagtaaatttaacatgagagttaaaaatgtaacttcctggtagatgtgcctacgtgggttatactagtttgcacttgtcaacctagagagatagactattcctttgacactgggaaattttgtactggcttcttcattcatgtggagatcagggcagattccctgtggtttctatagttaccgagagctacacaaacagagatgaggttctgtagtccacaggtttggatgttgaagttaatagaagcctacaccacttttaattgtaatgtcacaagcaacagaggttttattaaagtggcttggattgtgtacattgagttactctcaattttttttatcatcaacaagtaatgatagtttaagtaaatgcacttagatgttaattgttctgtagaaaaatgaataaggcccagtatcagcatatcttttgttaacataattgacacatttataacttaggtgcaaagatggaaccattttacaatctacctgctttcctaaaggaagtttattattgcagatattccaaaagtagcaagcaagatattttttttccctagtttgtgctctggggaaaaatatcaatacagtatagtaggatatgggggtcttatccttaattcattattcaacaaatcctcaaaatgcgttggcttttctgttaacctctctgaaatttcgaatgggaaatgtggtttaggtaaccttgagctgcttttcaaatctggctttagggatatgagacttactttttttctagggtgagctgttaaaagtgcatccaggtaaaatgatccctttaactggagtcagtttttctatgtctaactttagaggaaagatttgcaaatcatgggatcagcacttaatttggggctctatttaccatgtaggctgtcaagaagtattaaccttaaggtaagatgagaacatggagtacaaagctgtgagttgatggcatacagtacagcggtattaaatagcattatccatcctgcttgctacagtaaataggatttcactattatgatgtgtcagggctttcagtaaaatcaaatttacaagacactaaactgccatcctctctgctgagcagctttattctgggatcttgctttcatattaatcctgttggtaggaaatacttgtaccaattgtgcatggaaattataatttaatgatctcttccttttctttattcagagcttagaatggactactgtgctttgcagtgatagccccagggctctgagaaagagaaaatatacagtgcagctttaaagcccagtattgcttttttgtgagtgcttgtaatgatcataagtgctgagatgccaacaatatgggttgcatactttctcaactcttcacatttcctttaccttttgaaaggctacacaataaaataattagattctgtttaccctgatggttttaaaaaatgatatgccacttgaatatgtaaagacaaggtaagaaataaagcattgtgaaatcaagggaaaattaattccacttttaaagattctttacattttaggaaggctcagcaggctgttttatttgaaaaacaattatttactcactttactttctttgagctcctttcttgctrttgataagaatattacagccaggaaatcattatgtttcctgcgtatgagattgaaattggctaaatcctttgaattttcttcacatccaatttcaaagttagtgattgttttgcttcttgacatcttgcttatttataaatttcaaatgtacttcatttaggcagaccagccaatgcgtattttcctattttactgactgaaaaattaaagtacatgaatattaaattttttaaaggaaattgcagtgcttctgttagaaagtgctcttcaatcccagttttatgttcagaccatgagacagctgtgcgtctgtaaggattacgtttcaacacattagcttcagttaaaaagatatatttggtcattaaaacatttgcaaataatattagctcataacatcatcaaatagaagtgcccacatctgaatttggcatataaagcaagtttgcacagtaaggttggcatttaatgaagggaacctaaatccaatttgtccgtgtagactaagataggattttaactttggtcattcttatcagaattttggggactagagggagtccttggcattcaccactcattcaaaaacacatttattaatctcctacagtgagccaggctctattcaaagatataatgatgaatacaaatggcacaaaagcccattggtatctggcacggagctttcagttgacacagtggcgcaatgggcccatggaggctgtgtgttttgtgaagaacactacctttttactacctttgtcccttcaagagctaaagatcatgggattttggggggaaagttagtaggttagagagatccatcaggttaaattatcagatgaagaccccaatacattggttgcctcaagtagttctttctgaaaataaacattaaataggtaagttcctttgargaccggaactcattcccctttaatcactgtgatagtgcctggcacataataaaccttggataaatttttttaaaattaatgtgttcgtccaggaatggggtgggttccatggccaaataattttgaggaatgttaggtttcacaaagctgaacagatttcttttctacaggccttctcagaagttacgtacacttagagcctccaggatgaggatgctgcatgatgtgtttcaccattatacccaaaacatggaattgttctgagatgaatttatcccagtatatcacctgagatttctgtgccctgaataatgctagtacctacattttttttagtccttcttagcttgcatcctaggatgtaaaagtagagtagccgtagaatttcactgttggaattcctaatctgagggcttctgaggacctgaaagcaccctgggattgccgccctttgcaccatgttccaaaagcataggtcaatgagaagaggctgcctcagggtcctaaaggtgcggtgctctgggatagggttttctttctctctgaattctcttcctaatcctcaccctttccaagagtctttgagaaaactgtagcccaaggtatctaatttttgtgtttaggtgtccattgattcaagcttgcattattccaacctcctcagaattgggagcaatgggtagtggggtttctccttgatcttcccatgtcaagattcagcaccatgcccattaacccaagagttgtacatacttgcctgaagaaccaggcgcaggtttcagtagcatgccaccaatggaaagtctgaaccagaatattcttcccttttatgaaatgaagtaggaaggtaattaaaktggataaattactcctgtggatctytacaaatcttcccgcaagtgttgccaagatatggtgctgaaggagcaagtgaaagagatatcaacatcttctgttccatcagagcctcaaggtttctgtgaccctctagaaagaatctataggacttgctattcttttgtgaggaagcagtaaggtttacttacatagsgtagaaagtgcgcctttgtatctggagaataagtttgatgatggtcagtaatcacatgctctgcaatttaatttgtcttcgtaaaacgtttagaactggagttcagagagaatggcatgatcaccacactgtccccttgtgacttgtagtgtttgtataaactctataaaagcagggaccttgtctgttccctgctgtatccctattacctagaccagtacttggcacttagcaggtgcttgttaaatatttgtcgaatgaatgatgaaggcattttcagcgggtcaaaaatgtccacgtagcctagagatgcatcttccaaattgcttagtgggcagctcgtctcaagttagaccttattctgcaggttttctgaaatttaggtgagggtccttttgctccagtcatgctaacttctgctattaatgcaacaacataccttatttatgtaaaattaaacatcagtgtaattactactcctcaagcaagcttttgaaataaattaaattatttgtctaagtgatgttcttatccattacttttacatgactggggagaaggtgaataatgatgatgatgatgatgatatcaattttatccacaatctttaacctaaatagaatgcccaacttcatatattatcccaaaacctggttttgagtgacagagtgcccctgggtactatgcattgtgtacatccttgttccaagattgttgggaaagaaatagtaatatcagtgtcagtaccatcaacgtcatcattaaaacatccaccatyggcacccgcctgtagtcccagctattcgagaggctgaggcaggagaatcacttgaacctgggaggcagaggttgcagggagccgagattgcgccactgcactccagcctgggtgacacagcgagacccgtctcaaaaaaaaaaaaaaatttaccatgaattgagggattattataagctaggcagtgcttgaaattagttaacataatactgtattctatccctagaacaaaccattaggggaaggtatttctttgccagscaaccagttgatttgttgagtctgaaagacattgagtaacttgacctgggattcttagctggtgcacccaggcctctgtcttcctcctcaccaatggcctctccctctgtgtcaccagtggtggactattaaattttcactttcagtctcatatgattccactccccttttcatcctccccctcttcatttttatttatttatttaatttttgagacagaatctctctctgtcrcccaggctggagtgyagtggtgcgatctcggctcactgcaacctccatctcctcagttcaggattctgctgcctcagcctcccgagtagctgggattacaagcgtgcaccaccatgactggctaatttgtagagatgggatttcaccatgtctgcccrgctgatgtcgagctgacctcaagtgatctacctgcctcggcctccctaagtgctgagattacaggcataagccacmgagtccggccctccccctctttaaaaagatttttggtggaggtgggcctgacattttttgtttagaaccactagagtcaagtaacagattctcaactgagtttccctcagcaacattcatacttggttttcttccataagctaagcgcccattgttttatttaatagtgaatcttgtttaaagagaagttgaaccagctttattacagggcatgattagatacagttaattagtacggctatagygtataggctaaattgataggaaaggtgctgaaagtaaggaaattgtaaaggatctgtgaactgggtcttattcctctgaggggatgcagagaaaagaagctggccctgtactgtggggaaatataaccagaaattgaagtcacaagcgaagccaaatcagcccaggtaaaggtgatgacactttctgagatggcaactagtagctcttaagtagccttgaaccatggtgtccacagcagcccagcacgcttagcttgctatgcggattgtacctgtggaatcctggggcataacttcctgcaaatttaggtttagtcacacaagtttactgtcactttccattctaagactgagtgtgcacttgtttcaactctctcrtttcaggtcagagatgtttctcctatcctagaactatttgaacttcaacttccccaggctctgcctcaaaattaactttagtaattaatgaccttcagtacatgtaccactcaattaactaccctcaagccagccstacttttaaccttcctcgatggcasattcttgtccatctcctgccacagcattccttcctaggagatctccatgcttgcgttctctctgcagattgctctgcctgtgttgggcatccccttatttttacttttttttccccaactttatttttgtttgttttgtataattgacaaatacatccataatgctttatacctctcttgattatagtcacattttgtttataatacttgtgatgagttgtagatgatgaggggatgttgagcatctactgtgtgtgcagatattatgcatggtaggtacctgtgacacacagtcactgaagcagacacagtttacctgtaacatctcatcactcctccttgcttgctacttcctaatattagaatttctagaacttaatcatagtgtagtttccaccttgccttcatggacgatctgtgatgtgacgtgggcagcggaaatagaagtgagaacggagtagcactgactgaggggttgtctccttgggcaagcagtccacgtgttgagaagatttgtctgcttatctgtttatcctcattatcattaaaatgaaaatgtaactagaactacaacgagcacttctgtagctcaagaaaaataacccataataaattgtgaactgtctattctctcatggtgtagttactctaaattgtggaaatttggcagacgtccctagaactatttgttaaaattcaatagtatgtaattaaagacagagactgccattttgctgttgggtacattaaaaaattatattatgtatcatttggatttgaccctgaacttatttcccaaaagattaatgccagaaagacaaaagtatattttagtctaaatagaggctcaagttatataaagtaactaaatttatggaaatatcagttagactctagctatttaagagtaattatgcaaaagatagttttgaacgaatattcctctagaaatagccaaatggacactgtaattatgatgaaattctgtgcttcaagtcttgccagacaataaaacaagactgctgatattttaagcctatatcattaaaactaatattgatacaacaacctggataatatgtcagtgaaatggaatattttatagatacacaaaagtatactgctccttgaaacgttagcattcatctagtataaaattacacttttttcaagcaatgaaacagaaacctagaggcttgaaaattgtttttacgtggttgggaaagggaatggtggcactatttacctagttatgattatctcatcagataagttctaggcaagtgagtgggtgtttgtctgtttaggttcctgcaattgatttgtgttggggkggccctcccaaatatagacaagtggatatggattcatatattagacctcctagttattggctatttattcttagataaatcatgtaacctgtttgaccctcagatccctcatctgtaaagtggccttcatattgtacttccttggggatgtggagattaaataaaatattatgtgttaatttatacatactaaattaggataaatatcagttatcagcaccagtctctaggaggttgataattatacagctgtttgaggtagcttgttgcggggagaaagccctagaatagagtagagggattgaatctggaaacacaggttgaattctatttgaagtatttatctttttttttttttttttggtgagataggtctcgcastgtcacccaggctggagtacagtggcgtgatctctgttcaccgcaacctctgcctcccaggctcaagcaatcctcccacttcagcctcctgaatacctgagactacatgcacgtgccatcacaccgggctaatttttgtatttttttagagacggggttttgccacgttgcccaagctggtctcaaacttgtgagctcaagcaatctgcccactttggcctcccaaagtgctgggattacaggcatgagtccctgtgcccggccattattttgttatattgaaatgttatattgaattttgccagaaggaatggaattattggctcaaccataaaactgtttttataatatagatacaataattaaacctacaattaagcttatataatctttcaggtttttcagaactctttcatgcatatcattttatttgatgaaatgggatttctctgccaggtatggtggctcatgcctataatcccagcactttgggaggctgaggcaggaggctcgctgagcccagaagtttgagacaagcttgggcaacaaagtgagaccttgcctctacaaaaaataaaaaaaattgccaagcatggtggtgtgtgcctgtggtcccagctactcgggaaactgaaggaggaggatcagctgagcccagaaggtcaaggctgcagtgagccattatgtcgctgcactccagcctgggcaacagagcgagatcctgactctaaagcaagtcatggagggtgggggcagcagatttatcttatatatatatttgctttcgaatttggcaaattgtgtatatcaaagttagaagtctgataatttagtgcacataagcttaggtctttctgtcatcttttgagcagaggctggtttgaatctgcatctgttttgttgaatcaccctagctaatgagtgggaaatttaaaaaaagaacagagctggttgagctttcacttctgcatattcaatcctttggtatgtttattaaattctatggtattgtaatattgcagtctagctcttccagaccaaggaagtaggtacacagagaagaaaccaggttctagaggttgtggttgtgacatttggggatggcagtgttaaggaagtagccagggtgtggggactgtgggactgtaggagaccttagcatcagaggaaatgctatacaggtgccctctaataatgtaatgtgagcatgtcttctggaatttttagttttgtgtttgaatgttccatcagaagtgtctgacttaggatatcagtgcagaacaaggatttgctttttcgtgatgcattttgggtcagtttttttttgttgttgttaacatcgagtaagtacagactgagttatattttccatcttctccattaagatgaaatggacaacaagaggaagcaaacatgaaagcttgggtgagggtgggtcaccaggctgtggtgggcaagagcaaggagccctggggaaagtcgcacagcagttactctccgacagccactgagctttgtgggacagtgttcacaattgtgaatagtcctggttaaaaggtcttttcttgaaaaccaagcttttcatttggattctattccagaggcacaaaacaattctggggtcttggctttggcaaaatgacattgggatgtttatatcaattttctttagaaatgaaattttcatttctaaagaaaaatgtactgggtcagacttaattctggcacatctcatcattttgtgcaacttatgcaagagtctattaaaaggactmaccaaagagcaaaatcaccaaagcccttttcgttataaaactaaaggtctcagcatatgttggccagctcagaaaaccttcacagacggctgtgttaaccttttttaagaatgtaatttttttgactaaattactcaaaaggcattctgagtttagagaatgcctaatcttgttgaaattttaatttcattaaaattaaatgacaaaaaactccagtctttaagtcatcaagcaataacttttcaaaaagatctgtataaacatctaataatttttttctcttgtaatttaaatttatttttatgttcctcccacaacttcccgtcagctttgctgcttctacctaaaaagcaaaaagcaacgaatattggttagttaggccttttaaattattttttatatttgtggatcttatttgtatttttaatcccttaagtcaaagtgtattgtgttcatgactgaagtatgcagttgttacagtataaaattatgggcattataaggattaaacctagcttgtcaattgtgggtgaacgtcttttttattggartatgctacagtgtaaagataaaggcataacaactgttttaaattgtttttctttctcattttctctgtggtacgaaatatggtaaaaatacctgctaacttgccactgtgaacacccactctgcagttaaaacatttcccatagcctattttatataatgtactttctggatcccctcattatccagagaaaatcatttttcttttgagaaaattttttcttttgaagtttatccacatagcataacagggtattggtataagtctttctgccttatactttctcatcattcatttactctaaaattagtaaaagcaataaaattctgtatgtgcatgatrcatattttaagtaacctggaatattgactttaatgtatttctattattgtattagtaactttctttatctgtggacgttttaaggagagagaagggtttgctgatttcaatcaacaatcagcaactgaaataaaaattctaaaccatattttctcaaaaacctacctctgtaagttctgtaagttttgctgaattcaagaataactattctctaatttcttagtctcatctgtaatttagaatactttcaaataattttttggacttttataaagctttaaaaagyaataccttttaaggctttaaggttttaaaaggtatgactttaacaacattttaatgtaatttaatacccttgtttctaacagtttaagacttttgccaaatgtctttttattttttagtgttattttttgcactagtagttgttcatttcataaatatttatttagaacctactatgtggcaagctccattttaggttctggggatatagcagagagcaaagcagacagaaattcctctggttctgtagagctgacaattcattaatgtgaggtagtcaataacaaatatattttatgtcaagtggtgatgggttctatgaagaaaaatgactcaataagaggagagaaaatgatggtatgtgtatggtgggtaggtgtgcgtgatgctgttttggatagcgaggcctccgattagatgctacgtgagcagggacccaaaagagccatgtgtttcatctacctgggggagaagcctgctggcagatcctgttgaacactcgttacctaaatctcttgcattggctccatgtcatttattgctctagtgtattcttcactatcttttcagaaagtgccaggtttgcttttcaagtatagtatctgtcttgccaagtctggcagacagtgcttattttggtctgtactttgttagcagatcagttctatgttgagttcaaatgacactctggtttcaagagtgactctaattctttttctcctagaggaatagtaaataagccttatgaatctggtcagtgagtattgaagtattttaaaaattccttatccagtgaaaatgcatccatgattctctctgtgactttacacacctttcctcaagcctatcccaaacccaagtcaacactaacaatcctaccaagctattcaaaatgaagagtaacatttattgcaagttttcttgtatgtatgtcaatgtgtttgctagcactgcaatgctgagttayttaattaaacctttccagctttctaggagtgttatcctcrtgttttagacaagtacagtgagacacagtaagggtatgtactttatccaaggtcgcgggaatagtaagtggcaaaaccaggaagtgaaccctggcagtctaagctcacatactctctaagccacacaacacagactttttgagaggttgtacttggaatgggattgcattagccagaaaggggctgagtgggccctctggttcagtgttctaccaaagttaaataatatgtgcatgggccacataaatgttttaatatgaattgggtgaaagttcctcctttaacgttgtccatagattggaaatggttcctgtccacaaggttgtgcagttgatggttgttacaggccgaaagaatgaggggtcgtgatcaactcactataccactggaggctatatgagtaaacagcaaactgttctcatgaaagcaggatgttggcaaaatgacaaactgcgctacccagaaggaatgctgagggcagtcacgacccaggcacaagtgtttcttgtgattaggcacatctgaagtctgttagcaataatctgaacctgtgatcaattaagcagctaaccaatcgttacctcctcctccctgctcttgctacccaataaataggaacagtggtagaagctcgggggctgcctttgctcgttagaagcaggaagctctcttcttcttccctggttccccttcctttaaaacagtttcttttgtcttaagttttcatttctaggttcctcccttccttcagtcttgtaatgatggtctcaagcagtaacaatrgtaactgctgtaatgacgatctcaaaatagtaaccatggcagtcggccacggatggatctgtattcaccacctccatggtccctttcctgcttttgttaatctgttcccctattaaaacagagaaggcctgattgctgttatttgcacctgtcatctttgcactgagtccccagtttttgtggtgttccccccaaccaccaccttggggtgaattctccttcctggttttaggtttccagtccccctgctgtcctccaacctcttccccatgattaaaacaggaaaagcctttgttatctgaaggtttctctactgtggacagtctgccgagatggcagcagttaggtacagctaaaaaagttcaagtaactcttctggagctttgggacatatgttcactcctcatccttagcatgggtcatcacttgtttttctcacgccatataattatttctcaggtttagacccccaggtacacaatactgctttccagtatgtttggcataattttattaggtatttaaagcatctttgtaccataatcctccttatctgacaaattgaaattcattttaatggtttcttttaccctatgaagttttaatgaatggggtctatggttggagctcatctttgcaatgagtagagatcgtgctgacattgtatttgaaaatagtgtttattctgggaaggatgttatgcaggataatacaagagttttcagaagtttttatattttatttagggtctttgcaatgtgttgaatcactgttttagttggaaatccaggttcatcatattgccatttatttttttaaaaaattggtacatatctcggcatggaaagaggatggtattctggttcctcaacaagtatccagagaatgtaagtttttatctttgttttagacttggggtacatttctcttatttgtccaagaggtgccagatggacaaatcacagtacagacatacttcatttgcctttttaaaaaaatacaaatttaaagtttgtggcaaccctgcattaaggaagttgattagtgccatttttcccaaagcatgtgctcacttagtgtctctgtgccacattttggtagttcccataatatttcaaactttttctttgttgttatatatgctatggtgatctatgrtgtgatctttgatgttactattgtaattgttttgggacaccacagaccacacccatataaaaagctgaacttaaytgataactgttacgtgtgtgttctgactcctccacccatcagccatttccccatctcttttccctcccctgagaggcctccttattccctgagacgcaacaatactaaaattaggccaattaataaccctacaatgacctctgagtgttcaattgaaaggaagagtcacacatctttctttaaatcaaaagctagaaatgattaagcttaatgagaaggatrtgtgcaaagcctaggtaagctaaaagctgtgccgtttgcaccaaacaattggccaagttgtgaatgcaaaggaagtgttcttgaaggaaattaaaagtgctactccagtgaacacatcaatgataagaaagtgaaacagctttattactgctgtggagaaagattcgtggtttggtggaatatcagaccagccacaacattcccttaarccacagcctaatctagagtaagaccctaattttcttaagttctacgaaggctgaaagaggcaaggaagcttcagaggaagcattggaagctatcacaggttgatcatgaggtttatggaaagcagccatctccataacataaaaatgcaagataaagcactaggtgctgatgtggaagctggagcaaggtatccagaaaatctgcctactgtcattgatgaaggtgactacactgaacaacagattttcaatgaaggtgaaacagccttctatcggaagaagattctgtctagaacttttcttagctagagaggagaagtcagggcctggcttcaaagccccaaaggacaggctgactcttgttaggtgctaatgcagctgatgacttgaagttgaagccagtgcccacttaccattccaaaaatcctagggtcctgcagaattatgctaagtcaactctgcccgtgtgctataaatggaacaccaaagcctggatggtagcacgtctgtttacagcctggtttactgaatattttaagcctactgttgagatctacctctcacaaaaaacattttccatttaaagtattactgctcattgacagtgcacctagtcacccaagagctctgatggagatgtacagggagattaataatttcatgcctgctaatgtccattctacagcctgtggatcaaggagtaattttgaccctcaagtcttactatttaagaaatacgtattataaggccatatctgccatagatagtgatttctcttgaatgatctgggaaaagtacattgaaaaccttccgggcaagagttaccattctagatgccattaagaacattcgtgattcatgggaagaggtcaaaatatcagttaacaggagtttggaagaagttaattccaattatggatggcttgaaagggttcaacacttcagtggaggaaggagttgcagatgtggtggaaatagcaacagaactcgaattagaagtggagcccaaagatggaactgaattgcagcaatctcatgatgaaacttttaatgtttgaggagcaaacttgaacagatgatgagcaaagaaagtggtttcttgagatagagtctactgttggtaaagatgatgtgaatattgctgaaatgacaggaaagaactaagaatattataatacatgaacttaattggtaaagcagcagcagagtttgagataattttgaattttgaaagaagttttactctatgtaaatgctattaaacagcatcacatgctactgaaaactctcccctgagaatgaattgatgtggcaaacttcattgttgtcttatttaagaaattgtcatagccatgccatttggccaccaccgcagccatcaatatcgagataagaccctccaccagtgtgacttgctgaaggctcagatgattgttagcattttttagtgataaagtatttttaaattaagattatgtactttttttgacataatgctattgcacgcttaacagactacagtgtaktataaacatgacttttatacgcactgggaaaccaaaaagtttgcatgactcactttattgtgatagtgtgaaaccaaacctgcagtatctccaaagtatgcctgtattcagttttcctattccagtgatatggtggttgtaaaataaaagtatttcctccctctttctctcccctcatttctccatctctctctctctgttcctctcccttctttccctcccctcccttgccttatttcattcgtttcttctttccctcctttctttcttccctccttccttccttcatttcatccatccatccatccatccatccatccatccatccatccathagcaaacattaagtgctggatttcaagattcatagacatgattcctttttcttaaggtacagtaggttagtgggaaggaatatagggattattttatggtagtataagttctttaatacaatttatactaatcatccagtttaacattttcttacctttctattccttgacacctgaggcttaaaatttggatagaycaggcatcagcaaactgataataatttatacatttttaaatggttggggaaaaaattcaaaagaataattttatgacacaacaattctatgaaattcaaattttagtgtccataaatagttttattggaagacagccatgctcatttatgtgtgtattgtccgtggctactttcgtactacaacagagttgagtagctttgacagagaccatgtgacccataaagcttcaaatatttactctctggccttttatggcaaaagtttgtcacctcctgctttagacatcttttttcccctagaagttcctgaggataattgattgtggacayatccaactatgttccaagacatgggctggggacacaggaaaaagcaacaaacaaggagaacctgtttcccaccatcacagagctcagagtctagcgagtggaatacaatacagagaacaaaatgagccaaaatagatcatgaaaagtgtgatgaaagaaacatgaatacagtgagagaaaataggagaggggttttcagatgaggtgatctaacgacgaaacacttaggaagcacacactcacactccaaagaatagcagaggtagcggtcctgagtgctccagccaccagtcttcctccagttttcctcgggaaatggcaccattacctactcagtggctgaagctcacaatctacgacacatttttggttctcacttttcctcacattccctccttcctctccaattcatcaggaagttctgttgattctacttccaaaacatagttcaattttgtctgttttttaagtctattaccaccataaaccaagcctccatctctcttagctgaactcttgtaatcactcccttgtctgtctagtccatcttctgttccctccaccactgtctattttccagccaagagctatggttttttaagaacttgagtctgggccgggagtggtggctcacgcctgtattcccagcactttgggaggctgaggcgggtggatcacttgaggtcaggagtttgagaccagcccaggcaacatggtgaaaccttgtctctactaaaaatacaaaaattagccaggtgtggcatgcacctgtaatcgcatctatttgggaggccgaggcaggagaatctcttgaacccaggaggtggaggttgcaatgagctgagattgcgtcactgcccaccagcctgggcaacagagtgagactctgtctcaaaaaaaaaaagcttgagtcagattatatcgtttctttgctgaaaaccgtccatgcttttccatagccgttagaataaaatccaaacccattacatgcctgttaaagaagaarggaagccaataaggcctgaacatggggattgtctgatgtgctggactggatataagatggtgtaagaaagaaagatgattcctgtatctctggcttcagcaaatgtgtgaaagatagaaccagttactgagtctaggaagaccaagaggaataagtttgttcattgaaacaaacaaaaaacaatgtgggattgtgttctctctctctctctctytttctctctctctctmtctatctatctataaaaaaaaatctgtttatttttgagatcgagtctcactccatcacccagactggagtgcagtggcacaattttggctcgccacaacctcctgggctcaattgatcttcttgcctcagcctccagagtagctgggactacagatgcgcgccatcacccctggctaattttttgtatttttttgtgtagacatggttttgccatgttacctaggctggtcttgaactcccgggcccaarcaatctgcctcactgacttcccaaaatgctgggattacaggcgtaagccaccgagccgagccctgtgttttaatcaatttaaattttaggtgtttctgatacaattgatttcaataaaacatttggaccattgagtatggaatcagaggcaaggtctgggctggstatatagatctgggagttgtcagcccatgaggggagtttaaagccatgagactggaagagcttcgctaagagaccaagtgtaggtcaaggagaaaagtggaccttgarcagccctgaggtctgaactgggggttacttcttaagggaagasaagagtccagtggaattcctccacagggactgaaggggaaggaggcaggagttgtgctaatttatccagggaagcagttctccatcatctttagaggaagtgggaatctgggctggacaaaagccaaagattattaagagcgtcttctacaaacaaagtctctggctaatctaaatttaattctggatcttgtaatatatagtttaggagttcatttaaatttaatttacatagggtgaaaataagctttgacctttataattsctgtatcagtaaagtcacaggttcattgacttgttagccaatttttcctgtgttacttttcttctggttttgttgttgttgtttcagtttgtaatatacagatttaagaacaagtgtctggatatccacaaaggcatcacagacagctgacatgtggatctgcttttgtttgtaattaaaatgggcttaaatctcatcccccttacactaagtaaaatatataattagaatttttaatatataataacttttaaatatctcattgtaggttcagggaaggtaatagtattcaattagaggctaaatgccacctcctacacaaagccttctaattgttttgtatagatggtgatctcttttcataaggcattcaatayagtgatctggaaatcagtacgttaatacagtgatttgcaaatcactgtactgtagctgttaagcatattacctctggagctcggctgcttggatttgaccctggcagtgccacagacaagctcaaatgacctggtaaattatttcattttggagggccttagttttctcatctggaaaatggggataattgtaccaacctgatggagttattgtcaggtttgcatgagacaatctatgtaaagcgcatgtcctgggatcagatttaagaactatttagaaaaaatgtctgtattaacacttagctaaaatacgccactgatttgtaaagatattattattagcatttatacctttcttgtcctcagagtgatttgatgggatatgggcaatattctaaacaatattaaatcaggaaggctttagttttctaacatacaaactctcagagagctraagactaaaaatttatttttctttgtataaccagtacctggcacaatactaggctattcatgctttgttgaactgagggctaaaactcagaaagttgatatcagagaattaggatgattggggcaagggctggcacacgccatctgcttgaggggttgtgttagtggctgtgcagaactttccattgcatcattacttttgttttttgtcaagaacgaaaggtatataataaaagttggctcaagagaagtgaaactaaagagaaaagaggaaaaaagtgaagatgccaggtgctcatgcctgtaatcccagcactttgggaggctgaagcaggtggatcacctgaggtctggagttcaagaccagcytggtcaatgtggtgaaaccccatctctactgaaaattcaaaaatcagccrggcgtggtggagtgtgcctgtagtcctagctactcgggaggctgaggcaggcgaattgcttgaacctgtgaggctgaggttgcagtgagctgagatcgtaccactgcactctagcctgggcaacagagtgagattcagtctcaacaacaacaaagtgaagaaagaattgaaaaagaatcgaagaaagccctactctgaatgagctcaaatgcgtctcagcatagaggaatacagacaagtgtgccagttcttcttgtggagaagcactgtcccagaagacgggagttatcctgtgacctgctaggccaaataggcttttggctggactaaagtagttgagcctctaaatgactttactctccttcagctccgattctttcaacacaggggtatctaatttctaaaaccagacccagtgggattgagtggcttgcccaaggtcacaagcagtcaggcccctgttaggaagtgccccctcccatccagagatgttcagctctaaaataggctgcctaggccaggcgcagcggctcatgcctgtaatcccagcactttgggacgccaaggcaggctgatcacctgaggtcaggagtttgagaccagcctggccaacatggtgaaaccccatctctattaaaaatacaaaaattagctgggggtggtggcgggtgtctgtcatcccaactattcagaaggctgaggcaggagaatcgcttgaacctgggaggctgaggttgcagtgagccaagaccacaccattggactccagcctgggcaacaagagcagaactccgtctcaaaaaaataaatatataaaataggctgccttctgagatttgccagtctccctgtcaccagtagtgtttcaggcacaatgagaacaatcacttgtcggggatactgtaaagaagattcttggraaaggatttgatgacctggaaggtctttacacgttaaagttcaatgattctagctccagtttcatggatttaataagacagcctctcttcctagctccttttagaaatggatctttgaaagccttttgttttatgttctatttaaaatagcaattagctttgcatcgcaggtactttacagtgcaccatgtgtattattcttgtggaatattagttcaccagatgatagcccacaattctagttacatatgaagtggtggtgtggtgaaataacattgcagctcctcactaaaccaaaaactscagcaagcttgtcrcagagagaccctcattttcccagctgtcaacctgactgatattttaatttttttgccctgtagaaaacttcagtctcttatccaatagataaatgagtgaacccccaggaaatgcagcagaatgtttctgtttgccaatgcaatgaatgcagaagctaataaatgtctacttctatcaggaggaggcgtgtaatgagtaaatgatgagagaaagaattcagggaaacaaatgatcaattcagtctaagatgacaaacaatttcctaataacttggcctctagttggagagagggcttcaccaggcaaagagaatgcctgttgaaactaagcctagcacaaggccatttacattcagctgctgatggatttggtctggttacatttgggtcacactgagcaataaggcgacrttcagacacagcstggttattgcagacttttctttgccctgtaatgtctatgagtgtgtactaggaaaaggaatcatttcagagcctaattcacattattcaccccgattccatttatgtttcacatttgtctttataataaaaatctttttcaaagtaaagatctagtctctttctcttgaaatgtgttcagatcacaagggtcacacaagaacctcttttgtgtagagtgaatatgctgttctttaaagacttttgtagacctcagctccctaaatccccagtgtctgcctttgtgggaactaacagaacgcatatgctttgtctctcatggatgggtgcattcttgcttataggtcttgtttggaaggacttggacctacactaggcagaatacacagtaaatgagatgggccttggaaggagacttgcagcccacatggaagatgtgagaaagtgacatcatgccagactgaaagatcatttgatgaaatgcattttattatcaccccttggtgggatctttctaagaacaattctcagaaaagccacgtggcaaagattggctactaaataccagcagttttcagggacagattttcatgaatatttctagaagactatcagacttgtttactggtcctctatagctatctttttctccccatcccacccaccctcttcttttttttctttcttttttttttttaaacaaatatgacacattctggtgtatttcagtaccacatgaatgaactgctttgctgcagttgaggggtaaaacttttaggtagagtttaatgcaggaaaatgctaaggagccaccaaatagaagctggacacaggcaatactgcagggctcttagtgtacttggtagcatataaaatacaccttagagactccggaatcctgcacactgccttctgagggagagccattatacctgcaagctaagacttttcaatgtgcctctattcacatgcatatttctctgccaagtctttcaaaaaggcctttcctttgaaatacaaaaagataaacacatctttgaaatagattgatgrtcctttgccacttttgagctttctccaattcatatctgagattattaacccttaagactgacttttctgttcacctgtgtaactttacgtgtgttgctagcactagagaaaaccatgtcacagttatcattaacatctcagtttgtgctaaaattgatgaaaagaaattaaacttcagatatgtgtatcatctgcattggatcttctttttcttgggtattgtggtttggttaagaaataaatataaaccctccatggtcaacaaaaggcatgacttagtgaagtactctgtagggtaccatctactgctttgtactgaaagaactataatattttaaacctcaagacctaaggccttctagctctggacttagggactgatttatttctggcacttaatatcttatggaacaccagcaaatgtgtgaccttgtttaaacacaccattcctggtaggtaaaataaagatagtggcccctaactttacttccttcttggctggtttttatcataaaatcaaacgatatgaacataggaaatacttgattcctaacaatatttgcttttggacagtccaagactcaaccagctctcctatgctttcaactcttgccctgttagaattgtgttcccttgtataggaagaatctccagagcctcccttctttccagagacttttgaatatgaatgttagagtacatctcagtagatcataagcagtggaatcacataactaaatttaaaaaaaaaaatctaattcaggtcctaggaccttactctgtagaagttgcattcagtaaatacttgagtgaataaaaaatggacattgacccacttaacaaatggcagaagaatttcagagataccaataataaatagggctttaaccttcataatttaaaattggtttgtcccccaacccccttttgaaaattaatccccactctctcatctgtattgaccttgtggttgcataggtttgtactgtgccaaaagggtagatttttgtttttacttttttgttctagaggagagttggtacagtttggaaaatcataagaaactgttgcgtaactgtccttattcttatatctgttcaccaagggctaaaacttaaaggaatttaaacatttcttctctccttttttctcttggggaaagggggaaaaaacaaaccaaagtctaagcagccctatcattccattatatgaataatctattagttactttagctattttctgtggctaaatacttgtttttcatttttcagtatgatgaactccacaatgaacaaatttttagctaaatttttrtatacattcatgattatttcacatatttccagacatgaagcctttgagtcagagtacattcgaaaggcatttgaaacatgttgccgtaaattgtaccaatttatactcttactagcaaatgatgagggaacccatttcctcatttactcattgacacttaatgcatctgtgaaatgaaagaaagcaagtaagacagccagtttgatagggtaaaatcaaatgattttaccaatctttgtctttcaagtttttcaaatgctactatcaaggaaatgtatgtgctagacacctgcagtctagcccttccctgtcctactccccagtcaggagacttgaaagaatggtattttctgttaggtgaaatctcagcttagaatataatacaattcatcctagacttctgagagtgcatgatgccagtgataaaagtagatttacaatgagacactgtcttggatagtaattctataccccttgcctgcaccaatcccaagactgtcttcattgaatatagatattaagtgtgtgtgttaaaagagtgagcattgtagttctttttatttttatttttttgagacagaatatcgctctgtcgcccaggctggagtgcagtggcgcgatctcagctccctacaacctccgcctcccaggtccaagtgattctccagcctcagcctcccaagtagctgggattacaggtgtgtgccaccatgcccgggtaatttttgtattttttagtagagacggggtttcaccatgttggccaggatggtctcgaactcctgacctcargtgatctgcccaccttggccctcccagagtgctgggattacaccgtagttcttaatgagtaaatctgtcttactcatttgtgtcaccttttatatgtcaaaaggtgacacagataacttcctgagcatagtgattctttgagcttaaggatgctttgccttgcgtacaccatcagagcacctcctcattaaggcttttgcttgtcactctgcagcggtcagtcggagttgtttcatcttcttattcacttagagagatgtgcacagtctgggatactgagcttgtttgtggcactcatcctttatgagaggtgcgtattttctgtggtgctggaaaggtattacttttgagcaaatagatttgattctkctggaattacagctcakctggtgctgaggagcacagcaagtatcatgcctgtgaaagagttcagaggtttgctcaatcttcaggaaagtttttcttaggtagattttctgaatcagaatgaattatttatgttggcctctattagaatgtgtctatcttttcttgctagagatttgatgcaatcttattttaaaaagtcaggttctaggcaaaagtgggaggaaggcaaactttgtcttggcctctccagctactctcctcaggattcctttctccaccaacacttctccttcctcacaggactccttctgtagtctgtacacttaacttttgttctggaaagcattcttgttcccacctgttggttatgagtctctgtagttaattgataattagctgaagggtaataactggattcactcagtttttctgtcaacctggattccaaaraaataataattcaaggtcttctgattctttatgaraatctttaaaatttgttttctctgtcctgtggttatttctatgattactataatcatattttcggtcaataggatggaccttacaaatttgagaaacactaggttggatgacaaaaatacctccctcccatggcattgacactgtaatatggagctcttgaagacaagaaagacagccaaactgaacctggttatctctgtgtactgtaattggttagctgtttggagctctctgtccaatagcctttcaagggatcttcagccttccattcctaggacttacccctggcctggcccatattagctcttcagcagtagtgcttcttgaatgaatgaattttaggttggcttctctgagggctggagaagaaggtggaatggtaagccaatatcatccaaatcagcatctgttataaatccttcagattattaatataaaattatgaatgaatgcagggctaaagagtgttgctgttaaaggagctaatgtttgtctgcttcatctacggtaaggctgatcatttatggctttcgtcttggcccacagttttcaagaggactctgtgtgcacgtgctcctcctgtagctgagcaagcacaagagagtttgttagttttatagagttcctagtcataggagatgatatgagaccaggggtaaaatggagtgcaagcctgagatgtgttggcaatacgaatgtgacacgttctgtataaagccatccagtggatgtgctattaaatgtgcacrtggcatcacctcattgagcacttcccaaggaaaacttatgacctggagagtgactgtgtcacatcacacagcccttgagagaatgggaggttcctgtgctggttccatgaaataatttaacagttactctagaggtcttgcaagacatcacagtaaattcttgtgataacccttctgataactgtgaaattgctttgtctcacccttgtagaataaacaatgagacatacaaccatgtcaaaagcagaaaggtctcaggtgtgtaatatagaagtccaaaaggtgagtgtggatgactgatactgctttatcacagggagaagagctacaataatagaaggatttgagaccttttattggcattattattaaaaagaataatagaaaaattaataccttatatttgcgataaatgagaagtcccaatctaagcatggaaaatagagaaaggattagagtcactttcccagtaatatttagataactttcatgcatgatgagaatttacttaatacctactggaaatgaaggcatatttttctaataaaaattatacatgcccaggctaaaaccttaaattgttatagaaggctataaaagaaagaaaagtatcttctcacatctgtaacaactgctccttgcagaacatttctgggtatgtgggtgcatgtatttttgcttatcattttataaaatattcaaagtgttttgtacctttctgttttcttcttagacctctttccatatcaaaactggtaggttcctcttattcctaaaggggtcagaataaacttttacaagtagagaaatgaagcttgaattgtctgacacaaatagctagagaaatttaaaggaaataagatcacaactaacttaagaactgaatatgaaggtagatacttcagagaaatatagggctttagagactcattacaaaaaccacttcctagaaataaaaaatttccacatagtgatccagtggcactgtaattctttactaactatgtatttatgtgatttttaaatttatgtccgtctccttcatgataacgttaagtttcataaaagcagggccattcatctgtttgctcagcatcatattccaagttcttggcccagtgtctggcacagacctttagtattaatagaagtaaaaaagtgaacaaataaaaggaaacttagaatgccaaatgagtttttggtgcagttgtttattttaattccccagatgaagaaactgaggcatgaggtaatgtaactaaggttttccttgtgtagtggcagggctgtcaatgaatctaggattcctattctaattagaaaaccaaatcaagaaaaaaaaaaaaacaaaaaaaaaamcctgagactctaattaatgaagtttctaaagctcctggaataaaactagaaatgccagaagcagctctaaatagctctgtttctttatataagaaagagtaaagatggaacgaaagggtaattataaaagcagtttattaattttgccaagscacccaggagataatggggttttcatgaaatgtgacttctcagagatggtaagatttgatgctagagttcaacatggctttgacattttttaattcttcctgttctttgttggaaaaggagagaggcagaaggaaatggagattcctgacaagtagaagtgaagcattactgcaaaggagaaagttgcttccagtgtgtcattgcatttgactttattgaagttattcatgaggtgtacaaaaaagcaaacatcttagggcttacagaggtctattcctgattactttcaccctgtctatcataaaaatagaatggctgacataagaagtagatttttttcttgtttaayaaaaggctggcatggtggcttcagtgtcatcagagccccagacacctattattccattgcagcaccctaacacaggcttttgctctttaaggtcagcttatgtcccaagatggctgctggagctctggccatcacatcaacattgcaggctgagataaagggctgaagagatcccctgtcagcttagatcaactccctttaagcagcctactgggaagttccatataacacttctgcttacagctcagcctcactggcagcaagcttggaattctagttttgtttaccatatatctagcttaaaactagggttatctaaggaggaaggagagattttaagataaaccagtgagagtcttgtttccataaggaatcttaatttggcttaactatggaatgtaataggatttttgattcattagaaactgctaacttggttatttattattgatgactggtgatatggatttgaaaaagaaatagggctgagacaaattatgattcactcatccatatacacaaatgattattagcagaaatttagggatacttaggataaataactaggtttttgagttcagtgcttacataaaacaaatagcaatgctgaatgttagatacatggagatgcagtttgaatccatccgcttgatgattgttcttcaggttcatgcagagttgcataggtaaatgaatggaaatccaggctctttggattacctagggagccaagggttgctggcaagaatggtrttgtgatggagaaccactgccttccacaaggagaaaccaggccctatgccaagtactgaacttacatagtcccactgatacagtcatcctgaaagataaagtcctcattttagatgttaaaaagcgagactcagtttaaataacccaaaccattccttagtgtacctttcagaaacagaatactggatctgatatactgtgaatatgaaccgatgttggcaatttgcaatctatttaaattagctttgatttttctgtctgaggacagcattctcctgggrgcattgagtaaagacggagggtaggggataaaaggagagagtccagtgaagtggactcaaggccataggtttaagaagtttcagtaataaaatattctttaaggtgccagctactctattggagggctgcttttcttaccaagaatttcaaattccttctgcttttctgcccacctataacagacttcagagtatacacacaagaaaggcagaattcaaaccagtcattaggttttctgatagaagaaattttaaaacttctagataaactaaatttggactattactgattaaaaaaaaccatagcttttaaagttctggtagaaaatgtagttcattgcaaagtcaatctcttgattctgtgtaattctgtaaaaagacagaatggttgacaagtcatgaactccttctgaacacctgatgccactgagtaaataactgtttcagagcttctgtgcctggaattgtatctgcgcagcaattaatgcagcattaaattgggtccccaagygcttaactctcacctttgggaaaacatacttgcctacatctagctgattatgtatcatagttcctgggtgaggattataacaaaaactataattaagacttttgaatctggctactcaacaatgggaactgccgttatttgacattggtgtttgtggcaccctggacctctttgttggaattggctgccacctagagtgacacttgtgtttgcttgtgttgtaggaggaagaagaggcctgcagttgttagcagtaactatagaccagtttagacacaggacagtctcaccttcagccagtgtggtattgtaccttgaaggtacaggaccagacttgtttctgccaccattctcttggtgctaaggatctgtggagttgccaccatccttgaayggacaggcaatcgtcttgttcttttcygggaaatagtgtcaggccaccagaatttaaattgtacttcagccctcatgtgttacatagtcatgccctaatctccatatgaagcattctataaaagaactgacaagagccagttacatttttcttatgacctctttgatttgttctttttgtacatgcgaygggtatgatcatactagttataataaaacaagattcagaatctgagaaaatattgcacgaatactgtgtgtgtatgtgcatgttttcttttgatcaaatttagaacttgaaaacagatagttttcaaatcgagcaataatgtgtatctgtgcatgtgcattttaatatacacttttaaaagtgagactttctgaaaatggaaaatggcagtgtatcgcacattcaaaatcctgggccacggccagcccagagaaacttgggaatgatgcccactcttgttgattctcgtttccttccgtacggtctagaaactttgttcttggggatgaagatacmagatgggtaaatcccccccataccccaaattagtttaaggagagattggaaagaaatattggaatacttgcatctaaaatcaaccactttgttttgtacttgattttgtgctgtcacctcagctctctgtggcaggtacaataaatttgctcagtaaacacccattccaaattctttcttccttcttctttaccctagaagtgagaaaacaaaaataatcaatttcctagcctcctttgcagctgggattcccagcctcctttgcatgatataattgtagccgaaggggtggaagtacgaatctctggacctcccccttcctccaccctgaggacatgggcataataactgcaggtgcagtagctaccttgaaccatgaagacagaagtcaactgctcggggtggctacaagggaagacagaagagggggcctagttatttgttgatacacttgcatagttatatcagccctgagtttcccatccagatttcttattacacgagaaaaataaaccccttacttgtttaagctactgtttcgagcttcaactgttactgtactattattgtagttgaacacatcttaagtgatatacatttcctttttgtggtagcattgcaggctgaagtgtttgtcaatttgtagtagatataataaaggtagtatttcttttcatcctcattataacattatttcatttactttagacttgtctctatcccatcctgttttaaatatgagcaacagttgaagtgctgtttagaattgcaggtgtcactctaacattatttctgtgagtttgtgtgtcatgtagtttgctgagtgctctaggtataatgatgaataggacaagatacctactcctaggtatgcttatggagcttatggactaggtggggaccacacagaaatacatgttggtacagtgtggtaagttataaaagtctcttctttgtaagaacacagagaaggagcataatcagttagcttttactatataatgaactaccacaaacttagtggcttaaaacagctaccattttactcacatcctgattctgcaggttaccaatttggactgttatcarctgggctcactcctgctgagttggctgaggtttggctgctctaggctgtcctcaccatagatagcctgtagtctctctcccgcttgcaggctagcctggggtgattgacatggccctgtgcagggttgcaagagagaggcccaggtttgaaactggtacaccatcactgttgtygtattctggtgcccagagcaagacacaaacacagcccagactgaagggatggggaagtaaactccatactctcatcatgagagaagctgtgaagtcatgttgctggggtcacggatatagaaaagagtaaagcatggtggccatttttgccatctaccactgggttctgagagaacaggggagggtatagcaataattttcttagaggatttcatctcagatttttaaaattcaagataatagcatgcccttctttattaatactgaataaaaggtgataccatcaatcttcatcagttgtggaatcatttttcaatattgccaattaccttttgaacatcagtttaaaaaataacccataagaaaatgccgctttgagaaaagaaaagttgcatgccggaaagtacaggattgacatgtggttggacttttctttaatctggcgtttctcatggaccattttaggagattctcttccctcargatgctccatgagcaaatcagtttgagaatcatgaacagtagttctcatcttagagattcacatatagagtaaaaagcaaggccttgggaagtcttggcattaaagtactttggctgttcaatgtagttaattggatttcattagtgataaggtcaaatgttattggtttgatttttttatatgggctggttagttaattccgtagctattaacgctcctgacactggtccactattgtcttcatatttcccatccrtcttaaggaacagaaaaacagaacaggtaagcagtgtgagcaacattcaccaatgtctggttaatggaagaataggcttttgttttacagatttaaatttttattaaaatggcttttttaaaaaaccaccccaccccacactatacagtttttttccccctgttcaaataatttttaataataggtcrcattcctaagtccctggtgctacaaagagttttacatatattaccttatttaatccccagagaatcctattaggtaatcattgttacactaktcctgttttacagaggaaaagtaactgttgaggttaagtaacttactcagtttcacaagggtagggccatgatttggccatctggctccaaagtccatgttcttaaccaccatgctgtactgctaacaatcgcccacctaagtgcggagttctgtggacgacatatgcataggttttacaggaaacgtattaaaaagtatgtacaatggagcattcagtctccccacacagtttgttgcccatgttttcagtaattgatccatggtgccttagattggaatgtgttttaatacagaaaatcaaaatacctattgtttccaatgatgccttgtctattaaaataggtgacagaaatatcttccaaatatagagaattatattgttgttttagatatagtttacctcctaggagcttacttggcttatctttgacaaggatgtgcaagtctttatcagatggttgatagtgctaacacatctaagaggtactgtcattctactttaaatttatgagatctaccttctcaaagagtcttgatggaaaacatgttttatgcttatatcaaacaataagactttctgttttaaagaaagaaattattaaatcacacctttgatatttgaattaaatcacatktacctgccacaaatttacattaaccgtaccattggacaaatcatgtcaagtattttttctgctgtttatggggcaggacaatatgcagagtgaatatgaatgaagatagtttttattttagactgtaaaggaccttataggcacagaagtgatatgttgttacacacaaaaaaatgattattcattagaagatcaccttagaccaccttgtaagatcatggacatctttctttctccacatttttttgttttttttgagacaggtcttgctctgtcgccaaggctggagtgcagtggcacaatcttggctcactgcaacctctgactcctgggttcaagcaattctcatacctcagccagccgagtagcagggactacaggtaccygcaaccacagctggctaatttgtatttttagtagagatgaggtttcaccacgttatcctggctggtcttgaattcctggcctcaagtgatccgcccgccttagcttcccaaggtgttgggattacaggcgtgagccacttcgcccggcccgtttgttctctttatttatctttttaaggtcatcttaatggatttcttccccattccatatactgtaagtaattactcttaacaaatttgggagggaatgtacacatcttctttggaaataggaatgtggttgttccttatttgagcacagatcatacaagtcttacaattcagctattagtaaatgatcagacaaattgatatatatcctactacgaactgcagggttaaccaaagaaaacagatgacattaaagtaacagtcatctataattaataaacaagatagcagcatgtgcaacctattaccatctcaagacaacagagataacaaaagcaacctttctgaaaatagttgtgctcctacctctcagtacccattcagggtaggaacattgtggtgttgctaggcaatgtgtgaagacagagttcttggaggagtttggggtccaccagtgatctgccaacaacattggcagaatcactaatttggagtacctttgtaaagattatagctatatttaattatgaaaagtggttatttgccatcattcttcaaaaacactgattttttttcactttgaatggcaagctaaatactatattattctcgcattgttctagaaaccctgtagtttacaaatttagtgtgtgtattcagaatcacccaagctgcttgtaaataatgcagcttcctggccccatccccagagattcaggatgtggcccaagactctactgtttaataagctccataagtgactctgaagcaggtggtccatagaccttgaaccaagcgctcacaacaaaaattagctgggtgtggtggatgtgcccctgtgatcctagctactcgggaggctgaggcaggagaatcacttgaacctgggaggcggaggttgcagtgagccgagattgtgccactggactccagcctgggcraaagagtgagattccatcttaaaacaaataaacaaaaacgaaagaaatctatgtaccatcagaacactacagtaatcattgctgcaggcaggactcgccagtggataccaaaaggtgatggacaaaactttgagaagaaacagaccatttgtatagtctcaaagtatctcctgcaagatatcaattacaggaaggaaaaatggtagctttgttgtggagaatccccgcagacaccactttaatcaggtaatcaaggtcaacctcaataaaaagatctgttgccataaggtagcccctgaaatcaggcaggagaaaggcatattgcttctgtagaattcttcccagtagtgcataaactcttaaccatgagaaaacgccaggtgagcccaaatcacgagtcactctacaaaatatctgaccagtattcttcagaagtgtcaaggtcataacagagaaggaagactgaggaactgttacagatgagaggggactaaggagccatggcaattaatacaacataggatccaagattaagtcctgaaacagaaaacgaacattagtgggaaaactggaaatagctgaattaagtctgtagttcagttactactattgtaacattgttaaatcattacctttgataattgtattataattatctaagatgtggacataaggggaacctaggtgaaggatagatgggaatcttttgcctattttctgtaactttaaaattttttcacaataaaaatgaagagagtatrtttgcttagtattgtgtatacactgcaacagtttagtattcaagaatatataaaatccccacttagccaaccttttcaggatgtgcccgccctgcccaatacacttttatattctagccaaacaaaatcttgtattgttaacccctttggagggaggtgggagtaatacaatttttgtctgtattataaaatattaaaaaaaawttttttttttctcgagatggagtcttgctctgtcgcccaggctggaatgcaatggcgcgatcttggctcactgcaayctccacctcctgggttcaagtgattctcctgcctcagcctcctgagtagctgggattacaggcatgagccaccacgcctggctaatttttttgtatttttagtagagactgggtttcaccatgttggccaggctggtctcgaactcctgaccttgtgatatgcccgcctctgcctcccaaagtgctgggattacaggcatgagccaccgtgccyggcctataaaatattttaagccaatgtaatgactagctgcacgcccacacctcatttttaaaaatatagcaacccagcaaagcccgtgttcccatactttgtggcatcctgctccttttgtgcacttccaccacaccacatgactgctgccactcggagatcatcagtggaacttggtgtttactattcttgttcattacttttcacttttccaatcttggcataaggtrcatcgtactgatcagatctaccacttttttgctctgcatgtttgtctaattcattcctttactttgtagattttcactgtacgaatacccagtagttatccgttctctcattggaaaacakaatgagtgttttttgttgggttggttgttttttttttkttgttgttgttgtttgtttttttttttttgaatgagttctgtccatttgtaaaagtgtcttctgaggccaaaggagatctctactctttctgaactccagtaacacttatctatgacttttaactcggcatttgtgactttccatgataataattgttcttttctcccatgtcagatggaaagcttcttgagcatctgattcccaaagatggatgttattaggacagtaagaatttaattttctttcacagataagtgaatacttaaataatgaattaaacactgtctacacatagatcttgagaatacttgtgtttattcccttggttgttacatgatgttacctcctggggacttttctttgttggaaagatttatgcaatatgggaaactggttgctgaggtggaagtatggagcatacataaagcctaaagctttaatttgagaactatgtgctaagttttcaagcaacacaggtactgggttttgtgtgtgattgcgtgtgtgtgtgtgtgtgattgtgtgtgtgtgttttaacatcctataggaaagttaacaaaattagtaataattttactgcatttggcatggcaaagcagagaggaactgactaatttgtattatggcaaactgttgcttttgtgcacattgttaataaaacaagtaatacttactttttaccatttagaatctatacctagaatggaattaccctaattattttcctccaaaattattttattgagatgttgatgtactctgtgaaaacatttaacagatttcacagctctcttgcctatcttatttgatttcttcaacagctttggcagaaataagcagggctaatattatcatccatactcgatgggttaggaacactggaagggaagctgggggagattaaagacctgctcaaggtcacagaacagaaccagaaaccagatctktcagcttagtcctgtctctctccagatattacagttccagtgcttaaactaagcaaaagtattaattaagatgttattgcttagccagcattttartagatagttcagtaacataatacccactcaacagttcattagagtaatttgggagtttctcatctttagtgagagtaactattgttagtgattagtaactgcctttttgctacattctttgttagaagggttcaaaggaaggattacaccaaacattgcaaaagagcctgttgtgactggtgtgtattttaagggaagaaaatcttataagtgaaacagataggaaggtgtgacataaccttaagttaagtatctgagatgacaaatggttttttgatagcttgagacctacagaggagttaaaacctctcggcatatagacaattacagttgatcactcaaattgcaattttataaaatgcagcagcagtacacttagaatattgtcttcatgtcagaaatgcacctttgtgcttgaaaatgataaaaaattacaatcgatccttacaactgttctgttcatctttattgatcaggtgcaagaaagataaatcgtagcccaaataagattatagtaaatgttagcatcgtaggggactataggttgatagaaagccattcatcatctcaaatggtgacctgtctatgkctctagccaccctgagtctgctatctaatcacatacctattgattttatctacatccaagaatcctggatgtgactgtcattggacaaccaagattgttaaatgcaaaggggtcactggtgtgaagaggatttcactttcattttttcaccaaccaacaatgatttattaaaaaataaatgattgcaagccatgcatttgaaacctgagtgattagagaatgaaaggtacacaatagactaccgtattgtggtggtgttttgttgttgttgttttttaatgcagtgcattttgcaggatatttcattgagtcttagggctcatggggtcatttaggccatctcctgcaataagaccagtttcagtgtagctagtcagtatggataaattttgctgccccaggaaaggcattactttgccactgcatcttggtttatgttgtttatgtgtccattcctgttcatagtggaaacattttttgttattaaaattatctaaatctgcccccttgttcctactgattagttataaatgttgttgttcttgtggtcacgtggaaatgatagaacaacttaagctccataaagaaaacttttttttttttttgagatggaattttgctcttgttgcccagactggagtgcaatggctccatctccgctcaccgcaacctccacctcccgggttcaagcgattctcctgcctcagcctcctgattagctgggattacaggcatgtgccaccatgcccagctaattttttttttttaaagtagagacgtggtttctccatattggtcaggctggtcttgaactcctgacctcaggtgatccgcccacctcggcctcccaaagtgctgggattataggcatgagccataccatcttgatgacaaaaatattgtgtagaaagaaatgatctttaatatcctagtaggaacaccaatggaataatatataaatacraatgtgtgtgaatttcagtttttgatctcaggcatcctttgatcttacaagggtagattccaaataatggcaatctaaagaatctttccaaaatgttaggaattttctccaaaggatcaaatgataaggaaytgtaactgtgaacgtttactctgtaattataatccgcataccaacaactctactgttatttaaaygagtagctttacatgtgttttataagtatccatgccacctatacaagaaagtcttctactgcttgagtggctgaaacaaggttttatgtgttttttgaagttgtaaatcttccacacattttgtcatcttggatagtgaaacctttgctatcaatctttgtccacagagctcagagttctacagagtcaccactgaacaatatcagaaagctgctgaagaggtggaagcaaagttcaagtaagtttttaatagtattataattatttactrttcttaacaagatgaaagcacagttttagtgctttttgcacagatcatagtttgttatatagcactctagaatacttggaagagttttggggtggttgagatgggggccatgttatctgctatactggaattcagatgccaagacaaaggcatttgatgaaagcttgttacaaatccatgtattttatgaactagggggaaattgaaagcaatggtaatagtattatcatttgtaataatatataaaatagaatgctcttgattatgaaggtcatgttaaattgctactgtattaagggaaacatagaaaccattcacttttgtataataaaatgatgggcatgtccaaatttgggtatctgcctttctcgtggttaggctgttttcatttcttcacatgtaccttgaaaggctttaaatcatagackttacctggcccttgattatgaaggtgatgttaaattgctacctctcttaatccttggagtgtttaaatgaatgttctgtaattgatggatcaaagtgtccgtgtcccatagctttgtactttccctttgctgccagttctcacattaggttagaagacatcattcagaatttttctgagtatataaatagtcctattgtgtaacctctattagtagcacatgcgcaaattagtgaagcaaaaaaagttgttgtgacagctttagttgaaagattgcatcgggctctgacctccttccttgcacatgtttacaagcatttgataaaatgattaaaccctaaggtggaattactactttctgctacagtacaatttgtgtgttaatggatattagtgttattgtaatgtggattaaaataaaattttttaaaaattaaaggtagtttgaggtttatttaaagagccaaagcccttcagccttctgtagtgaactatctctttagaggcagcagagagagaccttccaaggatgggccacaagtctcactattagagattaatgtgagatcttaagaatttagacatattaatagaactggttatagattttttaagttactctacatatattattttaagttaggtgtttatttttctccctaatgatataatgacttttttttaggtggtaaacctttttttgtctctatcccatgagaaccttcgagttggctccccgaatatttctttattctaagacaatagctataaaaacagctaaatttcggatacattagagatcaattttgactagagtgatctgtgaagttttcataaagaagatgactttttagttgagcctttaagaagagtattgagtaggtggacgggaaagatattcagaaggaaaactgtgctctgtagttggtgggtgacaaagcagtgkcttgagtcagaaagactrgtgsaagataaaactggaaaggtcagtgggtcattagctgctgggctgtgaagtttggtcttcattgagcaatgagtcatgggaagatgtttgaccagatgagcactctgatttctgggctcctgaaggaaaagtaacctggcagtggatgtgaggtttagttggagacatgaaaaataagaactygaagaatgagataaggtcagctgtggtggttcacacctgtaatcccagcattttgagaggctgaggcaggaggatcgcttgaggcctgaagttcaaaaccagcctggtcaacatagtgagaccctgtatctacaaaagaacaacttaaaaattagccagttgtaggggcatatactggtggtcccagctattggagaggctgaagtggcagactgcttgaacccaggactgcagtgagctatgattgtgccattgcactccagtcacagagtgagattatgtcttaaaagaagaaaaagaaaaaacaatcagatgggaagtctctacaagtgcaagagaaaaaaaaagttgttgaaagtttagacrtggcgccaggcgtgatggctcacacctgtaatcccagcactttgggagactgaggcaggcagatcacttgaggccaggagttcaagatcagcctgggcaacgtggcaaaactccatctctactaaaaatacaaaaattagctgggcatggtggtgcatgcctgtaatcccagctactgaggtagctaaggctaaggcaggagaatcgcttgaatccgagaggcaaaggttgcagtgagctgagatcatgccattgcactttagcctgggcaacagagcaagactctgtctaaaaaaaaaaaaatcagacacatgaatttgtgattggttggtgtattagtttgccagtactgcaaagtaccacagaccgggtggcttaaataacagaaaggtattttctcacagttctggaggctagaagtctaaggtcaaggtgacgccagggctggttgcttctaggcctctctccttggcttatagatggccatctgctccctgtgtcttgacacagtctttcctcttgtgtctacatgctaatctgcttttcttacaagaataccagtcatattagactaaaaccctcccttgtgacctcactacaatttaattatctcctcaaagaccctcaccccaaatacagtcacattctgaggtactgagcagtgggcttaggaattttcaggacacacaattcatcccctaacatttagataaagggggcaaaagaaccagaattatgaggttagcagattggaaaatcagtggagagtggatttcatagagaaagataggtctggattttagatgcaaaaatctctgtcctgaatctctgcccagctgccatgtcattcagcctgaactaggtttggagtgcgagaggccacgggaagcacaacgttgacatcatgatggctgacctcctgcaagtcagcagggccctgtaagttaggctttgttttaaacagaacctcaacagcatcattctgtcttacctattaaatattattcaagaataattaataatatggccaaactgtgtagtaagaaattggccttggccaaagagaggtctggattttggaccaagctcctgagaaattctaaatccttcgaatttcctagtgatagaaattgttattctcagccaggcgaggtggctcatgcctgtaatcccagcacttagggaggccgaggcgggtggattgcttgaccccaggattttgagaccagcctgtccaacatggtgaatccctgtctttacaaaaaaaaaaaaatacaaaaattaaccaggtgtggtggcgcatgcctatagtcccagcyactggggagggaggctcaggtgggaggatcacctgagcctaggaggcaaaggttgcagtgagctgagatagcaccactgccttccagcctgggcaacagatcaagaccctgtctctaaataaataaataaataaataaataaatgagaggaaaaaaaagaaattgctattcttgctgggccccttggaccatgtggtatcagttcagcctctggggaggtgagtttatcatgtggaccatcagtcaagcagtttaatgaggctccaataaaactctgaacagtgctgctcaggtgagctttcctggttgacaggactccatgggcactgtcacacattgataccaggagggcagcaggtcctaaggacattggaagctttgcatttggaaacccccaggctcagtcctatgcatctcttcctttggctgattttctgtatcattgccctatagtaaaccataactgagtttaacagcttacagtgagttctgagttctttcagtgaattattgaaccattgaattttggctggtttggaccctccctcccccgctctgcaaacttgctgttgatgtgtcagaagtgagagcaatcttggggactgtgcccttggatttttgcgttttgactaactccattgcacacaaaacctaggttttaacacactttgaagaaattctaatagctagttttttagggagtggctttcattatatcgttttttctcccagctacttcctgctaggctgagcttcctagaatgttgtattttgatttgcagtgagttcattagcttcacacctaggaagtgatagtacattgggtataggagatgcttaccatctttgaaggcacagagattacttagtagactgctatttctttttagaaatttggccatctcagataatcaggacttttgtaagacaatatataatatttgcattgcatgacaggggtttttcgcctggtcagattattttcactggctcctatctgtatgaccagcttagcacctgtaagcatcaccttgaggagctctatcttgaacctgaaccggaactcaacagttcctcttaggcaacaagttctgaaggactttgaggagaatttagttaattgtatctgatgaaagtaggattcatttatgtgcatcttggttacaggagatagaagctttttaaagtgcagtgtcaagggcaatattatatacctgatcaggggtcatacaaatcactgtaaagagaaagaaagctaagagcatttgaagctgcccatgactaacaccagcatattaatgtaacctaccaggatagctaatcgaattattttagggatgcttaagatattaactcatacttcagcccctcaatgtatagttttggcagtaaaatactttgagaattaatggattgtttctcctactttatccacacatcattcattcatagagcccctgtgtgacaagccaagcctgaatatacaactaagaaaacaggccaggatcttattactagtgtggaactcagagttcatcagagaaaaacaaaaggaagacaaactttttaaatgatgatctttttaaaaaattcaaagttagttctcctcttttggggtgattacatttccaatgcatatcaagttattaaaaatattacttaccatgatttcagtgggaactaagggattcgaagataatttggactgtttattttcccacaatagatttaaaattttagctctaaaacctaaatcactgagcaaatccagcattcttcttatatgtaaccttaattcaaaaggaataccttttcttttctcaatccaactaaaacagtaattgtcaacacttcatgtcgcattttataacaacttagggtgctagtttctattatatggcgctagtaatgttacagctcatcctaatgcaaattatattttatattaatccttatgctgtacctcataggtaattaattaaacaaagtattattttaataatgttacatgtgtagttcttaacacagacctagcacaaagtaataaatactgcatttgattatcaaaagttatgaaactatgtgctatcggagaaatctctgtatttgtttttaaacaaattctagatgctgctaaacctctagcacattagaaggagttcttacccttatggagctcatactctagccaggatgaccggcacataaagcactcatgatagaatagcatgtaagagaagcctcacagcaatgtagctggagtgctgccggcctcctgtttcttggtcaatgtcagaatcagatctctgtggctacattggagctgatatgccacacctatagaaagaagatgttaccagagtgtttatgcatgtgaattgtttttaaaatagaaaagcaaatatcaagtaaatgtaaagcaaatatcaaagacatgttaaatattttaaaggcaatataggcatggtaaagacaatgtgatagtaaacaaatgaaaagcattttacaggacaattgatacttcattctcattctgtcctttacataatgaagtggcgagtttctattttccataaaagaaagaaaaaatatgcatggaaagtgacatagatctattgaaaatatttttggaatgatttcattagaggtacaactttttaacatggcttcagtttctgtgaaagaagaagcacttctaaagaagtacaagtctatgaacttggaagtgaataccagtaatactcctttgtgtgccagattttagaggggttttcgcttttatccctgaatgaagttgttgaaacctgacttataaatttaggctcatagaagaagcttaggttatccttataaagtattaaaagattagttaccctgtaaaagtagtttaggtgattttagagtatctgaggaatactatgcagaactcatacagataaaatggattttgtaaatattaccatctttaaaggttttcttcaatgtaaaaccctttgactttaaaatgtccttgatttttttttcttttttaggggttgcactttcactggcaatattgtttagtttcttttttggatgtaatattttaatagctatattacggatgaattggtgaagccgaggaagacacgccaatagtatcagcaggtgtttctcatgttctgtataattacacatgtgtatcatggacagttttaagcaatggtgtttaaagatcctgcttaattggctgtaaaataattaaatacggttttgactggcaaatttataattctgctagatgcataagccagtgagcctgaatgtcaatgcaacctcattttggaaatattagattaatagaactaattgtactaaaagtacaaagtttactctgattaatagtcttaaaattcttctagaagtttaatcaggtaaatttatgttacttatctttcttcttaaacttttaattaaaacttatttcaaaagtttgagctattaagttctgtgcttctctttctagtttctctgaagttgagttcttgcaatttgtcagtgactccagctcccttattgagtaacatgccttatcaaaagtattaaaattatatgctgtttcacgtgtatttgtatctgcagctgacaggtatcctgaacatcttctctaacacgtattgatgtctacttataacctactttagtgctgtgtgaatggatctaatataccaaatgtacatgataaatgttttatctctgattctcattgatcagttttgaaatgatcaaatggtgtatctcagtaagacactaattcacattgatcaaattctaaatgatcaagttgacttggtttctgctgaacacaaattgtattaaaacaacattacttgaacatgctgccttctctaatgcaggagttatgttaccagcagttacattataactagagttattgtattataaagatgtctccttcataatgaaaagtttacacaagaagaaaagaatgcgatattacaggaagaacagggcttcaggcaaggatttgggcttttactaactaattaaattctgcatttgtattgggccttttttcccccttttttaatttgaagggctgtgagcaagaaatatagcagctgcagtggtgacattttattccccacggtccttggagccaagtaacatcttgattattcagtaagagacttagtaattgaagaggcaaaattctagataaagtaaatatacctgtaccctttgtgcacaagcctcttggttacaattacgtctttagaagtttcgagttatttgttggtttttgtttttaaaacatcagctcacctatgtcaacttccatagtatatcatgtcccctctggaatttgcaaatgtgctgctggaggaggatttcatttctgaaattgaagaaagatgttaatgtacttatgaatatactttgtatatgaagctaatggcaaatacacatttggctgtcacatggactcggttatttagaacacaaaattcctcaggcaggttatttattatgtctttgacttgtgtcttccatctataaaatgtaaattrtaactgtcaccttctgtagggcatataagctgagaaagtttaaaagttaactgagaaagttgtctttgatccttatctaaaaaatggtcgtaagttgttttattcaactgcaagatagtggctcccattttaggaaagttgtagatgatgcagctccttccgtatctcatcggggatatgtaaggtagtgccagctcccaagctgtcaatctgcctggtttgtttgtctgtccacctcccaccaagcaacaaattagtccaaggaaagtgagactggctttggagcatgccaatatttaacagtatttcttacgatacccatttagaattggttatatttacaaagaaagcttcggtattaatgctttttccccccttctaaaattggagcccttcaaatcagatctgcctggttagttatttactttctttttagttccttgggtgagatctctatacttggtctaaatactattttctaagataatagaagtaaatgtcaagaaacattaacaagagagatttccatctgcattatctctctactccatgactggtcgccacagtattccactcaactcagtggtatcctgcagaaaagggcagggcagatggcaaagctgattgggaatatagggataaaaagggcaggagcaggagtgtacaccaaggacaagagagtattgttaatttctctaaaaagacaatgcaaaatgcagccatctcatgaacatggtcacaagaccaaaagggtcactttggaaacttttttccatcacttcagcatagggtgtaaaggaatctcagctggtgaaataagctgctgatggtgcagccagattggccacgtccttcgtaagtccatgacctggagcattcttctctgttcttgctgtggcagttggggtttrttggtgttgcaccaagcatcttctttcctttcgtataagtggtttatgtgtaaacatgtaaatgatcaaaccattcttgtggcagctcttaggtttgtggccatacactcctggattcatgattcgttctgtgtgagctaacaaatcattctgtcttccccagcaggaacatcagtattgaactttcttcttaatcaatacgatccattaagaatctagtataccctacatggttatatgaaatattaattgcacactgttagttagataaatgaagattctgccaaaatgatagcttatttccttccttgtatcataatattttaaatgagatcattctgagttctagggtacatgatattttggaatttgtttattgatccttgcttacttgagtaattaactacacagctcacagttggaaaagacatttctaactgagactactaggtttgtcctcttgccaattccaactagaattcatttacttgttaagggcttcagttaaaaatcatgctttcaaagataagaaaacatattttgcgttttgagtgcaactaagctacagtgaaacttgtaggaagccaagttaagagttaattgtctgactgacctgccctgttataagatatccagaaagacttctagaaggtagaatttaaattctgtccttatgtcagatatgcaaagttaacaatcttaggacttgagcacagttaaagattttatcaaagaagttatctacacataaaaatggtagctcagggtagtttctggaacattatataggttcagccatagtataacatcaaattaattatgtcttatcactccagagtttggtaagcctatcccagatgctatcagcccttccctggtttcagtcagataattaacttatgaatgtatttagctgcccattcactctgcctggggtaaaaccacatactaaaattgaaaccagaactttcaggatacattgtatttaaacttgtattcttgttgctcatttgaatgtataattaccaagtcaccyctcatggtttcagtcttgtcaagtattcttatttctggctcttctgatttttcttaagagataagcaaacaaaatacaaaaattgttagattggaccttataaaattttaaaattctgcccatcttaagacatcattaggaaaatttttttcatgggcaaaagacttggacacttcaaaggaagatgtaagaatggccaaatagcacatgaaaggagtttctacatcattagataccagggaactgtacatttaaaacataggaatggcaaaaatcaagaagactgacaatactaattgtctggaaagattgtggagaaaccagaactcactttgctggtgggggtatacaatggcaaaagtcctttgaaaaaaaatgttggcagttccttataaatgtaaagcatacacttgctgtatgatgcaacaagtctagtcctaggtatttacccaagagaaatgaaaatatacatctacaaaaagacttgtacacctatgttcatagcaggtttattcatagtatcaaaaactagcaacaatccgaatggtcatcattgagggaatggagaaacaaaacagacagtattccrctcaactcagtggtatcctgcagaaaggggcaggagagatggcaaagctgattggaatatagggataaaaagcgcagttttctactttatattcatacagtagaacactattcagcaatagagaagagcaaactatcgatacatgtaacagcacggatggatctcaaacatcatggtacacacaaagaagccagatgcaaaacagtactwcctatgtggttcatttaaacgatgttcaaaaataggcaacatttgcctgtggtgggaatagaggagatttgattggaaagggacccaagcagcatttctgagattttgggaatattctgttgtattctgagtgatagttttacaagtatatacaggtatgtaacttctaatacaatatgaacactgaagattggtgcattgtgatatacaggctgagcagccctaatctgaaaaccccaaatcctccaagattggaaactttttgcatgccaacatgatgccacaagttgaaaattccacacctgacctcatgtgacaggtcacagtcaaaggcaggtccacaacatgtagtctgttgactgtgcctcaggaagaaaatgaccttcaggctatgtatagtatatatgaaacrtaaatggattccatattttggttggggtcccatccccaagatatgtctttatgcatatgcaaatattccaaattccagaacccaaattcaaaaacacttccattcccaagcatttcaaataaaggatactcaacctgtgtgttaattatacctaaaacaccctaaattaagaaaaaatataccccaaatattgggaattcccagtttctatctgtaatttgtcctagataaaatgcttcttcaatttaatcacagtcttaaatgtaggattcctaatcctatccataatcatatttttttcattagaatttgaatcccttatctcagagtcagggctgttcattcagagtattttattactgtagaaatagagagggataaatcttgcttgtatttcatttatttattttcttaaagaatcagtcttttttccccccattaagttacatttgcctgttgtactctcctcctcttcaacctaggaccttgtaggtaggcttggataaggtttgaaaattacttttgataaagggatttcaaaggcagtatttgtgaatgaawcatttgtacagtagcactggtacttttcaatataataatcatatgcagtaatttgttcatactatttattgagtcctggcagaatgcttgaaaacttgtaaaagcttgcgtcttggcccttccttacatgttgaaatgaaagcacacatgttcatatgttagtgtcgccaagcatccccaacttgctcacatgcctgccttaaattatttcatgtgctttcccattcagtggccaatagttaaattgctgtgttccttttgtgagtgtgtatgtctaaatgctggtaatcaaccgagtccctggaaaactgataaatgtgctcattaaggagagttcttgctcttggctctgtttcacaagtcacctcagctagtgtttctggatgaagctggcaagaaacactgtgcagtgatacatctggctttatactccttttcaaggactaaaacctccttttttagtatgttaaacatgcattgtagggatattgcaattacaaagaagtaagctatttgccaattacattatttacacaagaaaaaccaagggctgctgctgtgtggtgagatttttaattttttatgcactgccatttgctcctcctcttgttctcttgagcatctgagattacacaagtgcctattcatttgtgaggcagagccatctatgcagactctgaagtccaccggctagccactggcatagatctcaacaaagctgactatgtgagagatgcattcagcatggtttatgattggaatgtcgaaggtagcatacacctgttcctgctttcaggatgaaaaatgaattgccaattatagtagacatgttcagacagacgcttcatatggtagaagcttgcttggcctgctttatgctgggcctccaactatgaagccatcagttctgaaaaaggggtgtgttggcaaggaggagaagagagaagggtatcratccttgatctgttaccatgttttgtgcttgtgcaagctgtgggcaggaggtcaatgcctcacacctttgtttcccaagcagagctcttgaacaagatgaagtgatcaaagctgggtgstagtgcattatcacagtctcattactttgcaagctgcatgcccagatgctgctgttttctgcatcaggcttcgctgatttacattcgtaacamctccattacagctcatttgatactgctcataatcaaccagttcttgtcttttcctgatagtgtttctccaatacaaaagacgctagtgtaatgaagaaaattagcattgctggtatagaattcatctttaagacatcctggttaattgacaagaagtgggaaccaaatgctttgtcatgacttaagtcatttgtggttttggtttggttagttgggtgttggtttggggctgtttttgaagtctttgaacttgagttgttggatattgccagcagacctattttgactctttctgtcttgggagttcttttctgttagtgaattccgacaccctgtccttatttgtttggtttcttcccctagtgagctcaatggcatatatctatttttttaaagatattaatgcaacaattttgctttgaagaacttaccatcctcagtattaacacatacattcatcaagggtctctttgatgttccatgttctatgggccctgaaaatacagacatatcagtttgagtccctgccctcagagggcttatactcattgggatcattagctcgactgcagaagcatcaaaacttgatgcaggaattattactaaaagatttgttcgtgaaaaattttgagtatcttatacattccatatggttgttataagttgggaatataaaaagtgaccaaaacatgttaaatgctaacatgaaggtacaaaccataaaatgcagtaggactaggaggttcggaatcccaggggaatctggattgcatgaagaggtgactggcataagctggatcttctcatcttgagattttcttaaggtaagaagagggagaatggccttgctatgaagagggcattgaatagtgaaaatggctgaaacagtgtgggagaggtctagtggaatatgagaccacaaagcaagactggagtcagacttgaagaacttgaaatgcygtattttaaaaggcagagttaatagggcataaagattcaaccaagtgttctacctacttggtggccgagcgtggtggctcatgcctgtaatcccagcactttgggaggccgaggcaggcagatcacaaggtcaggaaatcgagaccatcctggctaacatggtgaaaccctgtctttactaaacagaaaattagcctggcgtggtggcgggcacctgttgtcccagctactggggaggctgaggcaggagaatggcgtgaacccaggaggcgtagcttgcagtgagccgagatcatgccactgcactccagcctgagcgacagagcgagactccgtctcaaaaaaaaaaaaaaaaaaaaaaaagagttctactacttgggaatatttttttctttcacctatccctggtccccataattgtcaccactaggattatgccttttgagttggtcattgtttctggaagtcttctatcaaataatacaatataatattgggtgcatagatgttgtatacgtttattatatgataattagagtttactgcaccaaattaatgactatcactcttaatatactaatgtccactcaaaaataaccacatattagcttgccatattgattgagagcaaagttcagggacttgaaaggacggaacatagtaaagattagttctgattaaaaaggtggggaggagagagttgaggaaagattgggttcataggatgttgcctggggaagtcctagggcattaggcagaaaaagagcctcatcttttcataccaattgaaatggtatatgattagttttcattactcctagctatgatatctttgaatggtgtcctaagaattcacawggtaccaggttctttgtgtcattgcaatgaatgtgtgagagacaaacgtatgtggtttattcagatgtgttttatctggatgtctaatttttaatttatgtctataattctgattgaatgtgcccaaaatagataaaattagctcacttactaggcaaattttctattgctagtccacttgattattaaatgagccttttaaagtattctctctccttcccattgaattttatgaacaacttttctcttttgatatccttcctggagacttactgtagcgaaaaggatatgaaattgataaataatacaggtggccccccttatctgcaattttgctttttgcagagtacaataagatactgaaagactacattcacataacttttattctagtatattgttatattttattattcttgttgttagtctgttactgtgcctaagttataaattaaactttatcatagaggtatgtgtaggaaaaaacatagtttatctaaagttaagtactattcatggtttcaggcatccactagatatcttagaatgtatcccccatggataaaggggaactaatgtattagatttttttctcttttaatttatcaaggaagtattttttttcttgtaacaagggaaatgtaattttactcctcttttcttttccagatcaaccttttaaaagtaaagcatgtgaagttgcagtttgatatttagcctttcacatttatctctatgagtagatatgttaataaacatagattttgttttgttttcacagagtgtaagactataccatacgtattttaacttatatttattatggatacatccccctgggtcaacacataaattcaacgccttcttttaaatccaactcattcttctaaatagctgcatcatgcctcataggattggtctgtagtcctctactgaaagtttctttcaagtgattggttttggttttttgttttgttttgttttgttttgttttgtttttggtggggggcgcggtgggggcggatagtgcagaagaaggctgcagcgaaacaaactcatacctaaaccctaaggaactggtacttttatttccgtaacatggatggggtttgaattgtgactgttccttccaactgtgtagcattaagctacttaactcttgatcttctttttgctgatataggacatgtacatataatacctcatgggttgttaataagggttaatgaaatgtgggtaaaattctgggcatatagtaggtactcaactctatacaggtcagtttcttttagggatctagtagttaagagtcagggcccaggttatttaaccttagaagttgtatcacaatatgaatcaaaaattggcctcccaagacttttttttttaaattaaaaaaaaggaaatcatgttttgtgaaaattataggcttttttgacttgtataatttaaaaatactgcattttggcacaacctttgcagcttttgctgctagtttgtaattccctagaggtgaattgaaaacattagtggcagaactttttccattaactctgagaaaaactacagagcaaaaaattgtcctttggcagaaatgtcaatccatacctcttttgaacatttggaaagtgaagcgctgagaagctgatataataggagaattgaaaaccaaaatgtatacacatcttcaccttttctaacagacgmcaagacaaatgaaaaatacatcctcagaacttgatgatgcaaagaaaataggattgttgctccagaaagtgcattaggctgggatctttaaaagaggccgaggcgggtggatcatgaggtcaggagatcgagaccatcctggctaacaaggtgaaaccccgtctctactaaaaatacaaaaaattagccgggcgcggtggcgggcgcctgtagtcccagctactggggaggctgaggcaggagaatggcgtgaacccgggaagcggagcttgcagtgagccgagattgcgccactgcagtccgcagtccggcctggacgacagagcgagactccgtctcaaaaaaaaaaaaaaaagatttgagtgctaagcttttggccacgttcttcagaagggctgatccattcttattaatgatacatctatttgtacttcatgtcataaaattctacctttatatgctacagtatctaggaagtagacgtaagaaagagcaaatgtttaatatactacargttttgctgtagcatctaccagaaaatatgcttattttctctcgtctgtggttcctggtcttcctgatttctttttaagtttattaggacttctcttcatttttccacgccataatgtcaatataggtacaatgaaataataagtatccacatgttaaaatgtttactgaatataatgtttatagatattcttcacatcattcagtagacctattctagcaagttacttctcattttccaccccacccaaaccccacagtcttagattttatatctgtgaaatggtaataacagagctgttatattggaattaaatgaggtccatttatgtttttagcatatcctaagcagkgaatagtgagctattaataattactgtagtcacaatagttgaattttctgttgggtgaattttgtgtttttttaattgatgctcatcatatgatctaatatatatttccctagaggataattcttgaacgcaataaaattacaattgagtataccaggcctcttaaaagcatgtgtttaaaggtaaatgctttctgtcaaattattaaccaacagttagcagcactactcaaaataataattctgttttaatatgctacatgagaactacataatgtggttagamatacatacgcaatggtatgctcagacaaaatgcagccattgttagttcatgatayagttctcacctaaaaccttgtcatagttttagaatatttttcttcacttgagattctagacaacgataggttggtagtgtatactgaacaaacaagattcttcctaacgtgttctgtagtcacttgctcagcatttgggccatatatatwtttttttttccagaagtaaaaaggacagtgtggctaagtgtctagattagtccccaaaagcccgtttaacccctgcagttcagaaaagaagactagatgttaggggcaataaaaaaaaaaaaaaaaaaaaaaaacactagcacattttcccatgtttgtgcatacatgtgtgtttaaactacattctggatttaaaagcctgggctaactcaatcacaggtgcagccttgtttctatgaaaggagataaattcctatagagagtgaraaagggatgcggaagccatagcaaagagaagcctccctcccttccagtccctcctgttgttttcaaacattttttgttagcagttagcggaatcctaatacccacaactgataatatgctatcttaatactattactctagtttataagcttacttacaacctttgctcattatgaagagaacaatgaagcttatttttatgaatacaacatttaaaaattaggggccaaggatgatggctgcagtcctatatcagtcccaacagccaaagttatgtgtttggttgagtgttacgatgatcctgatttgtggtgataagtagtggcaaataataacttttttttttaacagcttgccttgcaaccacaagatgctcatccatcratctgatccaaatgattaaaagygaaataagtttctgcttcaaagttaaataatcgacattatctaataaatcataatatagaagttgggacaaacagccaaaactttaaatattaaaccacattatgaaaataaccttggatacctcctgggctgatcttttgccatcttttctcatgcacttcagtgttcattcactaaagggagggaaggccttccgcactcacgctttggcccggctcacgctgcccccgcagcacagccacagcacacctcaccttcaccaccttcctcccgataaactcagccttttgttaggacctgtctcatgtgttaattcctctgctttctctgtaaagtctttctagacacctcccttcctactaaaaagccataattaattaattgttccctgtgtgtttatgtcactccagcccttatgacaatgtaagtggcatcagtgttgcctgtgccccatctcccttctcaagtgtgaaccgtttaaggtacaagctgtatctgagccagcttgatgggagcatgcctctctctaacaggtgctcaattagtatcaatatttccatctactaaattgaactcttataaaatgtccatgcttcttaacttagactcctgcagttcagaatggaagactagaggttaggggcaacaaaaaaagcaaaaagaaaaaaaaaagtgcgttttctcgtgtgtgtgcatttaaactacattctggatttaaaagcctgggctaactcactcacaggtgcaaatragagtgtttttactctgaaagggatctaatatagctctgaatttacactagaggaaactgttgtctaaaaactaagaattatagacttgggagtttgaagggcccattgccaaggttatagtctagttaacagcatgtgaatctcattcttagttgaactgaaaccttcttgagggcaggaattgtattttatcctctttatcgatctgcccaagcacctggcatatatactgtgcttggataatacatatttaaataaatgcattcagcaaattaggtgcctgtggctatgttgacatctctgtgtctggcctaatggtttgatttatctggctgttaatggtcttcattacaggctgttaatacagggctgatttttgttggacattagctaattgccagagttcatctctagtacatgccagatagaagctgggcttttctcttgayggtatcaataggataattaagactatagcaaaattcaaaacatgatggagtatttattacattaagacttgtcattaattgggaattccttcagttcagatttctatatagtgtgaatttttgtcaagggaaagttattgatattaaaaatttgttgacttttgctatttttaaggactgttttttttgcttctgttcatgtagacagatttatatattttctagtttgaaatttcaacttgaaaacacagcatcttcaagtcaggtaactgtctatcaagaacaccaattaaatacttcataacaagttttcttcttataaaagcctacccacccactttcccccatgaggtttctattgtctgttataccagtctatattaattataggcattttctgagcaaagcactgatgaaactaagacatagaggagaaaattcctgtgtactttaaggataagagaaccattcctttttctggctcarttaaaactggactgattgtcaagtcccattaacctagtgggtcactaccttgcttgcattagtggcagccccaccgtaatgtggagcagtcttgccacgtcgtggacacatttatgaagattgataacagctaaggttcagtgttaacttttattgtcaggcaggctgtacaagaaactgtctggtattggcttttgctttgatttatgaaaaggttgccacatgaagaagatatcacataaaacagcactgctggcagcagcgttattcggtgcaattgtaaccatagcaaataataactaatggtaattaggttcagcatcatctcttgctactttccatagtttggctggggtgggccctcatagcaatataatacactcccaaaggaatgggtgactcacttgcttttgcttgggttagcacatatttctccaaagctttccttttttctttctttctttcttttatttttatttttattttttttttgagacagggtctcactctgtcactcaggctggaatacagtggcatgatcatagctcactgcagccttgacctcctgggtcaagtggacctcctgggtcaagtgatcctcctgggtcaagtgatcctcctgtctcagcctcctgagtagctgggactacaggtgcagtagctagcagtgtgatgctggttctttaagagagaaccattaagaaattgatttcatgttcagttatcccaaggtgtcagtgatcgagtaattacctgttggctttgcctcaggggagacatgtgtgcacagtctcccccatgaaccccagaggtggcaggagtctgaaattctgactcctgaatatctgcaatagctccaagtagtggcaggtggctcttctggaaagtggcacctagagcttctttctcaattggaccttttgtccctaaggagaatagtcatcactttgcctcattttttttttaatctcaatgcactttgatataatagagtatcttttatgctataaaaactttccttccctttgaaatctttggtctcactagtcccagttgcatcttaatattcaaggaaggcagctgtgttttcctttaagcaaatgtaattgttgggggaaggcatctcagtttatcccatggacaaatacattatgggtaatgccmaaaaaaaaaaaagaaagaaagcttgggaccccaggaaaattacatgaatcttttcaactcttcataaagcagatgagtgctgcccttttctttagagctggcagctgtggaggttacagaccagcacgtgtacagagaaatcgccatctttcttttagttcccaggtaaagacagagaagacagggatgccctttgtgtctcttgtctgtttttcaggcagccacatttgtcatagttgaacctacttccattttgatattccagggttttttttcargcttttgtatgccatttattgaattctggcaagatttggccgttctcggatcttctttatctagggaaatcctttgtgcaaatgtgggaggcaatcctctcaagcaatagaatgaaaaaataccagcagaagcatgcattagttatcactggtagcagaatatggccctggcccaagcaggttgcatctaatagcctcttcttgcctggaagtcttctggttcctggaatggcttggagtgatcaggcaagccgctgccataaaggaggaggcacagcagcagctggggagaatcacatttggcccacaatggcagtaagatggtgcctgggaagccctgctctcggatttggggggagctaaattatgaaggttggatgtgagatggtgtcattaaggactttctggagagatcgtgcaattaactatgaagccaaatgagccagtgggttaatatatggggaaggtactcctaaaatgctcataaaggcaatctagtgactgtcataaaactttcttttaaacagatactttttgaaagggtaaatgctaaatctgaacctcaaatcagctttaaaaacagacatagctaagatcaaggctcaaacattaatagaggccaactcttttactccagaaagtgaagaaagagactgctaagcccagatgattttttttcctggctttgcttcccttttagaggatgtggattgagccagaaaggggcattatctgatctctattattttcagaaactgtggattttgtatggcaaggtgcttattggaagagagccaggcttctcatgaatttcaacttgacaaaatgcccagtctgaactacatgaccataagaaagtgccgaaccaagaaagtccaacccaatgctaaagatagaacactagggaaaagtctagtgcaaggaaaggcaaataaattttgtttcaggcaccaactccaattgatcgtggtggctccctgcagtatttcattgaaaaggattcggaggctatgacagactcagcctgaaagaatgtcaagattgattagtgatgtctgtcactggcttaagcattgaatgagtaggcatttttcctttgtatttgctactcctgctttagaagcatatataaaaatttgttcamcccttgactgacggtgcgtaaaccagaaataggaaggatctggttggggaaggggagagaaaggaggaagagagagaaggaaaaaagaaggacgaaagcctaaaggactgtataatgcaattttcatatcttttctctgttctcttttcactttttttcctaccagcaggtttggtgaaatgaaatatcacaaaacaggactctttattttgttacctcttgtcccagtatggctcctagtaggagaactcgttacttctccctcatttcaggcaacctgagcaccagtgaaactgtgactggcatttgcagggacctaaaaggtaatcagagtaagaacaactggtaaaatgtcctttatgtgcagtcattcctgccatttcctttgtaattaataagagaatatattaacattccattttgcttagcatttgtaatatatgcaaacatattaacctttggtacatttttgaaatagtctcctgggcaaaggccttagtttataagcagggaaataagacttcagtcagatggcctcactcctaaayactggaagaaggaaatgctccatctgttaaacagttctttcagtctaaatgttggcacttataaccaatattggagatctaaaagtggctggatttgatggtgtctgataaaaattaatattataattgatttgccatcacgttgaaatgccttgataaaatgctctcattgctttatttcattatacagtatgtggttgtgataaaaattatctcattatgctattcaatttagataacaaaaccagttattcagaccttaaacgaaagttatcatcctgagcagtacttaagtctttctctttcagggtcttcagtcctagctcatattggagttgctggccataatcctcctatttgacagttgacattgattaaattaggccaacaagtctaaaatttcagtttcatggtctgctgtatagccacagccattacatacctctagtaccatgatatgatatatgatatgacatatgatctgatttgacaaaactccagattttacaggcttttcacataataatttagtaatgtgtaattaacttctgaatggtaatcaatccacacatactgtgattttatgatgtgtaaggcttcagtttctcactcatccttcacaaaggccagtcactcaggcacagggaagacctttaattttatctgggttttctttgcattcagccatggtgcatttatagaaaggagaatcctcctagtccatcttcttccccattcctgcttatgagttggctacaaggccattacaggcagtgctgtcattacctgtcaatttaagaccatttgaaaatgaaatcatcattagcactttcacatttctccctattatttctaaatgtcctttggtggttaaagcttttgggagtatggggtaggggaagggacagacctcacaacatgaataaactgaaatgttacccaacattttagtaacaccggcatgtctaggcctcctccagaagactgctagcgtggcttcacaaaataacatgtatgaccttaaagatacagaaaactcacaaaaagaggctgaaaaccagtttctggcctgtttgaatactggtttaacagtaatagaactttaactgtgtgggtttattattcttgaaacgtccaacttgtcttaggcgagattttgctactattaaggcaaattaaagccgtttgccatcaattctgttgagttcccctcactgcttagtcacaagtagcagccctgccaccagcagtgggtaaatctatgccaagtgtarttacttcaaatacaattccatttattcatagggtggactgttgctccccgtgagcacgtacttggggaaagaaaagatatgtaggtttatgttcattatgtaccccatgctggaggcgtgatttttaacatgagtacagctttttaatcccttcatcaaaaacacatgcagcagccctcctctttctccaccacctgaacactttgtgggtaccttcaagcttcatgagcagttaccaactctcagatgtatcgtattctaaaacttggtttttaagttggctgtttgaaaatagcagctcatttttctttggaaagaagatgataacaaatgggtaggttcccagaataacctgcagaaatatattaacaataaatgtgtattaataataacaacagctaccatttattacaggcttactcagtgccagacactgtgtggagagcttaaacgttatcttactaatcttcacaacaatgttaaacagtaggaaatgaggaaaaatttgcatcttagagagatcaagaaacttgcccaagcttccactgcaagtaagaagtagacccccgttttggatatgcatattttagatgctagatcctgtgtttttaaccatcacagtaaatggctaaaacataagtattgactgtattctagaacttaagtatttattgggaaattggttctcgattccagttgggatgttaagaacatgtgtagtttggccactcttcttcacaggtctgccttgttcccccacatatacactggctaatacggtgctgatgagaagtggagaagctaccccagtggcttctcagggggaaaggtttgagcagctgatggtgtttggcagatgtgacaagcactgggaatactgcccttttggagcttctggtctaatgggagaaataactgatcatccaaataacttgacaatggcaattgtgaaaagtgctgtcaaatgctatgagagcatgtcccatgggaatcgactgtgaggcattggagacaacctcttaaagctgatataaaggctaaaatagtaggcattaggggaagggcagcagggccaatgcatgttaagacgctgaggaaggagctgagctcctttggggttctgaagggaaatctattgtgagaaagtgtcgtagagagagatggaggcaggggttacatcttgtaggacctagtaggtcataatcactattttggatgtatcccaagagaggtaggaaatcttgaagagttagggttgtaacytagaagttgtgagaccagatttgtggtttaaaaggggcactctggttgttgttgttttgataatgaattgtggtagagatgagggtaagagaccaaaaatggaaacagagggactacatgggaggctgttgaaatagtccaggcaagtggttatggtggttcagactaggataatggcaatggaaatacaaagtggtccattccaggccaggcgcggtggctcrtgcctgtaattccagcattttgggaggccgagatgggtagatcacttgaggtcaagagtttgagaccaacctggccaacatggtgaaaccccatctctactgaaaatacaaaaatagctgggcttggtggtggacacctgtaatcccagctactggagaggctgaggcaggagaatcagcttgaactcaggaggcagaggttgcagtgaggtgagattgcaccactgcattccagcctgggctacagcaagactccatctcaaaaaaaaaaaaaaaaaaaaaaaaraaaagaaaagaaaaaaaggaagtggtcaattctagatctattagaatttagactagactacgtgacagaatggatattgggaatgaaagggggaaagggggaggtatcaaggacaactccctgatcttgaagggtctatttactgagatggggaagaaaaaaaataaattggaggtagaggagggaattagttcagttttaaacatgtggtacctgtaatgccttccacgtaaatagcaatagtcagtcacctataagagggctgggctagagatacaaattagatagcgaccaacacacagatggtatttaaagccatgagaatggctgaggtgtctgtggagagaggggagagagaagagcaaagagacctccaggaccatcactccaaggaactccaacattgagggatcagttagaagacaatgagccagagagccgggaggaraaacaggagagtgtagtattatggaagccaagaaactcttttcaagaaaggggcaatttactggaacaagtctgtgctgatcgggtcctataagatgtctactaaaaatcattggatttgaccacttagaggcctctgattttagcaagagcagttctatccaacagttgaatgaaagccactttggcatggatagaaaagaatggatggaaggtaaggaagtggaggcagaaattgaaagggtatttgctagagctgtgcttccaacaacatggtagccactagccacttatgactgtttaaatgtattaaaatttagtaaaatttaacatgcatttcctttgtttgcactagtcatatttcaggtgcttacttgccaccggtggtgtgaccaccatgttgggacagcgtagatttagtacatttccatcactgaagaaagcactgttggatagcactgttctagagaatgccagaatgtggtgagaaccatctcaggagagaaaatcccactagcaggcaagggtgggggaaggtaagaattggatccatgcatagggattgcctttctttggatgagagagacactcttcctccaaagtatcaatagaaaagaagatgggtgcagatccagatcttatgttgggaagatgagggagttatcttttggtttattttttttttctcaatgaaacaacaggccagcacattagccaagggtggaaagggaaaagaaccaggcgagatttttgaggaggctgcagatggcatgaataatcctagtaatagggggagagtgagtttaccaaagaagtgccataacattgtggcaggatttagtgyctgtgaatttatagtgattctagtttccctagttttgtgatttttctccagacatactcaactggagagtagtattaaggggctgtcataaggcagccattcttaggttgggttgtgtgtaatggcatatattaatactgctgaattggaacccttagggagatgtaaaactaatggagctcagcatggtgaatccaatccagacatgaattgagaaatgcattatttggtcctacagtaatatatcattatccctttacgtagaaatcattgagattccacctctgaaatactcgtgtatgagactcatcataatcatttggagaatctgtgtggtagattgttgttttctatacttcgtagttggtcttgttcrttttagtctcagcagcagactagaatgttaagccaatttgctaaatcttgcctgtcctctgtaaaatgcttaaatccgtttatataatacaaagggatatgttggaatttaatgccttcttatggcatcagtactgaatatttaatcagaacaaaaagagaaacatgttagaattttcaaattacagagttaycgtgtggatgcttcacagaggtacgtgcagttcagtgtgcytatacacccgtatgaacttctcacatttattagctataaaatacttcgaaggtgtattttcttctagtttttatatttaatttatggaatattaagtaggaaaatattagcaactacttggatgcatgctgcacttattttctaagaattagtaaataatgttatcatgtgtgattagttgtgtttaatgctagagatgagatattacgaattagcaactcaccttctaagttcttttccttaccagttaccttaaacatatccatttcccaaatagagaccattttctcatttccagggactttcaggagattaaaaggttaacatttacaatgctctgatttcaagactgcaaggcactatgtacaaaattcgtatgttgtttgagcactttttttaaagcctctatgttcaaaccttttgaaatgaatttagttcctatggaaacttatcgctgctgtagatagtgcccttatccaagagaagaaaataaaatcaattcagagaatgattttataattgtataacatagcttgggaatggacattaggaatatgtgcagttgcgctcttcggctgttatactggttcatattagattgtgtttgaaaacaaccttgcaaatgtcaccatctgtccttcactttgaggccagaataggtaatagtggtttaacagaartttcagtgggtactctttcttgcaacatcacaagtaataccttgtgaggaggcaggggatatgataaatattttggaagtaaaattagctttggtagrtggaggagagggagaaggaagaatgctgttgactcctgggaaagattggcattttgcaggctattcattcactagaattcgtgtagatgaacacaaaaaggaggcagctgaggcagatagactatttgaaagttaagtaatagtagtgtatgcttgaagtgataacttagcctatggtaaggatatgggaaactgaggaatgttaaaagtgaaaggtattttaaaacaggaactaacaatctcagtgacttcttgaaaataaagaattagccggtgctgtggcttatgccatatcctagtactttgggaggccaagaagggcagatcacttgagcccagaagtttgagaccagcctgggcaacatggtgaaaccccatctcagcaaaaaaaaaaaaaaaatcacaaaaattagccaagtgtggtggtacacgcctgtagtcccagctactcaggaggctgaggtgggaggatcacctgagcccaggaggtcaaagctacagtgaactgtgatcacagcactgcactccagcctgggtgatagagcgagatcctgtctcaagaaaaataataatttaaaaaaaggttttttgttcttgcgatagtttactgagaatgatgatttccagtttcgtggggggaggggggagggatagcattgggagatatacctaatgctagatgacgagttagtgggtgcagcgtaccagcatggcacatgtatacatatgtaactaacctgcacaatgtgcacatgtaccctaaaacttaaagtataataaaaaaaaaaaggaaaataaataacaacaaaagaaccaaaaattgatgtatgatgatgagctaacaatattgctgttgatgaaaagtaggaggaaaatcttgtttggataagaaaacaaataataaattgaccataaccagttgatacttagagtcttagaaggaatctaaaaggatcgtcagatgtagtccctggcttcagatggctaagattactgattgtatattttatagaagaactgaagactaaagaaacctaagatcacacagctactgactggtgaagagactcgaaatccatttcagtcacaaacagagtcgtaggagtacctctaaagaaagaaaatactttcacaaggaactgtagaagaggagtagggacatagatctgagctttgggaattacttataaataaaagtggaaagcaggtggggagagagcaattaaaaagacagagaaggggccaacttacaatttcatgaatagagaaagcttccaggctttccaaatgctcgtgttacacctcacacccaatggcttgccccatgacttcaataatgtgttggtttctctgtgtcttttctcacaaggttactgagatactaaatcagaagggtttgtgccaaacttgtgctgaaggctgataatgtagggrgcattatgaattgtttcccagcttacattttggtctttgtgtagagtttgcatgtgggatttcatatctgtcgtctttaagttttcaatcagttttctatttagtgccacaaaacgtgtggaaatggcatcaccattaggaattgtggtgcccaggcatctagagggaaaagcaaacttcattacagcaatttctcggaggatacaatatatataaataaaatgccgtatatttttgaayattatttcttgataagcaatatatgcacatgatagaaaatgtaaatattatatgcaaaagtcaatctccttcataactctttggccacctatccaactcccctgcttggaagcaactgctatttgcaattgtgtattttttcagatatattttataatcatttctcagccttttggctaagatcaagtgtaggtatttatgtcaagtatatatatatatatatatatatatatatatatatatatatttatgtgtatgttagcatatacatggtatatgattttaaattaaacttgtgaaatcatgagctcatgcagaataagtaatcmttgctgtctagcatccataaactcttattccattttccattactcattaaccattcattttactgcacgtctgttttggagagcaagaaaggacttgggctggaagtactggacactcagtataagtgtgaggtgaagcccatcagtaaatgmgtaaatatattcctgccttagatatacttaccttatatgtaaaattagatgctgtagtggaaagtacagcctggggggcagagaggacctggagtatcccttgccagcgttgagcatctcccatcatggggtcccctacacctgctcaggtaccactgcagggccaggcagcggggcctcccccaagttcatactccgtctctgctgttctgtgtccagctcctttaggagaaccttcttctcatgtactgcttttttctcatgcgtgggcttactcaccagaatccctcttgctatcagagcactgacccagctggtgaggtttcccacccagcaaaccatttccttccactcctccccatctcaccagcctcattttgtaatatccttcactgtggacacccttcttaggaaatcgaagtgttattycttaaccacaccaggtctgcaaggaccatgccctcctttctgcctgcccttctttgtctttctttcaaagaattgaaaactcactcttttcacactaccttccctgacatcctaacttttaagcacatttttactggttcctctacttgatgggaatgtcatggtctgcttgcagaatgtgtccttgatgaaagtgttttggctctttaatctgtatgtaaatttccatgtgaatcttaaaaaamaaaaaagtctgttagagatgtcactgcctccagctctagccttttcttctctcttcttttgctgcctttccttcatttacttgtctgtctagaatgcctttgtatcccatgtctaactgcctaagccctttccattcttgaagaccctagtgaaattccattatctcatctaaaacttttcctagtcatctccagccagatgtaatccttccctttkgtattttactgttgccagatgtgtccctttaaagcagttcttaatgggctagataggtctgcctgactcagtctcttkgtcttgtcccacagtgcctagtatctcacaggcactctaaaggatatggaattgacctcatcctgccacctccatttcttcttcactgcccactttcttctttaccaatttctacctggcttctgcctcacgctctctgctcagattctttctccagcttgctatggagcacattccttggccatttatcagtcttccttctttttgactgtcttctctgtcgtgaaactctggtctccccagccttgtgatgctgtgttacaccagttctctccacggtcagttcccctactgctccatcttccttccctgtcacccccaggtatggactgttccccaagcttctgctgtcctttctgccctttgcctctatgctccccaccacatcttgcagggcattttgacactgcagctgtagccctgccatcatgctgagctccaactccacgctttagatcgtggtgaggaggtgtcatttccacttgagcttcctgtcattactcgagcatgtttattctttaaatccccaaggcctaagccatcctgtgattctctcagtccttcctcttctttacttccatgtcctctcagttaccacatcattccatccttgctttccatgcctccattcttgccggatcattctcttcatcagcttgtttcatctttatagctgggtgctgctccactgacctctctgccatggagttccacttcyatccatctgatttatttttacactggatccgccttctcaagatggtacctttataacttcaccctctcatttagaaaggccagtggcttgtcawcacctgcaggatagactctaggtgtgctgtctcttcttggcagactgtccatatcccggcccctcccttcttagcactacccaacccttccaaccctctactacaacctgagtcccttgaatatgccagactcgattgagcctggacctcagctcacctagatcctctcaaacgccctctgagtcttacagtcctgcccttcactctgtgggatttttaaagtcccatctcctctcttccttggaacccccccagactaccccttcccccacactgtccacgcacaatagaatggttatgccctcagaacagctgtagtgtatactgcctgtactgtttccttgacacttcggttgccttgtgttacttgtgacctttatgagtgtgtatgtttctcccccagtaaataagtttcttgggggagtatttagtattctctcccctcccctttgttcctgcacatcctttactcccccttcctagtctgtacacagtggcacagctctgatgtccacatgacattctttctgcctcgcagcactgcatccaaggaagtttggcagcatggcctattggccccattttgggatttccctcttccagtagcagtgcctaagcattctcctcttcaagtaaccgatagggatggaaaacagacaaaaggcttgactctacccctcctcccactgctgctcccgccactcttcatttttagcactctgacacttaaagggcaaatcaatatggataattttttttcttcacttgtccctaaaataaatacatttgcaattctttcagttaagggagccagacacagtccttccagtgtgtatctggtatttggatcttgcttttaaaatgtagtagaaaaaagtgtatcacgtaaagtaatgtaacacgctctctcaccacaaacttaaattttggtcttaacctagttttttagaatgtgtcacagtcctcattgagatatgtgacagttttgaaatttttaaaattaaactgttcttgacttctcttggtattaaaagcactctcttaaatttgatcacggcagggaagaggtaggggtactggaatgtatttttatgcatggackactcaaatgaaatttcaccaaacttcgcaccacccgagtcacccctcagctgagaatgagcatataaaattcatcccaaagggcaattctttgtgaaaaattataatcacctaaaaatagaagctccgcatgaatgtgtgcccacttatatttctgcacagaacgcagcttgcatactacccaacagcaagagtctgtgattgtaagctattataatagattgaggaaagtgatataagaaggtccatgaagtatgtatttctccaaatagggaaggattatttctgggagggtatgtttgatgttcccttcagttttctcattaagtcttaggttgattgttagtatcctttgttggaaaaaccttgtagattgccaggcctggtgccctgtcccttggctacattggggactcccgtgttggctatttccagttatctaccttctaaacatgaggttttctgcaggaaaaatgggtgataaaggcagtaccaccccttcaagaacctgaaattaaagttaccttcgaagacaagatgtcatagtttgctttagttcccagccttgaactccccatttctctccctcgtcattcccagtgggtgggttgctgtgcccagccaatccctctgttttttctccacctgccagattcgtgcaggtggagaaaaaacagagggactggctgggcacagcaacccaccaccgggaagagtgkattccttccctttctcctctagttccaatagattattttgcttcctaatatctttctgctttcctcaacttatcccagttcctcctgtcttccttctgttttgggagtgactgagtagataaaggaataaatgaaccaaccaaccctcatgtttttaatcctaagaccaattttgatgaacattccaaagtagcatcatgagggattggaaataactcacaaagcctcgagggtatcmccataagtagaatacattatatagatatttaagaaaatagttatttaaggaaaaatctatgattgatgcattgtatatggctcatgatgaacatatttctgttatgtaattaaacagttgttttacgaagtcaggagagagtaaatgccatgcctttatttaataatagtaataataacgatgcttttcttgaccctgaaacctaattgagatattcaaataaaaagtttggtctgtgttaagattacttggtctcattcacacattgatatatcctttggagattyggatttaacagtttcattccaatacctgtggatcttttgaaaggacaaagagaataatcttcaaatttgcaattattataaccaagggctacttctatgggctgtgattttattctgttcccactatgtgcatgctaggaggtagttctacccagaatactttatataactgctgctagaaaactgcattgttaacccactagtgcttgtttttattacagcgttattatttgacatttgttaagcaataacaatatttcaagcattgttaagaaagaaagggagggagggatggcttatagctctctaaataaaggcttcccacccagacgaaagcgcaatttgttagctgtagaattttgcctgttgagaagactttgtaggcttgagaaaatagcatcccatgagtacatggttgttctaaattatatgtgatctggaagtttatttggggtccttccagattgagttcatgttgccatcagttatgttgagtcaccaaactctgtacaattattgcctcttagtcctggtatcttttaagtaagaattaagtaaaaattttatctccctttttagcgatatgtagcccaaatataagtcaagaacaccaagatatggtggaaagtaaaaattagccaatggcttgtttcttccacctcataccaaatgtctgacttcccaaatccttccacctgttaaacaactaaacaaaactggggaccctcattctttggagacccagtttcctaagttcagacctctaatgaggaataggaactctccagctcttcagttgtgctgggtgagcccatacagtgggatccagctcagggtttggtgcagttggcaagatcccaagagggttttctgtgaagggtagaatgagagctgtggcttgagaagaaaccaggcagcaggggagtcccatcgtgtcagggtgtgttactctcccctgagcaccacagagaagacaccaacccctaccagctgtcacgtggccacatgttrttagagtcctgctctcctaggtttttccaccctgccccccatcatttccaaggacccaatattattgaaaaagaaaaacatattgcaaaattgaaaagttgtttgctcaccttacactttggtatgtttgtacccatctgtttagggtgtatgaggcctattggcataagaactgtgtatctgtgtatatagagtactgttgctcattttagcagggataggtggccagaggtcctctcttttggattttcctgggtttagggcttttactcagggtcctaacactggagtggaaggctggcagtgctttcccctcctgccctccaggtcrcgttccccacgtagatctgactgtggaattgtgaacctgacatctttttccaaagtcaacagtggattaaaattaaaatgttaagtcttaaagtattttcagatagaaactattctttcaaaccttgggtttataggatagaattttatatgctctgttttctagctagccaaagctaaccttttcttttaaagcccaagctgtagctatttgattaaatagtatggccctcattacaggtcatagtctgctctcagtgtgactggttcgttgagctaagtactgagctaggtgatgtccaggttggcattcctttctctggtaacagtggaggctgcttggcattttgtgttgtgatggtagaaaacatattagttaacattcatcatgttagtaatcaaaagaaatagcatctcaaattgtatatgaaaacaaatggaaacaaagcaggcagcttttggagctgtttggaccactttagagagggacttctgaagtgtaattgtggaaatttgattacagctcaaatggaaatgtcattaataaaatggttagcagttattaagaatgtcaggaaagcttaaaattgaatttttcagatcttgcataattagagactacattttactctgaaaacaaatattaggatatttagatttaaggtaaaattaaaaataaaaagttaatatagtacatttcagataaatattttcttccttcatattgcattttacgatagattaattataagtgatgagaaaaacaaaagtgaatgattacatatttttaaatattggcaatgtgcctagtagctttagttttgtgttttaaaagaaaagcagaaatcctgatcactgggtttaacagctaatgaaaagttggtagagaaaaaattaaagtttttgcattgtgctataggaattagacctaaagatttgattccctgactgtgttgtgtgtcggcttttagtgtaaaatatggttttatgagaccacctgatcccatgaaggatgcattatcagaacctgttaaaaaaaaaatagaattctccttttaacaccagccattctcatcttcattttctctctccctccttctttccttcttgttccctctcttctccctctctctggtatttcatcatagtatctgtagaactctctcagcatacttctggttcaggtacagggaaaggatcctttctttgcatgcctagactcgtaatgagtgacttcagtgtcctctagagccttgggagttgtggctgctaactgattgtcattacatgatttttttagccttctgagtggagagtggtgtgaggagtgttatctccacattttttccttctctgaagttaccttattatccttaccattaatattagcagaactaaaaagatgggtaagtagttttcttgaaatgtaaagctcagacccacatcaaagaaggttctaagacttgaaaatagaggcagcagtggaaccaacagatagttttaaaacagataaccgagtgtaactgtgttatagagtcttaagaggggacttctgaatactcccttggctttgtttttgctaaaactgttttcrtttctctttgatcagttaatttaacttacaggaaagtctcctaaggtaataatcagaaatggtagttaataatttatgtccttcaccatgttttttaagcagtgaaaaattagaaacagcctaaatgtgtatctttattcttttctttttccaaagtttctacaatagacctgttagtataaggagaaaaaatacttggatatatatttttttagatgccttttaagtgaatattaacattaaacattagccaaagaatgttttactggtgacaggctacagaatatctaccagaagtgcttcttttgattttgttctggggtcaaatctttgggactccagttctacctttggtactgtcagcaaccccttgggcctttggtgccactgtgtggggtagggagggccaaagggagggcgggctgctagtgcttgtggagatgaggggagagaaagggaagagcagagtaaaagagtataagaaagaaaagaaaagagatgtgcatacatatggtaggatccatgaaaggttcccagtaatttcaagtgaccacaaaactggattttttttcttgtttttgttacatgtatattttcaaaggttgactctattccaccgatttcttcttgctaaacatgtttttgagtaactattagatcttcccacttctttattagtgttttaagttttccaaatctatatttcatccttctcttaccattgtcattcaccatttctttgcctcttccttacatacaaagaaattaacttgtctaatcgtcctttgctgctaagacttaattttccttcctaggtatcttgaaagtctgcctttcattatttttgcctaataggggctttttccatcagcaggaatgaaagcagtcaataaaagtcaattgctgactctatgawtatatggagggtttaccataatgcatattggaaatgttttgaaacctttatcctgaatggaaggtgccatggcttgtgttttatggccttctaatgttagacagcaatctcatttagcattttcccaaagtgaaaacagtgcattagggcagtataacaagctttacagatcaatacagaggcaaacctttacccttacagattaatccaagaaaatgtcccagagtctactcctggagctggaggacaattatgctgatttccattcctcttcccctctttctaccatcaaatcattaatacagattgaagtgtgtacaaaaagaatttcagaggatgactgcacacacacacacacacacacacacacacacacacacacacacacagaacagatcaccaaacaggaaatcaagagccctggaagtgagtagtattgatttgtggtgataaaagtatattttgacacatttcaaatcataaataackcatggactttaacttgcatgactaatagctcaacccaggatacatgcttatctacaacttaaactacctctttctaaggagtccataacatgaggtgaattatcccatcgtgagtagactttttaaaggaaaaaatamactgtcttctttatgacatgcagtgtgtggatgctcatttttacagtcttttcccgtatgttaatgaggaagggctgcatatctggtcagggttgttctagccttccctcctcacctccttcsccctgcttttaaatctgagacacattgragacacgatcagttgtcaacactaggatagaatgtaaccttgctttcctatgagctattagtcattagtcatgtatttgctaggttcagctgatctgatgcttaatcatattttattcgatatttatctagatgcaggtcttgctataattagtcacttagtggtatctgtgcctatactctttgaagcacrgctgattccttttaaatcctgatgttcgtggtaaaggattagggaaatctgtgtccagaaaaattcacagacatctgaagtttgaaatcttaaagcatggaaactcctgggattctatttaattctgttcttaggtatttgacaaagcagtaaggtaatgaatgaaaaagtaaaagtgatgttatagaaaaattgttgaaacatttttttttctctgtatgtctgtgttctttagaggatagtaggaagtcagggaaccaccaacatgctttgcatttctattctagtaaaatatrtattagcttagtgtactggataaaaataatgagacaaatcatcacccaggcgtttccttattgatgagaaatattccccctgtgttctctaggggttttgtttgaacccattaaatttaaaataatgtgatttcaagattactatggaaataacaaatttaaatttcaaaaatagaagtgataagactggaagcttcttgtattaagactaatttgaaaaaacacgaatttcaagattaaaagtagtaatattgtgctttttttctctgtatgtatttaatccttgcagtccaaacttccctgccgtattaatcagaatattttaccttcattcgtataactcatttggttcattatcatttttcaagcatatattataaggtttttggaaacatttacatttggtctcacatattcacagaagcaatctgactaaaatctgagatttgtaagtataagtagcaaaattttaacccaggggactttaaaatgttttctttgcaccgatttgtattcattcagtaaatgtattacatgacttctgtagggttccgatgtctaatagctgaggtaacaaagaaaataagtcacagtccttggaatttacattctagtaaatgtaggttgytaaattgtattagactatggtgtagtcagtgtcacatgcatggcaagaaaagtgaatacgggaccaatggggtcaccataaagggaatgatagactgtaccagggttggggggtggagagctaatgaaagctgacacttgagtgaagtatcaaaggatgagtaggttttttccagatatagaggcataggtgggagtttgggcgtagagcatttccagaagcaagagcagcatgagcttagacttgaagagaagtgtaagaacgaaaccctgaattgggtttgtccaggcttcagctgtgtgcagggttggggggtgaaggccacagagtaggcaggaacctggtcaagaaggaccagccagctggccttgtattttgtgtagaaagtgctgggaaaagagaccatcttcgatttcctatgggaaagaaccctctggaaggtgtgtgcaggcaggagtagagggtgtcaaagctgagagaccagctgggaggttgtttcttgaattcaggatgtggctcacttggaagcaatgtaacgacagtgagtgtggagcaggaggaccaggccgtagggatctccaactttgtgaccaagtggatatgggaatggaagagagaacttagggcttccaagtttctggcatgttgatatggtttcggtttggaagggatggttatattgtccagactaactcacagtagtgtcaattagtggaactaatttcttagaatttatttaccctttgtcatttttatcatgggaaaaatttagctatctttgaagtttaaggaaaattctttctcttaaacctttttctacatttgcaacatctgtgtcttactgtgcgttttatgtgttctttaaccttgatttttattctgaatgaagaccattggtctcagcggtccctgtgtttgttttcaggcgatatgagtctcatccagtctgtgctgatctgcaggccaaaattcttcagtgttaccgtgagaacacccaccagaccctcaaatgctcygctctggccacccagtatatgcactgtgtcaatcatgccaaacaggtaggtgtgccagccaggccactgggggcactgggcaaattgaaaactggatgacctggggcagtggtaaggactaaatgggccactgtgtgtgaaaaagctttctaagccctagtcatcatcatcaagaattactgtaatgagttgattagggcataacttgtgtccgatcattgtcaaagagcccatatcttccttatgtacaactcatttacttgcagaaaaaaggattctactacaattatamttttttccacttgccctgaacttttgtcttctaataataatgttcccaaggtcattcctcmtacttttaggccaatatttagagctagcgaagaggatacagattaagagctggcacctttgggcccataagccgtaggtaggcagagggccaggttaaaaaaaaaacaaaacaccaccgttcagtcactgtccaacgcttccaccagttgatagagttcacttagttggacagggaaagggaaaccagagatagcattttaaaaagaatttccactgcttttatagaccatagccatattcttctcttgacccttcatatcagaacaatatgatgttcacaggacgtgcattttctctaatttatgtactttagaaagctaatgataaaccctgaagcaaattatcaattctggcaggtcacataattgcctatcatttaaccaatttaacagttggatatggttgttctgagaggcagaaattgttggaaacgttgattccttctgctgacaaactccatagatttgaccttctaacccaactaaatctagtgtttaagttacacagcatgcctttctgcagtctartttgatgtagttataataatatcacttggtgtaaaatttttatactctacaaatatccgacgggagggttagtattatctggatagctggaaaataaagtaacattagtggaaagaatataatcaagatttattaaaagcctatgttgtcctcaaaagcctagtggctggcagcttttttctgtttcttgcttgtagctgcacttgtataactcttagtagtatgccagggatccttttcattaaaggtctttggtacaggtaatgttgctaatgttaagttagtacgttttatttgtcgaaaacagcttctgatatgctgttaataaaccccagccttcaatatgaatatgaactgaaggacttgagactcgtaggttgattcatggatttttctaacttgataatagtgccttattgagctggtggtcagtggaaaagagtggttgtgacaaagtgtatgtttcaatgctggtctctaacatacgtgcctgtttgtaccatgtgatttgtaacattaccacagtggcagctgcaggggcattgggagtgctgaccccatcctgcctgtctgggttgtgttgaattatctacatatagtcttgtgacatcaatggtatatatttataggataaagcaaagttaacttgtgacaaaagcaaatacgccacatggcgcgatagtgagtttgaatctggcagacctgggtttgtaccctgtccttttaccagctctgtgaccttggggcttgagttttctcatctgtaaattggggtaatgttgtgaggattacctttatataaagtattcagtaaatcttatttttccccttctttcctcagttgcattattgtgctgaaatttactaaacaggtcagccaaaagcatcaaattattattaatgatttcaaaagagaccctcttttttccccctcactctccaatcttttatgttcagctagtatgtttggagtatctattgttttcgtggctcttatattcagttattaggaggtgtataatacaagttaataataaaaagatagaagccctcaaaccttttttcctgagatgggcaacattgaaatggacgagaaccaagaacctgcaccaccttacatttcggcagtagttaggattgcaaggtcatttcacatccattcttttacttgtttttttatgacaacctgagatgtaaatagagatggttttattttcaccattttccagttgagagcattgaaactcagggaagtcacaatagtgaatttaacagctagaccaagatgtaccttgccataaaaacaaaaaatttcaaaatacataagtggcatttggtttttgagtgggtaagtttgtgaaggggcatccatccatcatccactaatgcagaaataaggcagtaagggaaagtgagagcgaaagcgataaagggaggacacagaatgtggaagatctaatgagcgggggacagagtctgaaggtcacacatggggagtgggttgatgaagcccgtgatgaaaggggcaacttggcactggcccattttaagatcacgccacagtggccagaaggagcttctatcagtgtttcatgagcagttactttccttccaataccaggttgtccttttgctccttgtgaatttaggctaacctcatgaccccagctgtgcccctgttaagagactccggcaagatacgtagtcccgactgcctattttagcagttcctcrtgggccaacttcttacattttcttcttatgtttcctgttaaatccagagaacaagctggacatgctaaacatggaaaatactatacatgacaacaagccattaggcagtgttgtccatatccgacacagtgcaagggtttcccccatggaataattccaatggctaagtccactccacttttaaataactcataagattggcctttcacgggttccctggggcattgttctagagactaataggttttactgttaggaaaatttccggatattccttagccttactcttcctctctgcttatttatccacttattcatatcagtgtttcttcagctgttcttcaacaatttctcatgggttgacatgagacatttaggctattatttcttgtgtattaacttatgtgctcttcatgagggtaaagagatattaaatagctctaattattatttctaagacttaaaagctaccagctggctggctgtatgagatacagcatttacaaaggaaggagcacatcgattgatacatagtcctgtgtcttttgtttctcatatctgcttagcctcataactttctcaagctcagcaagattggattacctcttcttacctttgatacctggttcccattctatcttgctacacctacctaaggtaggagaggtgctgcttgtaccaaataggtcatgtctcttcctctgagcgtgcctatgaacaggcatgcttatgcacaccacctaccttacaggagaaatggaaaggagcgggaatgagaagccaatagtatttgctcatgggtagaccaaamtgtgcccaagttctgttttttaaaaaaggggaagggtgtcgaaagggtttgctgtcagatctgcattacgtctgggaccattccctgggacataccacctctctactatttacttgtagaattgggctgcattgggagttgctagtctaagcatttcagctttttcccagccctgctgctattgacagaaaaatgcagaagctggctggacccttctggcacattttgtgttcactgggagggtggggtttataggaaatactgctgctgcaatcctaatctaattatagtgacttgagcttcagttgctttgataaactgaaggtttgaaccaggtgatccatgagggccatctagctctgttattctaggactgattctgctttgaagtatatagagcaaaagatggtgtgcataagcatgcctgttcataggcgcactcagatgaagagacatggcctatttggtacaagcagcacctctccttttgagacctccagtatttgtgccttcgcctcttaaattttgctgtccaccttaaacgttcactcaagaagaacacttgcatttctgattggtctgctgctgcctggcctcccactgctacgtaccctttctttgaggttcacactcctgacagccctggggaagccaaggtggcagaaagaactgggagggaatagaaacagtttcacagtttctccaaagtcagtgaagtgaaaaacagctgtctctgcactggctggcagaatgtaccctgccggctaataaaggccattagaaaatgcaggctccctccagccagccgtaagcctcccctggatcgtgatgcctttcatcctgtgaagtaccatgggaagtgtgactctgaaaacagagcaggaagccaggaacctggagcctgacaaccaagggcaaactgggaccagaggcaaggaccaaccccaggagatgcccaagggacagaggtcagtgtgggacctgcagttagatgatgagtctgtcaggggtcccccaaaccatagcagaagtttcagtcagtaagcaggcagtgggacagtagccacgcaaacagttagttcagctcacaataaggacgtcttgtaaatgagacagccccacctcagacctacatgcttcctgctgatctctttggagagatcagaaaggaacctggccacagtgaggaacttggggtcaggacccagtaaatgaggctagatcctaatgtgacagctctccaacttaaggctagtgcaccccgttgtctcgtttctaaaatatcattgacatctccagtatttggttggcttcctaagtcaaagcctcaagatcagtgcatatggaggaatttgccctggcacaatttctgtccgccttctgaaggacaatttcatctccccggtgaacygtatttatattagaccaggattctgctcctaagtctgtgacatattttgagtatgaaggggtcctgaaaacatagtagtagcttttgcttaaaaatcaaggttcttgaaagaaaaacctattgccagagcaagctgtatgttatcattgttttcagatgaactctacattagatgcaaatgatttaatagacttataggctgttggagctaaaaggaccctagagatcatataacccaacctcatttttttcatgtgcaaaattagcttccagagaatttaaatgatctgtagaagggcagaacccagaccaaacagcccactcttaaattcaaaaccagggtatttttcctgtcgtgtcagatctcagatgtgggtgagcatcagaatcccctgaggggtttgcttaaaatgtacccacccaatccccatccctggagattctgattcagaaggtctggggtgaggcctgggcatctgaactttgaccaaatttcccaggagactctgtacccaaagtttgaaaaccattgctcttagagcccattggcctgaattgcattaaaggtctttgacctttcagaggtcctgccaagtccttgttttccatcttttgggagatggggagctatcactccctataggtcaaagctacctggcagaggtctcatcagaccaaccctaggaatgaatctttagccttaagaacaaattggaagatgatgtgggaatcrgatggaagccttgaaaagagayccccttcccctcttctcttgctcccattgaaacagtaggtgaccccagtcccctggctagctcacagctgtgaccagaccctcccttggttctactgctcccagtcaccctgcttctctccccgacccacatcagggtccccccgatgtacacggtggccactttcagagagcacgaagataatcaagaaggttaaytttctgggaagcccyccaggagcatgtttttattgtgttcgaaagctgctttatcattatcgcttgatgacatttattaattgcccagctgggatgctggtcacagggtgactgacacgtgggtatttcataatagatttcccatttttttggtagggcagccctttgaatttagagtcagatcaaagcaaacaaaattccaaactttaaatttcctatcccaacctcttccatcataggaatccttttctaaaccactttctgagagtaatcgttgcttcgtgacattttctctttttttaaatctgagtttaatagaagaaatactaccatggtaatagattttcatttttcttaataggtatttcttttcccatggtcatccttcaattagaactgcagtatgttagtgttttgtctgttattgcagccagctgtataaacagttaattacttgtaacttaatttgaatattatacagagcatttgtcatagaagatataaaacaagatccaggcagaaaaaagttaacttctatttcctccaaagcaggaggaacaaagaacaaacagctcttgctgcaggggaatagacacatattgaaaacaaaataagtgatctaatcagatttccaggtagtgaagaacagtacttggtgcacaggcaaaactcgctttgtgcttcccataaattcaatttatagatgacttttccttcctgtcttatgcacagtcttctcattctggctttttcctcatcgaagctccagtgtctcccactccccacttttcctgaccctccttagtaaaactcgtgtcttaagaccaggtctgtgccaggacacatctccagtttcatttttccttggttaggtagaccttcctgcttctctacccagctttatgaggcctgaagtcttggtgaggcgctgggtaagttcatccagagacaagcaccctgagtggtatcttaaaaaacaaaccgcttttcttctcttcatgatgattggttagcaacccagggttgccatcatttctcttaaattatcaacacaaccagtagctggcatgctgctatgatagtcaacccctccaagaaagctgtgattcaaaaatcagttgatgagattactgcttaacagaaatatttgaggcaagyggttaggatggttagtaaggttttaataagcggaaatgacacgcaatctcaggtctccaggggygctgttcttatttgtgagctgccrgttgttcttcagtggctggaatgagaaaaagacttgggaaaagagcagtgttcatgcctgaaccactctcttcttttggtgatttacccagctgtttataaaaggagtttctgcaggcccagatacgtgaatgatgagcaaaagcaaggaatttctttctccacattaarattaagtgttagcagttccttaaatgaaggaagcaattttttataacttgcaaagcttctccctcattctttagggaatttcctatgttaatttatgcagtgttaaatttatgcagcrttgaaattcagcccaacagcagtacttacggaaccaatacagagacagtagaacctataaggtgaaagctgaataacacagaccccaccagactacggatccctccagccaaaagccctgagttctgagttggagcaggttttgtcgcatagctggaatataataataacccaaaatgtttgacagatgaattcatcttttttaaaaatccagcctgccattgtgtttgttaatttccctgatagaattgagatggttttgtaccacccctgccaccctttggtagcaagtgagtgcagtttgacaaaatgtttatagatcagccctggtgcttttctgtggtggtcccacatgtcttcaaggagtcaccacaaatcagctgaaccactgtgctatcttggaggattagaattttaatacatgtaacggtattttgtgaatgtggctaaaggggttattaaaatgttacttcttttagtgtctttatgtgagactggcctgctcatcctcagaccagccaggccccatcttgtctctttctgaaagagagcctaacattcttagcatgatatgatttggctgaaaaattacccatctatatttggttgaggttgcagagagaatagtaaaaacaatctctagactcgtgaaaacactctttaactgttgctttccttaagttgtggcagctgcaggttattttgcaatatttgaaaggaggtacattgtcatgtggttatccttgtaaccctaagcccaaaattgtagagaggggtacagctatgtaatcttgaccaggcagatgacaactcaaagctcccatcagtgtgttgaagaaagcagtgaatctataacccccccaaatgcaaatggctaagtggcatcatttataaagagatcactttctctagtaactgcattcccttagataggctcagtatagatctgcttgatactggcttccattttgtatttaataaagcatgatgtagtgaggttgtctatatatctggaatttatagaacttatcatctatgtgattggagaggctcacacagatcaattcataagcaggtgagcatagctgagatgctgtgacgctgtgacactgccaggtggtgtctcttacatggtgggtgctcagcgtgttattttcccagcgaacatggggctggtgcctcacattccagtatgagttcttacaggacaactctctgctgagcaatcttccactgcacctactttgtttttcctgttttccctaaatgcatctagcttttctaatttacctcctgtatgacagaatcattgtttttctcaccactgtgtgtgttatgtctaagtttgtctgcctttatatctgttcttttgtgccctatgacatagacttcttagaaacctataatgatgaacactttaggataatctatccaccctttgctcctatgacccaatacaccatcttgtttgacttctactctttctgttctgtccccttaatttcaatcatttttaaatttttgaccctaaattgttgtgtctagagacctttgacctcagagggcctacagcgtccttctagacatttccattttggatgtctcacccaaaattgcctcacaaacccaaaatttaagtcatcctcctccttcccaggctcccactgacttccctgtttctcttggtggccccatcactgtctttgtcaccaaggatcctcccataccttgggtgtcaccatctccctttttcttcccatgtagctctagttcttgtttccacctttgtctggtttctaatctgcctcctccttgggcttcctgcctgcagactcccctctgttggatccatcatgctgaggatgtcaggttaacattcctaaatgccattctcctatgtaaaagcattcctccatgttttctgtggctagcaggacatgtctcagcctggcgtccgtcctgggccctctttccaccctttctcttggtcagtcctgagcatgtaccctttcttccagctaggcctctcccctcaggattctgtgtgtgctaggcttcttcccctgctgaatcctggccaccgctttctcccctcactcctcccaktcccaccccagtcctccacctggattctctccatggtggaaggtccttggagaagccttccctgctcgctccagctacagggttgccctctgcaccaggcagaaccattcctcttgtgaactgtgaccatctctggaaggggacacagaaactgggaaacggaaggaaaaaattactttctaccagatactatttggttcctgttaaatgttatgctgtttacacaataaattttagcatgtatttagcaaataaataaaaattagcaaattattaccttttattattcctgaattttccacaggtgtatgtattagtttccccaatgcactaaactgagtgcagtggtacctggtaggagctcaatgaagagatggctggaagggtgcgggttggcgggaggcaggtgggaatggataaactagaggcaacctcggcctcaccttgcctctctgagtggttgcaaaactagaggggaaagtatcacttttttcttcttaaagacctctaaaaatgaaggcagtatacccccatttcagctggttatagagttctcatctgatagttaagaattcttcctatctacatcctcatctcccaaataaataactaaatagaatgtagggaccatttctgcaatctgggaataggtaccaatctgtgtagctctgtccagcctcatgagcacatgaacatctgcgttctccccctctgggaaggaatcttgtgtttctctaatgaagagattccctctcagagcctttggagttggggtttgatccctgcactgccttggccatagctttcccccggtcactgcatccatcagccatgctcccaacatttccaaatgcccctaccaggagcacttttgctttctatttgagacagcaaagactgttgcccaagctggagtacagtggcatgatcatggctcactgcaccctctgcctcccaggctcaagggatcctcccacctcagcgtctcgagtaactgagactacaggcacacaccaccatgcccagctaatgtttttgtttttggtagagattgggtttcattgtgttgcccargctgatttcaagcttctgggctcaagtgatctgcccactttggcctcccaaagtgctaggattacaggcgtgagctactgcgcccggccttgttggggttttcaacccatgtggtggtgagaggggtcatttaaagatcatattgataaagcaatggtgttgattaaaggagcaatattttgagaacaggaagcatatgccttgttttctgtgtttttaaaattagatatttgaaaagcaacacaaatcatactaaatagttagtgccatttattttttgtcctctcccggtggtaaaacttactctttctgtttttcttgcagagcatgcttgagaagggaggataaaaactttcagaatgagcaaaacaccatcaacgttaattccagagatggaacattttttttcctagtgagaaaacaacccatttgaagagaagaccactaatgagaagaccactaaagagagacatcaagaatggattcagcagaatcatttcacgttttgaacagcagcagtttgaagggccaaagccttgatcagggatcagtcattaaaggacactcttgagtattagtaaaccctcttatgatgattaaaagagaagggcagccctctccaccttttggtactttctattcaacttgcactgaccataaaatgtttctcttctgaacaagccccatcatttggtgaacctccaccctaacaaagtaggatggggttgggggctaaattaattggagtggggcgaggagagagccagaaaacatagatccgagggcagcagtgctgggtggagagagccagaaaacagatctggaggcagcagtgctggatggaattgtctaggctgtggcatgttggttttgtctttcttttctcctttgattatgtaagagctatttcattataacttattatggtgattatacaggcaagaagacaaaaaggagagaaaatgtacctcttctactggaataatgtttatgattacaagtgagataaggtatttttatcaatatgaaggcaaccttggctgataaaacctctatagtgaatactcacatctttacttcactcactatcaataataaatatattttctgacaaagactggcattgtagctcctcacacattcctttggctgggttagatgtctatgcttacgggaattgagctgatttatattgttaataatttgcatttgtgctgtacctttcctctcaaaggctccagagcatttcgtggagcctccgacaggcaagtgatgcttataacttgcctatcaggtaggtagaattcgggaagatctttacaaattgtgtgaactttcctttctttgggatgacttaagtcatcctgcctggggcaagaactagattagataaccttggttaggaccttctgacyctgcaatactaaaaaacgtttaaagaaaataattcaaccattaggtttttttttcctctttccartttttcaaaacttcctgattataactctcccttttttttttttttttttttaaccatgattggtgcttcaaccctggagttgagtgagttgkaaataagtagtcacactgaagctaaatgaraaggttcttttcagacataggagtaccagtgctctgtgatatcctttaagtgtcttttgtcatgtaggatttttattttattacgaagcaagtgaatttagcaaaatacaggttctgtattcttaatctgtgtwcaaattctggctctgctgtggaattcaaccaagtcaaccaatacttcttcaactgcaaaaagggggcaaatggaagaactaatttttaggcttacagtgaagagtccaaatgctgactcaccgcatacgtttggtcagacccagtaaatgctggcttgtgtgatgattcagtaaactggcatttggcgttgggggcatagaacgtattcacatgcccaagtaccttttatttaaagttggatgtacttgtgatggaacagtctcagccaacgcatgtgagtgtaactgcagctgcttattcattcaggttccccaggcgatggctccctccgagtgacatgttcatagacacttggggacacacctgctggcctaacgttgattctgagcaacactagaggctctcctgccataattactgatatcctctgtgatgactgcttcatgaagttttttttgtttgggtttttttgttttgttttgttttgtggggggctttcaggtttcttttttaatggtctgaaagaagctgagtttatttcagtgtgaataaggattcactggtaacttgaggagcagcacattttgatgctgtcagggtggcatccaggtagctgcctgagagaaatggaaaaacctgagagacacaaaaacaaatgtttacatggcgacttgctctagtgtttgcaaatcagctaactcacaaattccctcctatactgttttgttttgcaattgagagccaagcacttggcacatcccaggctgccagtcttgcctctggcaggcaaatgcagcgctgtagagtcaggcgtctaaagtgggcgaaatccaggggaaggggggttggttcgacaggccgctcctcccagcattgcttattaatttatcattctgataagcatggtaggtgcaagacaaaagccagcgctttggggaagtaaaaggatgaaatgatgcctttctctccgtccttggagagctccctgctgatggcatcacagctctgccaggtcacagtagctttccagaccactgcttgggaagagtgttgtgatttatatgaggctgtggagtggtacattccaatcagtttctcacttaagtagaatgcaccttcagccacagtagcttagctcatgaagccaagaagaataaagtgtcttgaaagctgatcagaggatatcacactaaacaaatgtttgaggaacttatagaacacagctgggttgaatcagcacgaagtcctctttgagaagtcaataacattacagtaaacttgccaacatgcactagtttagaaaagtattgactaatcatgattagtagcaaatgtagactgctaaaagccagatgcctgtggccagttggtcaacccacaagactccctacaacagtttttagcttagaactgaccaggtagtcacatgtcctcgacttctcgggctgagaaatggagaatgtgtggttcttcacttgctgtcttccagcctgcaggtataattgcttttgccagaaacccacattgcagtgagctgtaggagatgacccttttgagatttaagaattaaagcaacaaaatctcagttagattaggaggaatagttcaagagatctgttgtacaacatgctgactggttaataatgttacaacgtattcgtgaaataatttttttaaagaattagcagttgaacaattgaaagggcagcagtaacttgctgtgattcaaaccaagtgagttaggaaaatagtctgtttagaattaatcctcttgaaaggctaatgttgtgaatgaatgcgttgatactcattgttatctcactgctctcctcccgtcttcctctcccaagttttcccagtctctgcttcctcctctcttctctgccatcttcattccctcctctaacctcctctgtgtgtttacacttttctcagtctctccagcctccctccagagaagcagtgacaacggagtgcacagtgcatcctcctgagtgcagagtcctgggctcttgatccagctctgctccatttgtcagtggggacaagtcacctccctctggtctctcactgtacagtggcctgttcggggtcctttccattatgatttgtgttttttgatacttcccttcttttcttccccggcctcctaaatcttttagtcctatatttagtacttcctctcatttagtaatttcttattcttacagttcttataaactgggtaaattttctaaatgaaaactatatttgtatttctttctctgtgcccttgatggtacttttcctacagcttatggtctccattaggtttttgttttccatcagtgccctgagggatttactccgtgggcaggctgcatctagtctaggaagtcaccttaggacacgtaggccatttgtgctgatgacacccacggtccaaaccacccccagaataggggactgtggtgcgggtgttccgaggcctgcaccggccagtgaagaatacatgttctggctaaggagtccacggtttagtttaaacctttattcctggcatctgttttagcttcttcctcccagcctttaagagcatgtagaatggagcagatttcagtttttactctccttcccttgacccacttgattttgaggtaccaacaataactgaagcaacataaaggaaataaaggagggggataaagacctgtttactgtccataaagtagaatgctggctcgtggtgatcaacgctgtgcctggagaggactggatgtgattcccagaagctcctttcactctctaggagctttttttccttttttggccttttttttcctttttttttttgaaacagggtcttgctctgccacccaggctggagtacaatggcaaggtcttggctcactgcaacctccacctcctgcgttcaagcaattctcgtgcctcagcttcccaagtaactgagaccacagacacgcgccaccctgcctggctaatttttatatttttagtagagatggggtttcaccattttggacaggctggtctggaactcctgacctcaagtgatctgcctgccttggccccccaaagtgctgggattacaggcgtgagccactgcacctggtctgtaggtgctcattctgactgtaccatatatgaaaaaaaaaagtcacttttaattattccactgcaggtgagtcagagctatatctgttttacaatcatccctagcctgcgcatgacccagggagactggagtggttggtgatttttcaagctctgtaatgggaaacttcaaggccccccttgggtattgggaggctggtcctgcccatctccctgggcgagctctgctactcctggatagcactgctttatccatgatggaggatcagattggtaaacaaaagacaaagtagatttgttcccccgtacccggaatgagagtcatcttcctcacccaaaaaggttccttatgctaggaattttagccaaagcaccagacagcttccggagctttcaattccattaccttccaaagcccagagtcattggatcctggctttgggagaaaaacgaccaaccgcctaattcattctcctacctccaggctgatgtttgaatggagatgatggaattttatatttcatgttgtgctctctctcctctggtccctccagcctcaatattgctggcagagcccctaagaagagttgaattgctttagtttatggggagaaagcaaaaattacccaaatcaaaggtatcttccacttttcctacccttccaaatagattcatggtctctagatcatgataatatgcccttgtatttcaggggacaagcctatgttaaatccactttggattcmgaaaatatggtcatcatattgatgcttttcagttaaggaagttggaaactgaaaccatttcattccctgcaactcctcaaaccaagtcaattctgtggcaaacagctttgcttcaatttaatagagtacttcaaaactcttgcagtgatttggattaggtgaggcctctatactcttcaaaggctttcccatgcagaaagactttacttacctacctctctgccccccactccctggcagatagtctctctcctgggaggaggcttatcaggcaggcagtggtcactgtccctttgttgagaggccagtctgcttcgaacataagcttgccttcaaagtaaattacatttatatatcatggctttgaaatgcaaacatggaagccggaggtcagtggtcagttgcagggtaccactctgcttagctgtgtgcctttcttcccagacttgccccagcacagagcagcctgccaggtctggagtccaagtggctcatacttggggagcctcctgcggactccccttccctgtcaggtctgccctcctcactgcccacagcacagattgaaagcctctgttcattctctctctctgcccctccttgcaaatatataaaatcgaagtcgagggcccgatgacttgggccaactgcctattatctgctgcctgtgcagtccaagggatgagggtaaaaccattttcttcacttcatagccacaagccgtgtttctcagtcagcatcaaaccagcaacaccatgccagcctgcacattttagcttggctttgcatctccctaaggtaatgtgcatcccggtctcagaagcatgaccatgaagtcattgaaaacagtattcaacctccagttgaagtggcattgttgttttatttcaagcttggaaggcaggctgcagagcaggggctgggaactccacttcagcagagggtgaataggatgtcgggtaacctgctggcaggagtttattttcagtcacctccgtgttcttaaaatgcctttgcagcagctgcatgttaaatgtgaacccaaaataaaagagcccacactcctcaccctcaggtgcttaacacagaacttagaagtatcagtgactaaggcagaaggtgtttttcttctattggaaatgagtttatcagtgaagttagaaagatgttatattttagaagcagaagaggggttatgaatcaccactaaggtgatgatgtttcaggaacatcagaagtttattgtcctgagtttttataaccactttcaacttcctcattaaaggagaagcttgttcatcacctgtggctcagcatggaccacttagttcatcactcctgccttctctggttccccggagaaggtactgttagccacagtaccatgtcacactggcattgcctgaatcattgcctgaattcagcatagcctctgtgcaccaggtactgttccaggtgtcagggatattgtggtgaacaggacagacaaggtccaggcctcgtggggtttacattctggt

SEQ ID NO: 1618 - DNA, 444922 bp, Homo sapiens
  misc_feature (1)...(444922): n = A,T,C or G, or insertion/deletion polymorphism (see Tables 1-2)
ttgtatcgccataagaaatctgttagtactccagtagcaatgaagggctactcctctgcccttagcgttccttttcacacaatcttcctagatattttgccatgctaatttgtctaggtaaattttgtgtcagtttttctaagtccagcaaaaaatgctactttattttttatttttgtttttattttttagaaagaagactttgctctgccacccagaatggagtgtgcagtggcacaatcatggctcactgcagcctgaaactcttgggctcaagcgatcctcccgcctcagcctcccaagtggctgagactacaggaacacaccaccacacctggctaaattttttaatttttctagagacaaggtctcactatattgcccaggctgatcttgaactcctggcctcaagcaattctccttcctcagcctcctaaagtgttgggattacaagtgtgaaccgctgtacctggcaaaaatgctattttaattgagattatatgacagttgtagattattttgataaagaactgattacattacaaaatcaattcttcctatataagaacgggatatagcattccatttatttcgttatttcattcctttctcttctttagtatacattaaaacctgcatattagttgttagtattccttggtgttttatctcattactatatattgcatcatatgtgtgtatggataaatgtgtgtatgtatacacagtcacacatgcacctataccttaaaatataatgttaaagtagaaccattctcttcacttctcacaaaagttttttttttccattgggactagacattgaattttgtctgaagactcactaacaatatatggagctgaccatatggcttttttcttttgagtttcttttgaagaattaaatactagaagtttggatgttaagccaacttttatgacttggctaaaacccaattgtccaaagtgtattattcttttaatacattgttggcttttatttattactatttttttcaaattttattttactattcaaaacaccaatgtgcactcgtctgtcttcattcaattttatattactgaataatgacataatgataaaaggataatataatgatataatgatgttattctgtctttgtaaattccaagacttattttatttgcttaaattcaataaaatctgcttttgaaattaattttactggctttttcaccctaaataatacttgtctctacatttggacccttgtaaggcagatagaaaatgagattatttctaaggatcataatagctaactgtaccccaatactcgtatacagacatagattttgtttccagactatctcaattctacttctattacctatcatcataagattatgtttctctcttcatttttgtgcatatgcacaagttagcaaacatcccaagtagcagaaacatgtgaccaaaagatcacccacaggctcaggctacatttatgcagatttaatcacagttcataaaatcgagctcatgagggacaaatctggagttccctgctacgtacagatagatataccagtttaatcagacaagtctttggggccatacctgattctgtgacatgtacacaagccagatacaaagtatgaggaagaagtagaaagactggtcgtggcttgaaagacacttgttcccaggatccccagatggaccattgggacaattctgcaagtgtttcatgcctccaattttagtgtgttccttgatcagccttctcaattaccattttctcacatgctccgtgatccttgtttcctggtggttgacgctgggaatgaagagaggaataaaagtgaaaagggagtaagtagacttgtttcttgaaacttaggattttcaaacttcctggatcgtaagaaaaagaaaacgtccaagggggatgaatgagcaagtctgctgcattcctttgcacaccsctttcatcaaggaaactttgaatacctttactttttctattggctgcccaagagtttgtatctcctaaaacaaagtttgtaaaccagtatcctcgattgacctgaacctgggaggcagactgatagataatctcaaaacagagtgatctacagcctggaaattctggtgaagaagaaaaatcagtgtatgagagagctagaggaagaaagtttacagtcaaataacatgtttgaacgtgcagttktgaaaacagagcatgccccaatgtggctataggactgatgggttaaagggaatagaggtgtggtagccaactgccaagatgaccaccaatgcattgtcttgccaactggtttttacgcctctatgcagtctcctcccacagtggatactgccaatttgtataactaaaggatactgcgggaaagacgaaatatgacctccaaggctggatcataaaagatataatggggccgggcgcggtggctcacacctgtaatcccaaaactatgggaggctgaggtgggtggatcacctgargtcaggagtttgtgaccagcctggccaacatggtgaaaccccatctctactaaaaatacaaaaaaatatctgggcgtggtggtgggcacctgtaatcccagctacttgggaggctgaggcaggagaatcacttgaacccaggaggtggaggttgcagtgagctgaggtcatgccactgcactccagcaacaagagcaaaactccactttaaaaaaaaagacattgtggcacaatccagctgccatgaagctaggaaactcaggcagtgacacagagaagtcaacagggttccagccaataacaggactaactttccaggcacgtgagtgagctgccttggaagcagattttccagccccagccatgcttccacctgaaagaagctggggcaacatcttcagtactatctcatgataccctgatctggaattacccagctaagactaatggattcctgacacatagaaactgtgtgaaataacaaatatatattgttttaagacattaatttttgcagtaatttgttatgaagcagtagataagttatatctgattttggaggtggaggaggtctgtttgtgtgatctgtaagaggaacagagatgaagattcatagagaaaagcaggtccaaaaccaatatgccaacatatagaatagacaaatgggtgctgagtcacccagaataatggcagggtgtggagtgaagaagagaaccaagagcccaactagatccaaagtcttaattttaaaaagtgggatggaggatggttgatgcaaatataagtgcttcaaaagagcaggaatttctataagaagaagtaatcatttgaaagctgaactggagccccatgaaggagccacagactccctttcccaaccttcgtgcacacagaaatgggctctggtggaaaatatgaaagtgcatgagaaatgatattactgtccacacactaatctcatccttaatatcaactggaccttgctatactaacttaagagtgttgatcaaactttctaaatttttttgatgccaattttctaaggaaaagaacttcttataagatttttaaaacaagcttggtttgctgcactatttgcaatacacacacaaaaaggtcacatttctgtgtccttttgagtaaagtcatatccatctttgaagcctctctcaggaccacaagctgtttttttttcttttttcttcttatggcttcatcacttcactggtgttataccaggatttaggaaccaagcaatccaaagaaatgtgggagaggcctcgtctggccagtagtccaacatgattgcctctggaattcaccatgagactcacagttcaccagaaggcagaggcaaaaatcagagttgccaattaaaattayttctaaagatgggttcactgcttcctattcccaarcctttctgagactccatggggtgaatcacttgcttcttttctgyatctcctcctgcaggcatttaagctttgtaatttagttacatgcatacttatatttatctctttccaacaattttgttcatttctgatatcttctattgtcttccctcccaatttctgcccttttcagtttttactattatcttgtggttttaggaaaaagcagatataaatatgtgtttaagcaatgctatggtttgaaggtttttgtccccttcaaaatttttgttgattcctaatcccctatgcaacagtatcaggaggtgtaacgtttagaaggtgattcaggaggactcctcatgaatgggatttgatgcccttagggcttgatggaggaagtttgaccccctcttgcccttccaccttctgccatgtgaggacacagtgctcaaggcatcactgtggaagcagagacaggaacttcaccagacaacaaacctgctggcaccttgatcttagacttcccagcctccagaactatgagaaatcaatttctgttctttgtaaattacccagtctgtggcattttgttataatgacacaaactaagacaatcaatcagagttatatttccttgtaagtataaattttatttttttatttttatttttattttttttaagaaggagtctcgctctgtcacccaggctggagtgcagtgatgggatctcggctcactgcaagctccgcctcccgggttcacaccattctcctgcctcagcctcccaagtggctgggactacaggcacccgccaccacgcccagctaattttttgtatttttagtagagagggggtttcactgtgttagccaggatggtctcaatctcctgacctcatgatccacccacctcggcctcccaaagtactgcaattacaggcataagccaccacgcccagccgtaagtataaattttaaaatcacttcttaattaatataatagatgaaatgacccacagaagtatccactcacagaaaggaccatttctaaaggaccagtttggcctataaagaaaatacaatagcagaccttcacaaattttctamcatcagaaaagaaaaaatatttagatattaaactgaatcaaatgtgatggtcttacccagacaaaggaagactcagcaccccatttccaagttaactgggagcttttgtgttgctctttttgccccccttatatttgattctgctacctgacctttaaacagaaaagctttctcttcttgctatctatgtttgttatttaaaagatcaaaatattaaactcttgctatatctatttgtcatttgaaagatcaaaatattaaatgattgtgaaacattttttgcaactgtaagagggttgatacttttcctgaatattattcattcaacattcatttatttctttgacaaatatttaagagatgctcatgatgtcctaggcattgagctaagaactcaatgttgcaatgtggataagatccagtccctgtgtgttcatacttatttaatactattatagacaaggcctttaatacataccatagtcatatatcaatttttaattagcaatatgaaataagagaacaatgggactttccactcaatttgacaggtggctaaattttcagttactgaatttactattttagggtaatctagcacatgaccaaaatttaaatgcacagaacagaagatcagagtaagaagagcttccatttggattatcactttttctacttggagtcacatactgtactttaaattgattaagaacatgttaaaggtccaggtggtgatttccagctacaagtccaaagtatagaagaatgtgtttaaatcctacgtttatcagatccataaatatagttccttctatgttaagtggctttatttctaagaacccagccctcggtcctgggggtgcttcccagcccgctgctggaattcctgatcrtggcagtctgctgaaacatgagctcagttaccaaatatagctgagtggagtaagaggacagatgagagtctgaggccacagttgcctcaaagtgaccacggaccaggcagtctctaatgaataggcaaggccacaacctccwttctcccagaaaagaagaaatgctcatctgaaattcatcacctctctggagtcttcaaactgaccaagcattgaaaaggtctgtaaggtgtatcttaatatactaactagtagggcaacattttaaggacttaaaaaaaaaaaactaaaaatacaaaagtttttctgaagatatgatactatttacaagataccttaattattcttttgcttggagaggaaacgtaatgagaatgttacggttttgccaaaaacagataatacgtaagatttgcctgcccacttcatctctgcctttgctgtcagagaattacactttctgttataagcttaagcatgctaagatggtgctatcaattccaaaaggattaaatgtatttatggagccagcttttgtcaagatcgtgtatgtgttatgtttcacagaaaaggaaaacgcagctttctagaccctcacccatatttaagctagataagtgatgatggcttaaagtgatagaccttagatttcagtaacattataaattgttaattacactttcaaaagattctaaaagtaactcactggacataattaaatgagttgggatagtaacagcaggtattttaaattatattcatgcataaaatttacatacatatttttaataagataacgcttactaagggaaaccacagtgcaatctcgagtccagtcaagtttaaacatcacagaataatttttatcatgttgttttaagttgcacatgaaattgtcttgaatccaatataggaggttgacataaaatgatttcaggctcatattacttattaacatttgctaaaaatactaattgccttctagtatgaataatgtggtgacatataaagccatttcttggcaatataaaactattacaaatctattcaatcacatatatgcagaaattaaatcctcatttcatgataaatgtgccttccaatgttttttctcacagaaagaacttgaatactcacctcaattattcagatttttttttcagatttttaaaatcaaagtctctttgacaagttattgctaacagcagaaaaggccgatgaggtttatctggccactaactgccctgtaaatacatgattacacattcctagaatataaattagtcctctggcatcctagaatctggtatggattagggtctgtatcccaggggttctgtgtcagctcttcctctgggtttctctgttattgctagagctgaatattaaaactggccttatagcatatttcacaatagaatgaggatctggattgcactggacaagtacaatcactttgacctccttacctcattttttaaaaatgtagagggcaatcattattcaggtttaaaaataaatmtgacaagttctttaagagataccaagtggaatctgcaaggcmcagacaagagctccacttcttaaacaatatgtgtgtggaggctgtcaaagggtattgcaattactgagctccagttagaaattcaggccatctagagttaatgactgtgtcccggtgaaattacagcaaagaaaacaaagattgaacaaagtatcttcractaaaatttctaactgttaaatcatattagagaatatagaagcaaatttggtaaataggttttgaatttaagtgagaagaataaagccctgaattggataatggtaatggaaatggataattcagaagtaaaatctaaatatttgcaatggactcagtatggtgaataaagttgataagatgaacaggacatgggataacttcaaaaactctgtaaagtatcttatttggctgtttctgcattaaatgagctattagattatgtccttgaaattgagattaaataagctgtttaaagagatatttaaaactgtaggataaatatatctgcctgcattgacaatttaataattagaaaggaaaataatccatgtgtatttattaagaaataaattataaaattgtagtgcattttctgcatcaaacataaaatttcataaaattttcgtgtttgacttttgccctaaaggaccctttgtagcaaaaaaaaaaaaaaaaaaaaaaaaarggaaggaagaaagaaagggagacggggaagaaggaagggagaagggagggaggaagggagggaggatgggagggaggatgggagggaggatgggagggaggaagggagggagacatggaagaagggggaagggaggcagaaggragggaggggggagggaggaagggagggactttattgatttagtctaggggggttgcctgtgattctgaagcatgaaaattaagtgttaaagcttttctaactttggttttcatagtttaggttttattaaaagatatttcaatatctaatatttgtatcaatggtttgcattacttttttagtaattgcttaaatatgaaaataaataaaactgctaaacctaaaattaaaaatcacttataactttttttcaaaaattacaaaataagcaacaaaagatccccctgcatgtcccacctttcaactcctacccctgcctaaatccccccacagaggtcagtgttgattgtttggtgtatgttattccaaccattttcatatatttattcctatctatgtatacatttttaaatgactatgggaatttagctattccacctggactctctaaagaatctgctgaatgtggtacatggtattaagtgatccttactgcctgtcaatgtttttctaacatcaaactttttctttcaaaattgtagcagttcttcatcgactctaaaagtatttcacaaacagacttcaaaagttttccccttatctaaatttttaaagtaatttcctataatatctccaatgagagaagaaaactttgcagttaaatgcaggcttccaccctgagtctgccrctttctgatggctcaggttgggccaaataattgaaactttttctgctgcagttgtgggtaatacaaacaataaaatagaaaaataacatctactacatggattgttctgaggatcaaackgttcacttttgaaagcaggtaacttccaagctgttatgtaggaacaacttgcattgtcactgaattctttctacttactagactctgctctttctcatgtatattccttgtcttccccaagttcctccacgtcaaagaaatctgttgtmatttcaacagtcaatagtgccttgattcatggggatcatgccagggggtggtcccataagtcttgtttgtttgttttttgagtcagggtctctcttttgcccaagctggaatgcagtgacctgatcatcgctcactgcagcctagaactcttggactcagacaatcctcccacctcagcctctggagtagctggggctacaggcacacaccatcacactcagctaagtttttgggtttttttytgtatttttgtagagatgaaatctaactatgttgcccaggctggtattgaactcctgggctcargcgatcttcctgcctcagcctccaamagtgctgggagtacagatgtgagccaccatgcccagccccctataaatatttcttaactgacaacatagaggattctcccaaatatcatagagctggctttcaggtaatctatccccaaaagtcagcaactttaaaggcaaatggtagtcataatttttaaatttgtctattttttctatcatttgtatattcatatatgaatgtgaaccatatacatttatgcctatagtacatattcaggatctaaaaaataaatgttttgccaaatattaggatagtcatgccaagataagattcacaaaattacttatgtcaaatgtgtaatatacataccaatgaaaacttatttatatgttctatattttatagtataccatgaatctaacagaattcagatgacactaacttagggagaagttgcgaaccataaaattacaattaaaattaatctataaattaagtgacataaaattccttaagaaagaatgaaatagccaggcctggtggcttgtgcctgtaatcccagcaactcaggagcctgaggcaggaggattgcagaggccaagagttcaagacaatactgggcaatgaaaggagaccctatctctacagaaaataaaaaagaattagcaggacttggtgacatgcacctgtagtcccagctacttgggaagctaaagtaaaaggatcctttgagcccactagatcaaggttgcagtgagctatgatcacaccatcgcactactacagcaggggcaaaattgaaaagaaaggaaaagagaagaagaagaatgagatatgcccagggagttaacaaaataggtcaccgtggacatttacctttgaaagcaatatttgcttaggataagccaagatgcttataaggatataagctgcctgttgacaattcaaggtygataggattctgtaatgactcacaatatttgccaaccctcccaaacctttgcttcaccaaatgtttgcttaagatgaagagtttggcattaggcacaygtygaaattcacctgggagaatttcccttcagagcgccatgaggtgacatggcagctgcccccatggtacactctgaaggaacctaaaggaccattgacctgagcatgttctcctcttgtgactttcaccaccctccccgccaagggtgtgcccmccaaaacaacagtggtctgtagatgtgaacattaacatgcgaatgtgcacttcattttatcttatatgtctgcaccctaacaactttcaaagctagtttgaggctgtatgcaataaaagcatagtacaattgcccaaaatcaattaagaaaatgcagaagatcaaaccaagtataaaaagctttgaacttgaaatgttttctcaatttactacctttgtcctttctcttcttagaatcttaactccctaggacagagaatctatcttctttccagctatgtccctggcctatgaaagaggtgcctagcacatagtaggcactcaataaataaatgctgactgaataaaacaatgagaaaagtaagcaaaataaattttttttttagctaaaaacatctgaatttctatgactggaaatttaaccctgagcttgctagtatccgtgtgaaagagtcatcaaagtttacagaattctttgtctaacagaattgccagaaaatagaataaatgcttttctagttccaaattttttcatgagaaactttctttgagggtaatgagaaagactgacatccacgtctttatagatacttttttttaacacaatgtctgacctatgactgattttgctttagcgaaatgagcaggtaaagtgtattttatatgtagacacaaacagttatgtgttatatgtatacactaacatttagcactgattactctatcaagtttttaccagaaaacagagcccgggacacaagcaacagttgataaaacagaagaaaaacctagtttaagagcagaataaygtttagctgcactcagtggctcacatctgtaatcccagaactttgggaggccaaggcaggaggagcccttgagtccaggagtttgagactggcataggcgaaaaagggagacctcgtttctacaaaaatatattttaaaatttagccaggcctgacgatgcacacgcgtagttctagctactcaggaggatgaggcaggaggatcccttgagcccaggaattcaaggctacagtgagctatgatcatgccattgcagtccrggccgggagacagaatgagaccctcactcaaaagagcagaataacacttagctgaagagagcatgtcccagagaaatgtcgcagcaggttctgggaggctgaaagcaaatcagtcatcagaacatttcctgcctcgtgcctttgttcacatgtgtgtcaaatcctatccagggctcaaaccacatttcaaacacccggtatttcttagcttttctccatcagctgctgtaacccagacagtgtgctaagcatttgccatacaaagacgccagtcacagctcctgcttccatkgggctcacagttgaatgaggaaagcattctctaaacaaatacttgtaatttaatatgatgactgctgtgagaaacgcaatgcaaagtaacatgcttggaagaagaagcaaattatattgattggggaactgttagaaagcaccaaaaagtggtaaaatttaagaaagttttcaaggatgaaccggagtttgaaaaacagaaagagggctggatgcagtggctcatgcctgtaatcccagcactttgggrggccaaggcrggtggatgacaaggtcaagagatcgagaccatcctgctaacaaggggaaacccygtctctactaaaaatacaaaaattagccgggcatggtggtgggcgcctgtagtcccagctactcaggaggctgaggcaagagaatggtgtgaacctgggaggcggaggttgcagtgagccaagatggagccactgcactccagcctgggcaacagagcgagactccatctcaaaaaaaaaaaaaaagaaaaagaaaaagagaaaggaagcacattttaagcaaaaggagcagcaagtgcaaaggtgtgaaaaccagaaagaatctgaattgtttgaggaatggtgagtgggccagggaggcctgagtgcatgtgtgttggtgatgacagagggtgaggctggagcatttccatcagctcaggctgtcsacgggtatgtttaacctgcacrtcgtsstttggaacttttctcatcagccggggagcatcataggaaaaaaataaaaaccaaaagagtgacgtgacacaatttgtacctatgatctctcttaccatttttatcccttactgcaatttgttgaaactattttaatagaaattatcacgctcctccttgtaactgagttattttttactcttgtctaatccctcctactggattgtaagatcatttaaggagaataactacgcctgsctcatctttgtcctccttgaagcttctcttgcacaactaagcagttgttccgttgatttcatgttcaacttactattccrggaaagggaagtagaagaaaggaagcatgactgtaagatgggcgaggccaaggaagagtcatttcctccatggtgaagaacataatgctacgcaacttcaagcaaattaaaaaacagttgtggttggccaggcatggtggctcacacctgtaatcccagcattttgggaggctaaggtgggcagatcacaaggtcaggagttcaagaccagcctggccaatatggtgaaaccctgtctctactaaaaatacaaaaatcagctgggagtggtggcaggcacctgtagccccagctactcgggagactgaggaaggagaatctcttgaacccggcaggtggatcttgcagtgaactgagatcatgccactgcactccagcctgggcgacaaagcaagactccaactcaaaaaaaaaaaaatggctgtggctaatgagygttttagggaaaatgacaattaagctaaactgctaaagctggagatgatggataagacaaggatgagaaaaagaagaagacagaagaatttctaggaaattcagattccttctgagaaaagtgaggaggcaggggacaggacaatttaaagatgccaaagaatcctttattcttcaaaatttcaaartctttcaatgctacttactaaagtagaaccactttaatggcgttggtgtttacctcatttcctcttcactcattaacagcagtattagtgggtctttttagtctatttcatcttctgtgtctatcacaccrgcatagaattaccaagagcactgtttgacagaaaacatgaaatctcaggcaaatgatggagatgtttgtgattgygtttcattccttttgattttgaccttttcattttggagtgctgactgacatggaaatctctgaagcacaattttccagtgaacttggcccgcttggaaaccgcccttgttcatcctcattgaatgagcattttccctagaccacgtgcatgttcccgcggcaataactggcttgcaaattaagcctgaaccrgatatgccatagaactattattttctttttcaatgtgcaagcagttttaaagctacacctaatcctgactactggatcctgtcagatggcgcctctttaaaaccaaaatatgagttaataagcaggtgagataatctgcctccagcaaacactccctacattaagaattgaaaatgttttcatcattcagaagtttgctttaagctttgttatataatgctccttgtgaagttttaaaatgtatcatattatgttcatttggaactaaaaagcaattgaattaatagcagaactcwgatttctgatccacagttttgttagtttgatacattgcttaggattctcaattatgaaaactacaatggtaagatggtaaagtgcatagaacatgagctctggagttattccctgggcttaaaccttggttctcccactcagattttctgcctccatttcctcctttctaaaccagaggctgctgtgagkgttttaaatgaaataatctacatgatgactctgggcacaatgcccaccgcagggtaagcagtccattattagccattatcattatcaatcatcgtgatcattaatwgcctttatatgtgttatatgaaktcattaggtagctaatgttctatagaaggggttggcaattttttcctgtaaaagtgcaggtaaatattttagacttcatgtgccatatagtctctgttgcaactactcaactctgacattggttcaaaaaaacaaagacaatctctayaytcaaactcctacccatgaattccaacccagcatatatgtcaaaggccacctattccttgaccatattttcartggccttgcccacttccctcccattttacctgcatgtcaaactgggatcatctatctctgtaccttcacctggatggctgagctctggtggagagaattgcacaatcacacagattaatgacactataaatacatcacatctaacttcaaccaggccctcacctctacccataaatccttcttacraaacttccttcccccttttwctacaacagctatttcaaatcatcttctgtcctcataaacctccaatgcacagaagtctcagtttgggaactctcctttctttctattacaaattttgcagagaatctcatgtttctctctctctctccctttctctcttaccgccccccatgccccaacacacatacaccctttgttacttctcctaacaatgaaagaactgcccccttcctactggaagctgaacacctcatactcygtttgtcctataataactcatttcttcttacatcttttgagagctgacctataaatcatccccgcttttttacatttattttcagcttctcccttcttactgcctaatttggtttgtataaaacatgttacagcgctctatcctaaaaatgaacaaacctcaccagagtctatacttttgttcaactactaccttctgtctctccttctttctatgatcttttcaaaacaaaccaccacacctgtaatattttctttctttccttctttcctttccttccatgtagcaatctggyttatatttctgttgcatacaccgaaagtgctgttgcaatggtgctaaatattcccaagttgctaaaatcaaaaatcaaaaggacatgtactgcttcctgagatattttctttcccagcttccacgatatctagcttttcttgcttccctgtgattattcraaggattctatcttctccttcttttttcctcgatgaccttatgcattcccatgtcttaaagtgccacccataggctaataatccccaatccagctctgttctcccttctcctgggctctagatcagcatctcaaatctcctagacatcaacaccagagttaccaaaggtccctcaactgcaaaaggctcaaatcaaaatcaagcttaaaaaataaaataaaataaaataaaaaaacttgttcctccacttgtagcatgtaagttaatggtaccagtcatctggttgttgaggtgagaaacctgtaacccygcctctgcatcacctctgcctttaatcaattaccaagttctttcctttctatcatctatcttatggaccctggacccactgcttccctgaatcaccagctctcacttcagagtccaagaaggacacatctaatygctgtctaggccaagtgccaagacttgtgcccagtctccaagcggctgggaaagaaaatacttggagatttcacatcccattacaagtgagttcagtttctcactgagcctcagaatatgaggaattctccaaaatgaagacgtccagatgacagcaacaccaaacgtgaaaccatgataaatgtgygcaccccctggattactgcacaagccttctcacggaccrccctactgtcagtcttgtcttcctctttccctacctctgtcccggatcyagactgcaatcagttatctctcaaaaatgtaagtctggtgatgtttctcaaggacttaacactcttccttgcctactgactacccataacataaaatgcaagttctctgcatggctccaggccctctctgacctaactcctgctttctagccttatctctggttattttcccatctccagatagatttctgtttarctgaaatgcttagtagaattacctgagtctgccatgtgctctctgggatccaagtcttaraatacatatttgccagtatcctcttcacctccccgctcttcctcatccctcacacrtcattctttcagctttctctctttcacaaaggtttcctgatcctgaccttgctgttgcttctaggtgctatcacagcactttgtttttctataccactgcaggatgactatagctaacaataacatactctatagtttcaaatggctagaaggaagatgttgaatgttcccaacacaaagaaatcataaatgttagagatgaatatgctagttgccctgatctgatcactataaattgtacgtattgaaacatcactaggtaccccataattatgtataattattatttgtcaatttaaaaaataaaatacaatttaaaaaaagacawactcaattatataagcttattatttagttgtaatttgtattaagttccatgagggcaaaaaccttctctttttcaaggtcatatccccgtccctagcgcactaccaggcatgtggtagatagtccataaatacacttygagtgggtaattctggtccatgyagtacatctatcccagcttaggcttcacaatttcrtcatgtcaagaatcaaaggttttgttgcaattatttccttggattttcagcttaatctaccacaggtttggttgacacaaaatgtttttcaatctcctttagcactgatttcaacacaaaaactgaatttctttcaggccataataaataaataaataayaaataaaaaacacagtagctttctttcaaagaaaaataaattttacaagaaatgcaataaatgaaaatatagtctgttgtgcctttggtacacaaacctactttcagcccycgagtctccccctctccaccttcatgtctcttctggatccatgttacctaatggctcatctccccacaccttgtaagagttgatcctgatcctggcttcccctaaagttatctaccatgtgtgctgactgaggggccaattgtacttcagagctcattactgagagaaaccaggctgccttggtaggacaaactataaaacgttttgcaatatacaaaatggtactgggtgtccttgcaatagacacccagtaccattgctggaytggctctggtggacsttccagggtcatctaattccacaggggtctatgccttttattgtctttacaattttacaactctgtaagttggaaaaatctaaaaacaatgcaaattatactggtgcatagatatacaaatgattttttttctagtagaaatgctatagttttccaytcttatgattccaaacattgtattttattgctctatagatattaaccagtttcaaatctattaccaacttcatatcagcatgcctgattgcctacatgtgtctcatcttcagcgtctcctttgaaataattgtaatatattactgattttttcaattgttaaataaaagctcaaatacatgttatttgatttttatatattactatacctttgccttttcaaaatcatactttaactgcctgtttctcatgaagaaaatacattcaagtattaaaaatacactgaatataattgttcctcatataygagccatatctgaataactggagaccagtcaggatgtttctatcctgcagcacagacwggacaaaggaattagagtgatatttgggttagtaaagtcagggagaatgatgacaccctctgaaggattaaggatttacttgaagaagagtgcgaaatatggttcagtagatagagtagggctagcatgtggtgaatctaataattcaggcacaaaaaaagtaactatctttctaagaagacatgtaagacaaaagtacagtattccacttaagaagatggggtatgttaacattgagtttcaggatctctgattaactaccctctgttaaacagcaggtctatgactcactgcatccagtgaagcagtaggctcttgagctggatttctacaaccccctcgactcytgcataatgtattttgaaattagagattttcttagatgggaagatacttytacgcaagcaactcaattcagtcctctgaagacacaccatttctggggaatgtcccaccaagtttactcctgactgacacaaggtagaaagttgaggttcaccacatccaggaagcttccattattcactcctagactcagtcttgtggcagacatcaccgctgatgttttctagatcktccctctcagtaytctatgaacaatatatagcaaaagaatggcacacttagagtaacaaggagtcattgcttcacaatataaagttcaaaatgtcagtggaatttaaagctgtaatagcttacagataatgraataccttttatttaattctgctgatattcccatgtaagtgttctatgccaggcctctagttatctcatgccctttaagattagattagactctcatagcccccaggtttttctcactttccttaaaagccttatcaaaattttatattattaacatattatttgtttaatatcttctctatctcctccactttactacctcccatgacttttaactccttgaacatgataactgtgctgtaagtctggatgaagggtcagcaaatttcagcccctgagccaaatccatcccaaccctttttgtatgccctgcaaactaagaatgtttttctcattttaaaactattgtttaaaaattaaatatcaaaataataatagttttaacacattaaaatgatataaaattcaaatatgagtgtccataaagttttattggcacacagtcatgctcattcatttccatcatctttggctggtttcatgctcatgcagagttgagtaattataatagaggctgaacagctcacaaagtcaagagtatctaccatctggccctttccagaaaagtttgcccatccctggcatacagcacagctgtacttccagcacctgaaatttaataagtgattattaccatctgttggactgttgagtgaatgaatatgaatgcacataactggagacaataaagtttcaaagatttcactgaaaactataaataaatgaaaattggaatccttaaaatgcattttgtggtttagggttggataatcagagtcagatttactaaaaatatcaatattctattgatctcattacattaatcaattagagtttgagtaaggtgggcggggggctgastgtgagccctatcctactaatagtgcctactgcacacatcatctttttgaatgatttaatactgcctagtgagatatttgatagcactcacagggcatgtattaaaatcataaaatgatcaacacaagtatacttgatatttcttccaacttgtaaaataaagaaaacttatattcattcactttaatgtttctcccaatttgtgacttacaagttttatgattaaaatggggaaaaaatcattgctactaatgacattctatgctgtctttcagaacacagtttcagaaaacagtttccagtgcctctggccttcctactgaaagcagacacagagtgcatgaagaccgttcaaatatgtcagggacctcctcccatgagtccttctatgactccctctcagacatgcaggaagaaagcaagaatactgacttcttcccgggcctttctgctttcctcagccaggaagagataaacaagagtcttgacctggcccggagagccatagccgactccgaaacagaagattttgactcggaaaargagatctcgcagattttcagtacttctcctgcaagcctctgtgaacatccttcccataaggagaccaaattgggtgaacacgcctcgaggagacctcaggataacaggtcaacacctgtccagcctctggcagagaaacaaactaagagtatctcttcacctgtttcaaagaggaaacctgccatgtcacccctgctcaccaggcccagctacatccggagcctccgaaaggctgaaaagcgtggtgcaaaaactcccagcacaaacgtaaagcccaaaacgccacatcaaagaaagggtggcccccagagccagctgtgtgacaaggcagctaatttaattgaggagctaacatccatatttaaagccgcaaagccaagaaacagaagcccaaatggggagtcctcgtcaccagacagtgggtacctgtctcctaaaaatcagccgtcagccctgctgagtgcctcagccagccagagccctayrgaagaycaaggggagatggaaagagaggtcaagtcccctggggccaggcattgctaccaggacaaccaggacttggcagtgccacacaaccgcaagtctcacccacagccccacagcgccctccacttcccagctgcacctcgattcatccaaaagctgaggagccaagaagtagcagaagggagccgagtttatctggagtgtagagtcactggaaaccccactcctcgagtcaggtatgaatttttgtattatgcatagcaaatgatcttgttgactttggtgttactttaatatgggaggaagaaagatttcctgtgtcattagccctctggagactgaggtagagtacttgcaaggagagaagcagcccagaatcgccactatgagttgtcctagttgtccctggcctgatatatctgtggtcatgcaccctctgtgctaaggaaggaaggcaaaggacttgagaaggcaaagagcagtggaaacagtttgttctctaagatggtggaactagtaacaaataggcacacttaagatgtgaaactkatttactcgaagtactgtgaaaagtgtgtgtatatttgaatatgagttgctaaagacrgttgaaagcatggctaaaactagctgctatctagaagtgaaaggcacgagtgtgtagaggccaaccttcagattagcccccaataacgcattaaagggaacaataaacaccgaggcctacttgaggggggagagtaggagaagcctgaggatcaaaaaactacctatcaggtactaatctcattacctgggtgacaaaataatctgtatgccaaagccctgcaacatgtaatttacccatgtaacaaacctgcacacgtatccccgaatgtaaaagttggaaagaaaaaaaaaaaagattctcatatacaagaaacaaaaaccaaacaaaaattatcccccaaatggataatctagtctcaggcatggactaaataggcacatattcagtaacataaacacacacacaccccttcaatgtgatgcaaagaaggaaggcagaactttcctaagaaagaaagataaatcaagtcaggagctccgcaggtctgcccgttattcctacacaggctctggccactagagcatggagacagcaagaaataacagtgaagggagtatgcacttagagttaataggcactcataccaccatgttcattagaatttctatacattcttctgacttcattgtagagtttataccttcccctgagcaaaaatgttaagrggaaagagatcctggagtccccctgcagggtttccagtcatgattccattgcccaagttactctacccctctgtgactcagtttcttcatctgtgaaatgggaagtataatgatacctacatcattctgttttatgattaaataatacatggggaaaattaaagcagtaccttgyagctagtaactgctgcagtagtgttacctattatctttattatttctcatttcttaattttatatggcaaaatgaaaataacaagtcaggattatactacacaaataatgaatattcatttatctgggaagttttgcttttattcatgcagaatgctttacctaaattacataaatatttaaaaagttaactcaagggccaggcacagtggctcatgcctgtaattccagcactttgggagattgaggtgggtagatcacctaaggccaggagttcgagacaagcctggccaacatggtgaaaccccctctctactaaaaayacaaaaaattagccaggcatggaggcgagtgcctgtaattccagctactcaagaggctgaggcacaagaatcacttgaacctgggaggcagaggttgcagtgagccaagatcatatcactgtactccactccagcctgggtgacagagcgagactctgtctcaaaaaaagaaaaaaaaaaagttaactsaaaattatttgatttggaaaaaaatggtaaagtagacatcactggctaaagattgaattgaaacactggtactttcttactaatagcatttcacagatcacaaacttccctgtatctctgatcctttgctcactaacacaagctttgctagtgttggtttcttaatctgacctcattgtgcacacacatgaagtaaaaattagcattactggctgaaaagtggtgtgattacaggtgggcgatttttttcccccgaccaatttgttcaactaattcactttgagtcagctttacagtaattttactataattctttaagaaactgacagcagggggcagtaaaaaactttttcatgtgttcatttaattaaatatgtcgttctaaattctgcatttatatgttatttatgtagattatttatacagatttatatacatgaagaatttgtttcttacattttacctttgacagaaatgaatgtttcagattytatttagattttttaacctatcaatcttgcaaataaataattttcattagacattcattctcatgtcactcaaaacagttccacaggttttcaaactacatatggttccacctacatttacttccaaaataacccttgaagtatactacaaccttwaaaaaatgacagaaagcagtccatttagcattgaaggattaattcaggtgaacagaccataattactgtattaaaattcacttaaccatttggtgattctaggggtcatcaaattcacacttctgcctctttgggggtagcagaactaaaatttaatttagttagtatctgcagtattattaactagttttctcttattctgcagtctatgaaagtccaaacttgacaaattatgcccttctagaataattaagtctcataaaatgttccattgttgaaagttagctggtcatgtttgtatcctatagagttttttgggtttggaggctgtttttgtttgagagggagagcatagatgctcattggattttttaaatttctgttccaaagatcttgatcctccttgtcatgtatttgtaagtgcaccagaygcctaagaacattgagctcttttgaccacatgagacatatgacagtcataagagaaaatctttgaaggaaattttctatcaggaagaaaacctttattaaagatttcctgcaatggggcattttagaacctgactcagactgtgtcagtccagaggacctaggacctggagcttaggcagacctattgattggcaggccatytcctgaggtcacagaagcagttgacagacgtgtggagaggcaaggagatgtcaggagaatctaaagcaagccataagcagaagcccaagagacactggttggtgagagcagagacgctcctcagtgttgggtagttggcagctgtactgggaggtaagtgaggtatggtgccaagaagcttggcggttggccaatggaaaggtccaggctgacttatagggaatgcgtcacaggaaaacatggcagcagacagtaggatcaagatacaggagctggaacacgggggagaaacctttaccttgcaagagtttaagcaagtgaaagttaggaccatagctccagaaagacaaaagaacagagcagaatcttagtgactcaactgggtccagattagggaaaccaattgctaggttaacatgcctgggctactaagcagctggctggagcttagattaaacaacagagattgtttgcttttgaaagctggcatgatgaaccttacaaatgtggataaagaagcccccactcagggaagaagtaacagaaacaacagggtaaaaccaggccagtcacttcaaggcaaggcatttgtacttcacatgcagtcacttcaccctctcacactgtgtgaacaccacttatgactacaaacaggactgaaaatatgttttcctcctttattattgcatatccaacaaaatctcaacaagagaaagaagagctgatagaagaaaaccctatgcataaaaaaggacgttatatacaattgaggtagtaktcacatgatatgcaaattatattaacaatttgaattactacattaaatgaaatcaagtcagaattcattttttctctgcttatgctcaaatgtcccatattctcatatactccttccaaacagcataaagacctgttccctsacatcactcaccttccctgttctctccactcttgactttgtgagttagtaaaaaatttgtgaagaattttagttcaaaattacctccggtattataaaaaggaggccttatatttttaaaggtatttatttatttttaaaggtattatttatttattttaaaggtatttatacctttaaaaatattttatcaactgtatgttttaaaccatttaaatgtaaggagactgggatcaaaaactgtgaaatgatgtgcctagtaayacaaaaatcattcattagtcatggagactggagtataactcagctcttatgattcttgatcccatgctgcagttgttaatgagaagacttagccactgtcactgtggagttagaagttatgcatagcttactgaaagcctccagaaatggagatagtggaattgccacctttaaaaatctacgcttggaattcatattccaaatatcttcaaagaaaatggtagcctggcaatttccagtatctttctctatggaaaaagaaaacaaatcccttcatgggtatcyttccctttttttgtattaagttaatcatggtcaatcaacagaaaatattttttaaggtgggtatagttagtgtagaaacattcagtgttgggtagttggcagctgtagtgggaggtgagtgaagtgtggtgccaaggagcttggcaattggccattggaaaagtccaggctgacgcacagggaatgcrccacaggaaaacatggcagcaggaagcaggatcaagacacagggactgggacatgggaagaaactatgttattctcaatcaaattactacaaataaagttattattcagaaaataactacaaataaaacaaagcattcctgttttatctacaagtagtccaaacacatctttatattattaatataaggtaaatgtgtacatatgtcaaaaaaaacttttaaacacccacttattgtagtaaaagtggaatccagtaatgtgctttaatagtctaaatacaattactcatatctaatcataagatacctactaggtcatcattgttagccctgtaaagttttatttactatatataattaaaagtaatacaattatttctttttataatcgaaayacagcatgtccaatgcctccaattagtttacatcagcaagactttgatcatcatcaaaagccaaaacaagaggattagccatatcaaatctatgcaactctgtcagtaaaaatttccatctcctcaaaaacgacaggaagaaaaacaagccatgaatttacttttcttactaagggtaagaaaatatggtatctcccatcttttggctgatttggtttcggaaaatgtagcaacagcrccactagccaatagtttatgaatattcagtgyttgtaaagtgaagatccagatggcttagcccaggagtatcgttgttgttaaagaatatagtcagcaatgagataccagataataccatcagatcatcaaaatgaaaaaatcctgacaatacacgtgttgtkactgcaacatgaaaygtaaataggtacaaccagtttggagaactgttttacgatacacaattaagatgtgcatacactaagcctttayagatacacaactgcctacttgacaccactatatcgatgtctgatactcttatcaaatttgtcgaaaactaaacttctgattctcctctcctccaaaaaccttctctttccaaatcttctccatgtcaacaaaagacaaccctccttccagctgttcaggaaaaaaaccttgaagycattctcgatccctctttttctcacaccccaartccarttcatccagcaaatccagctggcaccaccttkaatgtctccaratctgaccacttcaccccacctccataaatgaggctgcacgtcaagccaccatcatctgtctctttgttatttgcattaccttccaacccatctccttgctttcgttattgttcatcacagtctacacagcactcagagtaattctttttcatgaaatcaytatcacagcactgcccgaacrccgtccaggggcttctcacttagtccgagtaaaatccatagttcttatacatcctaatcaggcttcatctctctgatttcacctcttgccactcccccagtcacagtggggttcttggctgcacctccatcacaccaccaggcttgttcttgtctggggcctgtgtactttctgctccctctgtttgtaaatctctctccccagatatctgcaggattaaatccttgatcccctccatatctctatcacctttacaatatggcctcctataactactctatgtaaaagaaaggtcctgcmtaccttactctctattccactctcttgcttttctccatagatctcatgtgatacactgyacattttatytgtttgatttttgtagttgtctttcttccttcactagaatataaaatccttgggtgtaaggactttatctgttttactcacttttgtgtcctcagagcctagaacagtgtctggcatgtaacaggtgctcaataaatatgtgctcaagaaactggaaagaacctaaacattcatcaaagagaaaatggataaattgtgatatagtcacacaacaaatgaactagagctgcatgtatcaggatatatgaaactcataagcataaaatcaaccaaagaaaagcaagttgtaaaaacttacacataaattacatggacagatgtttgcatatgaagttacatttgcaaaatagtactatttcaggcttacggatgtagtagtacagagaaatgtgtgggaatgaggaacagtcaattccagacagcagtaacctttgagatgaagcacgtgatttgtgrggagtcaactgtgttggcagtattttatatcttaaggtgggtagtagagacacagatataaactacatcattttaatatttaatagtgaaaaatactgactttcatgttaatctactatcctcatgatgtatcaataagttcagcagcaatgtytctaatgaatactttgatttacyccataaaaaccatccagaaaatatcttggtgttaagcactgtgaatcggataggttggcttttagccatttgtccatataattttcagggttgttttagttatattttagagctttttaaaatgttttttttttgttttgaatttatggtgtttcagtagaatattatatgtattcagtcttgtgccatggatcttttatggtatagtctactttatttgctgcagtcaattaaaaaatctgtatatgagcttcttgtttttaaggaaaaagyctgcattaggcacaaacacacacacacactatggacctggttaggactagtgagagggaatttgaaaatgaacaagtgcttcctgtcactatctcaccaacccaattgcctctcctcccatctacatacctagacaataggarcaagcacactagggcagaatccataagaaagcaaaacctaattttatagttgcctattttcttattcttttatttcttaattcattttaaatctttttttttctgtgtatttgcaytgaattgaacaaacaaaagcctttatattttgcggaggacaataaatattccctagaacacccaattactgttgaactagaaagcaaaagaaattcrtaagagaatggcacctttcgccgggcacggtggctcatgcctgtaatcccagcattttgggaggccgaggcgggcggatcacgaggacagkagatggagaccatcctgactarcttggwgaaacccagtctctactgaaaatacaaaaaattagccgggcgtggtggcgggtgcctgtagtcccagctactcggaaggctgagacrggagaatggcttgaatccgggaggcggagcttacagtgagccaagatggcgccactgcactccagsctgggtgacagagcgaagattccgtcmccaaaaaaaaaaaaaaaaaaaagagagagagagagagagagagaatggcacctttattttcacttaagtgaaaagatagccttatctctgactcctaccacacaatttctgggagttaactcatgaaaggcatgcgacgcattgagaggttttatcctctttctatcttttccattctttcttaaccgctgttttcatccagtacctacccacttgtaattttcactctgaaaactagctatgcctctgcagtagcttacctgcaaggccatcattaatgagaatattgagtctatttctgcagaccttagygaaatggaataattcagwatccagcaagcccaggaaatattgcccctgttgcatggaattcttgtttaatgwcttgaatattacagagtggcagcagctgccttattacctcttctggtcaacccataacaccatgatgttatgaaaagcccattccagctgtataaatgcataaagctgtgaaaatgttgctctcactgataccttagtgaaccaagaagtaaggctgatattcaaggcaaaagtggaatatcactatacagttagaagtttgaattggttatgacagtcattggtatctagtcatgagtagcagtagctaaattagacagtagcatcagtttatatcttaatggacaagtttctggatttaacaagaaaacaataaacaccaaaataaatgtagctgaagaataaaggtagagattttttaatgtcttttgctttgaatttgtggtgtttcagtagaatattacatgtagtcagtcttgtgccatagatcttttatggtatcatctacccagtttacctgctgcagatggcaaaaaaaacaaaaacaaaaaaaaacaaaacacctgtatataagaagcttcttcagataatccctttagaattaaaagggattcgtgaaacaagcatcagaagcgcttagtggtggacagtagaggttctagaatcagaatgtgactcttggctccatcacgcatcagttaggtcactgtggcaagttatttcaactttctgtgcctcagtttctttgttggtaaaatggaaataatagaagtaccyacctctagggtaattatgaatgttaagtcaattaacacagagaaagagtttaaaactgttagcacattgtagtgtcttaataaatattaatgtattattttaaaagttacttattattttaaagtgtttacttttatagtttattgttattgacttagaataaactccccgcactctaccttttcaaaaacctttgactctgtttcctctctttaaaatcttcatactgccattttcttttatactactaagtattcacaatggtatagagcctatggagatggaacacttcaacagcataaaataaacaaatgatttatcagaaatacaatacatcttgaaagttgcttttgactatttgttgagtcctagatttgtatctcagagtcggaatcatcacaaaggctgccaggaagtagtgggatactttcccttggtctctgtataacatactattttttttatamatttttacctcacttggccttctgttccttcactgctgcagggtatgggatcaaagccaaagaaaagtgatttgtttctgtctctactcctccttcatacaactaattatctccccatcctctctttctaaatgtagaagctgtgaaggtcagcygtactgtggattactgtcaatttagaacaccttccaaaaataaaatctctttgactattgttttcttgctgctttaaaaattgtttagcaatttccctcagtttgctttgtgagcatgtgttaactatttgctagagttaattgaaagtggttccccaatactttagccactctttgtttttgtatttcaataatttcagcaggaagaaaaatctaaaataatttaagtaacaaatgcaggcttttcctcagctagataaattgaccttttattttgcattttcttactactaagtattataccatgctgcaaagctctcaaaaggaaaaggatgtgcttttcggaagtttaatttattagtatgcaaactagtatcaaatagttgttttgaaagaatttgaccctgaagtttcagataccttcacagtcaaaactactcaatgtctcaaatcttttctgcagagtctattttaagtacttttcaacatgtttcttcatttgccttggggccatacctcctcatggatcactgaatctgcttaagcataattacagcaattcaaggactccatttagacattgcattcttttgacgttttggagttactttataaatgtaactgtagcaaatacaattttaagtatgaaactttatatagcttactgtgctgaccaagatgcaaaatagttctaccagttggtgtttgaatgatatataacaatagaaatggttctttcctatttaattttaattgatttgagccaagaaatagcatcctattggatatctgctgaaataggactaaactgctggtctcctgaactstgatagagaaatccaatcaaaagcttttcctggccaaaaataatactaattgcaagtgaaaactagctttgttctctcggttatgagttccaatggtgaagtctagttccatataacagtgcatggtaaattaggccacagaaacaagcttccagtcactgtttatatgatccacatgttgtggtccaaaaaatgtaaataaaaataccctagggaataagaactttttcctaagatgacagcttttagccttggttgttgaaaatggtgagtatttctaatgaaattgaaaacaagtctagggaaatgaatttccaagtaatggaggagaatmyttgagaacgagaagaaagaggagaggagaggaggggaggggaggggagggtaaggaaggaggaagggaggaaggaggggggagggaggaaggagggaggcagacaaagaaaactctcatctgaagattaatggttcttttaaagtcagaaagatcttcaaaataattttcaccattatatagacattacagaccaattgctttgacagagaatattctaattgtgttagtgcaaagagaatgcaatagatatacagttgtggacatctagggagatgagamagaaaatgtttcagttttggactttgaaccactacaaagaccaagaattctccatatcaatatatgaatttgattatgttaatggaccagcatgggcccagcatgctttctagaaggatagtaatgagaaggtattgataaataagaggatttgttcaaggtcagggcttagctaagcctggtcactccagtccaggggccttgttatcccctaatgaggaggtcttgaaagttaacaccagaagcacggtaacattcaaccaccatcatatatgtctgtgcagtcactgtgtagaattacacatagtactaaattgtaggaagtttatgctaaaattgccattttcatgcttgtcaaccctatggtcatcattctaaagtcaccaattaaaatgattcctctttattttcttacagagctattaacactgaaccctcacgaaagttattgtcattctcctagtaatactaatagatataataatattaatagccaacatttcttgagtacttagtgtatgccactcttctaagggcactacctgtataaattcacttattccaataagctagatactgccagatttctgggattctaagacatctattttacaacactttaacatctttgtaatcagaactctttacagaaaaggacatacttaaacaacagctgtcagatgactcattttgtggttgtattgcttgtacacatacaaatttggtcagaattgtttggcagcttaattatttacttggccagtactatatgctgtttctttattagtggttcataaaacaatggtatctagtggtgatttcatgttagaktcagtgaactasaaatttgttttctccattttaaaaataacatactaagatatgaatagtttagcaaaacttcccaattgtccagttactggtagggatggaattcacactgagacaaactggctcctgggtctatacttttttgtttctaatttttatgggtacatagtaggcatatgtatatatggggcacatgagatttttttgatacaagtatgcagtgtgtaataatcacgtcatcatagaaaatgaagtatcyctcccctagagcattaacgaatctgtacattttaactgctatactctactgccatarcccttctcaagatctgtctcaatggagtttgggtgagtcctcctgaccatcagaaacaccacyacagatagtgagcagttctctaaaagcaaacctcatgaatcgcttccttccattgcccccagacaatgttaagaaaccttaaaaaagaaaagagccatgattgattctttagtggtcctcatgagaaaactgtgctgtatacattcccagcccactttgtggtgtcacatgaggaagagccagcrtctttactcttagcaacaaccttccttgttgcaacttgtgagggcctgagctacagtgcctcctctatcaaagccattttgctgggtttctctttcytttataaacagaacactgatcccaagcagaatataacagatatgacttgtaatccgttatagtaccatttaatccttatgtttagctgccagcattctaattaagaatgtgttggcatatgttggccagaatcctgcaacatggaattattccatgggccaagcctgaggacacacactgctgcctaaaatcgaggaagaaagggccccaaccacactttagttcaagtgacttctgatataccttttctacaaaaggccattgcaaaatacaattctgcaagatcattttttacgaaataaataattttaactttgaacagggagctaagagggaagcatgaagattgaagaaatcaaattaactttggaaygagagattgtcgtcatagcctaaaaagtcaatgagcacatcaaaaggagagagattcctctgcccacagtaaaattcatcagggggccacatggtatagtgtatctaggtgttaggtgtgcagacaaggaatggcrtgcctcagtttggggtcagtttcactgactgaacatttgtgctgccccattgtacacactcagctctacaaatatcttgaccaattcatttccaacctagatgctagatatttgggagaaatttttaattggaggggattggcacatatgttgtaagtgccccatttgttttactatttgttaatggaaaatgccaatggtatacctcaaattaaagataccatcacccttagtaatagtttaaacaagatattccacagaagaagaatgagaagaatcactctagtatgagagctattgtgtttggattgtattttcttttctaaatcctaataggccaatgcaggtaaaatgatgaatccattaacaaggtgtttctatcctattacaaatcaaagtaactttactaccactgtgtaacctataataattatataccgtataatatataatgtatactgtaacacttatgttgccaattttaaaattttatactgatctagtccctttcacctgcaaatcttaaaatcttaacatttgttcatccagtgcactatgtaaaatggctttagctctttggaattggaagttgtatcttctaacatggcctaggagcagcccctgccttccagcatagagttcagcttccaacacacgcctcaagaaccatgggtttttttggaacatgaggccagctcttagctacctgcaattcggaacgtactatttggtttcagcagtttcttgacccttcatggggtcatcttcaagttctgtattgttgcatatgtgttttttctctttgcctttggatagttttctggctttcagattttgatctttcagattttgacaaatcagaaaaagaccaaacccagccaaaacstgtctttcattacagtttgttctggttgaaatgttaaaccttctcacatccgtggtattgaagcaaattatgatccaaaaagaaagaggagttgggttcatcttctctctctcacatccacattgcaaatcagtcctttttcactccccatatttagtgctatctgttgtcctcttgcctcactttcttccaggaggtcttcgtatcctcaggtaggtctacagaaacacaatttagttttcctttcatcatgcaaacacaatgctacacctgcactaatcatctgtgctyaaagccaatggatgatagggggcaagtgttagaaattacccaaggctcttagcacctggagtgttttctcacagcctcacctgtatggataattttrtcagccaaatagagtaagtggatcttagttgatcagagcaggaaacaagcttgaagccaggggtaaaaaaaaaaattaagagaagcaaatgaagcctccagaaagggaatctgaaagagacaaggtgaaggattagaagcagatggcatgagaaacagttccaagaagcaatgagaaaaggcagagctggtgatagttcastgctagagaccattaaacatccatatcccaaatggttccagatcagacctcccagggaatgaaattaatatgcaacagtctcctcctttgccagctgcttgtggcatttgtctcagctctctgtgaaaaattgtgtgtactcacaataacaaacatatacrcgacagcaatccttccgaggtgacacgagtcattgttgaagagtcgtgctcccagcacgttgggaggctgaggatggcagatcacctgaggtcgggagttcaagaccagcctgaccaacacggagaaaccctgtctctactaaaaatacaaaattagccaggtgtggtggcacatgcctgtaatcccagctactcgggaggctgaggcaggagaatcgctttaacccgggaggcagagattgtggtgagctgagatcgcgccattgcactccagcctgggcaacaggagtgaaactccatctcaaaaaaaaaaaaaaaaaaaaaaagtcatgctcatggcattacttccttaaaacttygagtaggatacagaaggaaataaagacagtaacctctttggggttctgtacatcttcacaaagcttttcttcatagatcagaaaagaaacttaaatattccttgggtttaagctgccacagaattgtgttaagattattaaaatacaagcatttaaatatgaggatcataagtctgccttactacttttgctccattatcctctgactcatcatctttcatagaccctgacagatcctcctcttcccactcttctccaccccactgtcttgccctgagtggctgatctgtgtagactagaacagactccttcaggtttccggttgggctaagtcctggagggccctggcagatcagaaggaagaaagagaggaactcaaggtacttagtgtcccatcttcctcctatgggcttgccttggccctctaagtcaaatgaaggtctccatcaacacaatgcttccctgtgttcaggaaagtgcatccaccttctgttcctttagggttaagagtggtagcaattctgctttgtagtccccaggtgatcccttatccctgggtttcctcatactctgacgataccttcagatataatcttttcatgaaaccctccttgcrttgtttgagttttagtgtgccctctctttctagctaggaccacaactgctacatcctcctcctgattgcccaaacctaaaatgatgatgacccataattattatccagatacggtgacacaagcaattcctgaaatgctttcctctgaaattgctaaggattactcacaggcaagttacacagcttcaaaattacttttccagctctatattccctattatttctcgctgtttgcttttagacttaagtaaacttcaactccaattctataacttagtaaaagaatcacattgatgtgaaagtccaaaaagacatttgatgttgtaagtgraattttctcattcgttcactctctgtcaatgagaaattaaatgactaacactaaatggagtgctacatatgtctggcattttttacaaaggaatttatatactgtctctcatccagttatctcgcaagctctgtagggtaggttctgttattacgtgttttagatgtgagaaaactgagactcagagaggtaggcaaactatccaaagacataacgtgacagtaatgtgtctgggattattaacaccaaaagttggctttttggtggaatttgtaatgatgagtgattcatacatttgaagtggtgcttgacttatttaatggtacataacaaaccactccaaaacttaatggctcaaaacaatttattattttctctcacttactagtctatttgaagactagctaccacaggggaactcttaggcatttttttcacgtctgttatcctggaatgagtaaactctaatgagaacaaagaataccgaatatcatggagtttggatgaggagtgtgatacaacagggttacagtttgaattaggagtcacgccaaaaggaaggtagaaaggaatccagatcagtggaaaggaggaagcacctaacataagaactaggtgtgccattaagaattatgctttgggccgggcacggtggctcacacctgtaattccagcactttgggaggctggggctggtggatcacyggaggccaggagatggccaacctagtgaaacttcatctctactaaaaatacaaaaaatttcgttgggcatggkggcacatccctgtaatcccagctactctggagactaaggcaagagaattgcttgaaaccaggaggtggaggttgcagtgagctgagattgtgccactgcactccagcctgagcaacagagccaaactctgtctcgagaaaaaaaaaaaaaatgtgttttkctcttcaaaatctgactccctccctcagtcatgtaacctgcagcatagtattagcgcaagtgcagggagccaggcgaagggggagagtggtacacaattaagaagggcacagcctccccaggctcttactgaactgcattaccacatgacgatggaaagtcttcagctagttttccccccaaagaaatgaatctggtaaatcactatgtttaacttacatctgttttattaaaacctaagaacaatcgtttaatataaaaaagttttttgagacattttattaccgaaaacaaagatccaattacatggcttctgtagtgggagttctcagcagacagaagacaattacaaaatcaaataaagctgttataattttaaatcaaataattacagacaaaatgactaagtattgatatttttgtttttaaaawtaaaaccaggctaaataaatgaaaataaatacttaaagaagtaattgttgcagctaaagcaaagcatataccttcttcacctaaaatattagcttacatgtttattttcattttaatgaaacccagcccccgtacaatatgtgtaaacgtcaaactaattttatgtttctctattaggtttcccaccattctaaatggtgcacatttaacaatattttatatttcattattactatggccctcgggttctgtgttagaacaattacatactgtaaagaattagaagtttttgaggatttactctccagaatagtgactgaatgtactttgatagaaatggagtaacaatagctaactctaatttatcyactgcaattggtaataaaggaagatagttaagatctcaaatctggaagtctgatattttagccaacaatctcaaccttctcattaaacaaaatatttctttgcagataaggcctctgcccttattctctcatcttgctattgatgtccattacgtgcatttggactatgttatgcatgtgttggacatttatagaacactccttgagtgtaaagctctgttgggtattgaagggtacaaagactctatccatcccttcaataaacctagaactgcagagagagatagacacctgcaactgaagttcctgcctctcacaatattgatataattggctcctcccctcgccaattttatggtttgtgaaagttcaaagcatgtcttccatatcttttctcacctattggactcctgttgctgcacatgctgcttctgtgatgcattcagtgsactcagatgtaaaactgcactgtctctttgagttcacatttagcaattttttattcacacttatgagctgaataaacttcacagaagatggtctgaaaggagacagatgaggaacttacatcacaggcatgcccacaatctgtaagggagccaagaaggcargtcatctggaaagctaaatatcattttaagacattcatattctcctataaccatcaatgaccactactcacctctctctccaaactgccctttcttctcagctttctcttttatcctggattgcagaagctccagattcttttccctctaataaacagggaatgtccccctcctctgaagtcttggcaccatctgatacctagatattcccaacagagaatccagtctctggaagaagtgtttgtgcaaattacagagcatatttttaaaatattctcccttttgtcaaatayccttaattcaaggcatgaataaaaaggactrgaaaataataatgttatgatattgcttatagtagtaagatttcttgattatgtatgtgtgaatatatataattgtgggaccatgtggtgattttttcccctttttctactatttgtcagaatgyttggtaataagactgctttggagtaacaaagaattgcttaagtagactagctataaattttaagctgatgatgatcaatctgaaatggatggttagacccagaaccttatgattattttgcctgaacaaattacagagaygaaaggctgccttcaaatttttggacaggatatcccaggtaaagatggaattcatcctaaaccagaggagtgatgtaataccaattccattaccactcagtgtccggcactccagaccagaacaaagctgaaaaatcggcaggtgtgaatgactcacactggacactgagtgataccattcacgtatcttctgtccccatgacggaagaaaattggcctaagaaactcaggaagtgaagcttatatggtgaaccaaaaaagttaggccatgcatgcttaaggaatactcagtgaaaaatcatgaatgctgatagaaaaatcctccctcacattgatgctactacagtgaagatataatgtaggtaaaaacactgtcttcataaggtattggccaccaggtcaacaaaaacagctgccctacagagggcatgttaaacagagaaccactctatccctgaagtaaatcctttcctgctttggcaattgaggggctggagttttacaggggaaggggaatcttccaaaagccctccttttttttctttttttaaagatttttacttctctcattttatttcttttttaacttttaagttcatgggtacaagggcagatttgttgcacaggtaaacttgtgtcttggggctttgttgtacagattatttcagcacccaggtattaagcctagtacccattagttatttttcctgatcctctgcttcctcccatccttcaccctctggcaggccccagtatctgttgttccctgctatgtgtccatgtgtttttatcatttagcttccacttataagtgagaaggtgcggtatttggttttctgctcctgtgcaagtttgctaacagcctccagctccatgcacatccctgcaagggatatgatctcgttctccaaaagccctactcttattctctacagggaaatmagatcttcactacttcagaggaaacatagcacattacttataccagtcatcctaagtcttcattcataaacataatctaactatcagaatagccaggtattataggaaaacaagaacttggcctctctatctctaccaaaatgaatgaataggaccaatccaagaagaagctgagttatctcaagaaaaaactttaggagagaagatttttaaatcccaattaacaaaatacaccatcaataaaaataatattatattgctttgggaaaaagtaggatataataaaattagaatagaattaygtaagtaaaaatttcagaggattgtctgaaaaatcagaggataaagctaactatcttgtagaagaaaaaatgacatttcttaaaatgtagatcacacaggaaaagacatcataaataggggaaaaggatagagacttgagggagattcatggaggccaaggtgcattcagtagaattccataagaagaaatcacagataatgaaagaaagggaaaccattgaaagaaayattagaagaaaattagcttttgctgaagaaatacaggaaccttctgaytgattgaaagacacatcaatcaagcattgggcaggatagatgtttaaaaaataataaagctcttgatgcaatctcaagatgaagagacaattctaaaagcttctaaagaattaaaataggttacccaaaatgaagaatcagactaacacctgatatttcaccagaagcactaaaaccctcgaggacaataatggaaagcatatttgtgtgtatatgttttagaaagacatctggaaaaatatacatcaaacctttgggagttgagggagaagactggctttttactttctaccttgctgttgttttaatttttaagatcatcttttattacttttataactaaattmttttaaaaatatctttcccttctaattaattctatccatggacagaattaattagtaggcaaagagactagacgctgttacctaattagaatgttattataacagtcactgacgagaaactgagaggggaagaacctacagtaatagaaattaggggcctgaatcaaggaatgttttgaagatatttttcatgatttggtgagttattgaaattaakaataaaggagaaagaaacaataaaggtgattcctacaagtctgaatgactagatgactagataattatgccattcagatgagaaagaccaaaggaggaatagatttctgttggatgttacggagaagtccatacgatgtttacgttacggacttgagtctgaggtataggaagagcattcatataaagggtctggcctgtggtctgaaatgggggctggagcttgggagagatgttgactggagagatagctgggccatggggtgagcagacaagaaagaaaaggactcatgacagatccatgtggagagcctgcaccaggggaaactgagggaagagaagccagtgctgcgggagaaggagtgttcatacggaaaggaggatctagagagatcaatgtcacagctaaaggaggacattttctccaaaaaggagaaggatttgccacattgacgaagacaagaaggaagagttgaaatgcaagtttttgataactgacaatgtcatttcttcttcaggaatttcaggttaataaatattagaatggccaaataatcttgtataatatattatggttcatcaggttgttctcatacaggcatctcttcattaccaaggggcttttaacatcttaagcaaggcaaaggtagaagaccccttacaaggttgcactttatctagatttctggagaaaacatggagtcaaggagtccaccccttagggatgagtttccagaattccaagctgaggtcaattcctgaaccaggaataccaagttcaaggaaaagatgggctgaagtcaggacacagaggtgagaccaaagccaccaggagcaagaccagagccagagaccagacagggaagacaaaaacaccatcagcgaacgtgttcatctgagagtcagtcagaggacatatcagcagtggcactatgaaactaataccttcttgcctttcaatcatttgtctgtcttattagggaaatgaattgttatctgataatatttcccacagaagaaagtgttaatcatttatattctcaagatctatgacctataaaatatgcatatggagaagattgatacttttctaatatgcattatgatgaaaaagaactattcatttcaaatggtataataggggaagtggttccttcatcatttttggctttttgtatcttccactgaacacattttctcttctgaacttctccagtacatattgtaatagcacatgtctgcttctaatcatttattaccttcatactgacatcttttcaaccacatacattgtatctttgtcatgacagccacaggggcaccaattctgtcttattttcctttgaatcctctatagctactagaacagtttacataataggttatctcatactaattggctgtcttttatckcattacccaaagataatgactactgaggattattcctaatacaayctaatacaacctccatatctgcatctgtggattcaaccaatctcagattgaaaatatttgaaaaaaaatggtgtctgtactgaacatttacagaccttttttcttgtcattattccttaataatacagtataacaactatttacatagcagtcatcatattaggtattatgagtaatctagaagtgatttaaggtatactggaggatgtgcataggttttatgcaaatactacatcattttatatyaggaacttgagcatctctgaattttggtatccaagggaggtcctggaaccactcccccayagatactgaggaatgactatattatttccttatgtaggtttttatattttttaaagtattttaaggtacataagatctcttgattttcacaagaattaagtggcttaaatgggagagagggtggattaccacttaatagatgagtaaactgaggttcaaataattcaatgattttccaaaagattcagtattcaaactacagtctatacttyttaattcttaactgggttaccttctactaccagaagtgctgttgattttctgtaattgagattcagataaccgaacccacatatcctaggccagtggttcttatatggtggtggctggggctaggggaagacttcaggggtgtatgcgtataccactttccaagaagagattggaaatgtgcagagttatcacatggtgggtatcacaatggatgraaagtgattgtggcatttagtaggatggggtgtttaacaccttgcaatactgaagccaccacggtgagaattgttccatttgaacacccattgcmtccctcttaagaaactcagcaagtttaggcaaataaagggaactatagccacctctacaaatatctgaccaagagtcctcctttatgctgtctataaggggtaagtgagcaaaagcaggaatttagcacacaatccaggctcgtattctttgtacataaaaatacaactattacatcatcgcattaataatcacataagcaacgtggtgtgtaatttacaagaasacttaaagaactctcagtaccttggtgccrgttagagacttcactgaatacattttaacttatactcctttatttgttttgataaaaaagagagtcaaacagaattgtctggaatcttttcttaaggttaacagctttytgttcccctttgttcaagtgttcattttaataatctaattattccagatctatgactcctgctactcaggactctcccaaaagacccctgacttctgatgttccacttctgcctgtcctttaacccaaatagattcctgttgcccttccagcaaaacaaaacgaaaggaaatgacatgctacagaaggctttcttctcagtttgcaacaaaccctgtaacaaggttttccctctgtttaggataaaggtctctgggcacctaaggcattaagccacagagcattgccctcctgcattattaccatcctgggattaccttttgaaacattctagcatttgtatttgaccgtgttcacactgctataaagaactgcctgagattaggtaatttataaaggaaagaggtttaactgactcacagttcatggctggagaggtctcagraaacttacaattatggcggaaggcaaagggaaagcaagacaccttccacacaaygcagcacaaggcaggaagaaatgtcaagcaaagcgaggaagagccccttataaaaccatcagatctcgygagaactcactcactatcacgagaccagcatgggggaaacgacctccatgattcaattacctccacctggtctctcccttgacacttggggattatgggattacaattcaaggtgagatttaggtggagacacaaagcctaactacatcagcattgaaaaggttctctcttttttttttttttgagacggagtctcactctgtctcccaggctggagtgcagtggcgcgatctcggctcactgcaagctccacctccggggttcaagctattctcctgcctcagcctcccgagtagctgggactataggcgcctgccaccacgcccggctaatttttttgtatttttagtagagacagtttcatcgtgttagccaggatggtctgatctcctgaccttrtgatccgctgcctcggcctcccaaaatgctgggattacaggcrtgagccaccgcgcccagcggaaaagattttctagagtttagtgctttcarattatctttamtacagatacatttctaaaaggatatgcctttccaatttcattaagttgcttagggtgagaacacaggactgaggaaataattgggcacaaaaaacagctcttacctgtaaccctttcaagtgcaaactgtgatgacaaatgctttactcactcaataactaataacatacttttggttacacaaacatactgctaaaaaattgtattttcaatgattgaagcaattattctacataattttcacttagcagttctaagaatgtattgatttgttttctgctcatctggtatactggagcaaattgtttagctgtgatgctttacaaagtgccatgtatcactttgtatctccaattaaatttcaattaagaaatcttataattatcttatatcaaccagccaagagcagaaattcctcatattgaatcatacttacactactaatgagactgtcaaggtttggctttatgtttacctcagataggcgtccaaaaactgtgatgattgtccaaactctccgaacatcttgagtctgcaaaatttcgctggcagtcttgtgggaagaagtttcttttctgcatgagccatagtgtctgcttcaagtcctggctcaaagtcagactacaaaggcagacaaaaatgagagggaaatttttatctaagtagttcaaagcttcaaaatggatgaaaggttcaggaaaagggaaagtttattttctttaaaaccagttcaacatatttkgtgcctatggccacattcatgtttaacctgttacagcagtaataaattgaattctatccsccttcaggtgagaataaccagtaaggaaactttctgtgacatattttatattcttggatcttttccctgttttaacacacaagagtggcaataccaaaacaagctgtgtttttatttgaattgtgcttatacataggcatcataagtatatactgaagtatttgcttaagcaagtagggtattaagtaggattttaaaaataagtagaagcaaaacgggaatgataattgaaaatgtatagaattataaaatgtgcctcatgatttgaagtatagatccagkgaattattctgagtaagtaaacaatccacttccttttttctatctggaatctaataaaatgttttaaagsctttgcccttaaaatgaaaaggtaagtatacaaagaaaattgaaagatttaaccgaatgagaaattgcttaatataattcctacagtcatgacattccaagttcagaacaatttgttttaaatttaaataaaataaaataaaataaaattttattttaaataaattttaaataaaataataaaattcagtccattttagccatagaccttgtttttcaaatgaccttatgattcagttattatacctgcgctcattctgtgacagktcattccagaagagacacaatygtacaaagctgaacataaaataaatcttggtttcttattgaattttaaattacattgggaatgcttttggaataattccagaccttaggagaaaaaacgtctcccaactctaaagtcccaggttccatctcaacgtttcacattcaccggcaaagsctccaaaaataaattacaggcaagcttaaaagatcagaaaggctttcccattgtgcaagtgggtgattacccgcgattggtgtctgttacagtcattgtgtctttctctaggattctctctctgtttccgaaacacatatgttccaagttttggatgctacgacttcgtgttcatgtggttcagaatttagccctcccccagcccctaaaaaggctgatcttatgggcgtgaaaaacaggcatttcacagatttagataaatgtatagtgtgtcataaaactagctcatagaattataatttgaaattgttaagaacattgtgagtacctactacctgagggatgaatttcaatggcacaccttattttgtttcatccttactacagctgtgctatcccattttacaaataaggaaaactgaggcttagagaaattaagtaacttttccataatttgtcagctaggaaatgatacaagttgagttcagatctaagttttcagaccccacgtcaaggggtttcagctttaaaaattacgagtcctgcccgggcgcggtggctcacgcctgtaatcccagcactttgggacgccgaggcaggggaataacaaggtcaagagttcgagaccagcctggctaacatggagaaaccccatttctactaaaaatacaaaaattagccacccgtggtggcgcacccctgtaatcccagctactcaggaggctgaggcaggagaatcgcttgaacccgggaggcggaggttgcagtgagccgagatggcgccactgactgtctcaaaaaataaaaataaatmaataaataaataaataaataaagatgctttggaaaacctaaaggttgtgcaaaggcctctcacaatttcttttcatagttaatttatgaaaatgcaacacacagtctcatcaaagctcaaaattatctttttcatccccgttggtaccctgttgattcttccaaactaaaacacagctgcatataattcagatttattatactttattttatttttttaaataatttcaacttttagattcagggggtacacgtgcaggtttgttacatgggtatattgcgtggtgctgaggcttggggtacgattgatctggtcacccaggtattgagcatagtacccaagagttagtttctcacccccttcccttctccctccctcccccttctagtaatccccaatgtctactgttgccatctttatgtccatgtcatacttttttatgatgtaaaccaactatagtgtagtccaagaccttaaaggcacctgaagctgaaaaagaatgttaattatggcaccgtattatgaccaagtcatcccagtctgtgctgcgacatgagccctaacgattttctcattagcagatgctctagctggtttccatgaaggctttccacagtgacttccatagtcgtcakaggcgactactatcagattccatctcaacgtttcacattcacaggcagaggctccaaaaataaattacaggcaagcttaaaagatcagaaaggctttcccagcatgcgagtgggtgattcatttgatttgtgcctgttacagtcattgtgtctttctctaggcttctttctgtttccgaaacacaaaactacagaaaccacctcaccctctttctgtccttagggttcaygctaattatgtttttactctgaaacgggttttaggattgaagggccatgtcgaatggtgataattctatttcagttagacaagagcctggaaaaaaaattattttaaatgagtttcagtttgcgcatttttttaaaaaaagagcaaaaagtatgcatgtatgtttgtttttacattcttctttatttttatcttcttactttgctttttaatgagtcattagcattggaaaatgaaaacaatttttctctagccaagaaatattgcaggtattacacattctcctacatcaaagcaaaggcactccaagccccctttttaatgaaaagagtttttagcaggtgggaagaaaaraaaaaaaaagcacttgctcctgagatgataaaaagccatttttcactgcaaaattattaaattagctgtaaggagttggagtttgtatttggcattccttctcacctcaccccagccttcatctctcattgcatttttgtggaagggttatagatatactctaaattgttgacctatcatggagacggtagttagtctccaaattccctgtgggcaaagatgattgcagcctccctgctaataagtacacttcagttctatgaaatttatacttaaaagaaaacaatggaaaatgtggcacaaacacattgtcatatttacgcagatatgttgactcactgttacttaagcgtcaatgaattattcagggctcaagatggggataaatattcagggaggtaactgcactcattctttatcygtttgtgttattcgggtttttacttggtttctttatttttgcttttttctcatatgagaagtgttcagatgacagcacatccaacaacaaaattcagcccccatcctataaaaacgtcctctcttagactgtcttgttagttgtgacatattttattgtaaactaaaactaactgggaattgggttgtatttattttacactctcactcattttatttatttatttatttatttatttatctgttgagacagtcttactctgtcgcccaggctggagtgcagtggcaygaggcccaggttcaagcgattctcctgcctcagcctcctgagtagctgggattacaggcgctcgccaccacacctggctaatttttttgtatttttagtagagacagggtttcaccatgttggccaggctagtcgcaaactcctgacctccagtgatccgcccaccttagcctcccaaagtgctggaattacaagcatgagtcaccatgcccagcctctcttactcattttataatagatccagtctttaaagaaatataagccatttgattgcccaattatatgttgcaaaaaaataaaaatgttgaaaagtgtcccttccagtcaacagatatttattgagcacctactcagtgaagacactgttcaggatgcccagaatacaggagtgaacaaaagagacaaaaatgcctgccttttgaagctgacatttgagttgcagaggtgaggggaaagtggtggtggatctaccctaacatttgcgttatcactatgtgctcaaattcgtatgtgtatgtttcccaaactggtctcatcatcacaaacacacacatacacacacctttaaggttatactgctgttatccacrttttgcaagtgagaaaactgaggcacagcaaggataagtaatgtgtcagtcacccaggtagtgaatgacatgtccaagactctagcctgagcagtttgtctctgggatctgtggttttatggtaactaaaaccgccactcatggctagacatggtgggttgtgcctgtggtcccagctactcgggaggctgagatgggagggtgacttgaccctaggagttcgaggctgcagtgagctatgatcataccactgcactctagcctgggcaacagagagaaaaaagaaaattttttaaaataaattwaaaaaaaaactgctgcaccctattaacaattattgtggcaggtttttagtggcaaagaattctgaagtactttgttgagtgctcccacctaggaaactagtcttttacctaacttggcactttatatcaaccacaaccacaatccagcagtttccataaacagaaaaattataccatgactacttatgtaaagctatatgtaaggctccctatatatttatgtaaagctctctctctctatatatatatatatggtttacatgtttctcccagctaacctttccatatatatatatatatatatggagagaaagagagagagagagcttaggcagataccaaccttgggtgggaatctttcacatccttaaaaaggtttgggcctatctgatggccttgttgcgtcattgccctctacgtggctggacccagagcaagggccatttccagacagtctccaccagcccactggattcacctggctcctcagacctctgcctcttccatttccgtatgacctaatyacctgctgtcttttgatatattaagattttgtgccactctcctactgagatggaccttaaatcctcatgagctgatactgtctcgtctactttatgagaaagtatagcacagtaattaagagcacagcctctgagcatgtcagctaggaccacttcctagctccatcatttgcaagctgtgtgacactgagaacgtcacttgccttgtctgaccctcatcttcttcatttgtaaaatggagacgatactactgttgagaggaatatatgagttaacagatagaaagtaattaggataacacatgacacctagttgatagtatataaattatatttatcttttttttttttttggcatcttccctctccacataatctcgtctcaactgcagggactacagttaagtttaactgggcttactaggcaagatgtgstactaaatgggcatctagtttaatgtataaaacacaatctctgtaagttttcctctattctgcctccgccacagttgtaagagagagacatttctacctccataatggtgtagatgattgaatgcaaatggcaggagggcaaaaaaaaaaattaaatgaagtaratgaaaatgagctaaatgtttgaaaatgagctacatatttaattatattaaatactgtatattataccctgtcccaagagtctgagtcatcatttgaagggtaccttcccacaaccagccaagctgggaaaagataccccaccttatagacactattggctccctccagcctttcgaaaagtcttaacaaatactaaatctgcagactgcatttcattgctaaagtcttacaaaattttagttctcagcagagacattagtatctttggggaaaaaaaacccaaaggaagagatccttctagttttgctcactcattaaaaatgtgttgaataatgaatgaatttggtgtatttgtgtatacatgaagatgtactcacgtatatgcatatatagagaatatttgccaataattgttttatatatattctttctccatttttactgcctgaatactgaaaacaaatttcttgacttaattctacaaggcaaatatcacataatctgctatgccaaatgtcattgataaatcatgtatttatctgtgtgaatgtgttccaacttttaaaattagaaactacatgttctgtttatactttctctcactgatatatactgattattagatgatttgaaatttagttctaagtgcacatttctgcatatcctgcagtgttagcaagataagaacttgacttatttgtccatttcaacaaatattttcagtacctattatatgcctggcataggccctgtggatatcaaaataagtaaatgctgtcttgccttgagtagtataatattgcagcatagctcatggtcctggtaattcttgaggttaatgtgtgtgttaattacctatttataggtgtatccattaatggaaaacttcccaggatctactaggcatttaaagatgggagagtgagcttgttattataaataaattaagccaaccatttacttagaattttttatcctaatttaaaatacagataagattatatgacttttaaaaatcatcttgaattactaaaatacttaagtgaattgcaaaatcaaaaaggataatttcgttttacacttatttctattatcagcatttgtagaaaattttacacttcttatttcctagtttattcagaaaattccaaggctgttcactaaaaaagttaactgattttgcaagtaatctcatgagctagcccaccctaacagaaagggaccatttttacaccaggacaatgtttctcccagctaamcttgtttctggagggttgtccaagtcatccccagggaaacaacgtaaaagctacttcagattttgtgggtctcttgggacacaaacaccatacacgtgcctatatatgaccgtcactcacttgggtagaggctagcattgtcaggacagatgcaggtctgatttctcagatccagcaacttcaatccttggaatattagattaactctctcagcctgtgagaggaaatcaaagtggtggcagaaataatccmggagctcagactgaaatcatttcctcatgagctttttattttcatcctctctggtttccaaaactcaaattccttacttagtatctctctaaagcctgagtccttagtgtaaatgactatttcctttactctcttttaatagaactcaagattggccgggtgtggtggctcacacctgtaatcccagcactttgggagggygaggcaggcggattacctgaggtcaggagttcaagaccagcctggccaacatggtgaaacctcgtctctactaaaagtataaaaaaattagcygggcgaggtggcaggtgcctgtaatcccagctacttgggaggctgaggcaggagaatcacttgaacccaggaggcggaggttgcagtgagccgagattgcaccactgcactccagcctgggcaacaagagagaaactctgtctcaaaaaaaaaaaagaactcagtttctttttctctattgcttcctacagctaatctatagcaaattacataccttgtttgattttttacctattcactcttttaatctgagccttctgtctatcctccttttcccacatctgtcctagatccattccagttgtgtgactattgcactgctctttcctatttcaaacacaatatcattaggaataccagtatttatttacaatgacaaaacaactgagttttgtaattacataatgtcagtttatcaatatataatatccacttcctacagtcagaaagaggaacagttctatcatgtacaattatgatgggaaaggtggaatgatcccttatgcagcaattttaagtgagttcatgattttaaattacttaaaataagtgctaggaagctcccattttcaaaccctttattttcctggcttaacagaggaataaaatgctatttaaatgcacaattccattctaaaagaatggattctgttaggaaagaaatttaggggtagctctttcatttaaccaagcagcttgatagcttctgtatatgcacaggttggcctggagctgagtttgagagtaaggaacagagaaagacgaattactgtgtgtattcatctgagaaacatatggagttcctgcaggaaatatgagaggaagagaataaagaacaataatgagagtgagagcagtcagcaagatcagagtgctcagaacatatcggaagccagtaaaaaattccaacgccccccaccccccacccaccaaaagaaagtttaagaacagagatgcctgcttttcaaattaaaatgtttatcattccagctccttaagctttccttgcctcccccaaattaccagtaaaatctcttagcacagaaaatctttgtgtgagtgaaattctgtgaaaatcagaacaagaagctgagctattggggtccacaaagcaaagaacaggtatagcccaggcaagatgctgggatttgaacttgaagatggatcttagagccaggagttaccatgagaatttaagcccctgaaaattcatagacatcctgcaggtctttaaactttccataggtgccgaaatgaaaaaagttggtccagtataacccagtttttgaggatacccgctgatacgtgtactataatcaaacatcggtttgtcactgtcccacttaaaatgtgagggctaaaactaagcgcaaattccaaatgatttatttccagcacagagaagaagttgggacctctcttatttcctgaacctgattatacttctatggatactataaagcagcctaggtttacattatgtatttcaatccatcacatgctgatctcatagccacagatttttttattcacatgaacaactgtcttctctccctgttccccaaagctgtatttcataatttttttaaagtaatctgaacttaacaccttatatttttccctattaaattttaccttttgggtttttgtggccagcattccaacctgttcatacattttagagttctgattctgttaccccttgtctcagctgcagatttgatccatctgcctttacctgacaaggggttataaggagccgtggacaaagagaaagaatacaaatctcaagccctggaccgtcgccccacacgcctactaactgggtgtgtggcaagcacccggccagtgatttaacctttcagaaactaagtttccctgtttgtaaagtagaaaagccaatttctggcaaacttgcctcwggttattaggaaaaccaagtggggagtgtgtgggagtgtgtgtgttgtgtgtgtgtgtggccagcataacaccgccaataacaccacaatgaacgtggagccctctggggtaactgtgaagatctccttccaggccaggcatggtggctcatgtctgtaatcctagcactttgggaggccaaggcaggcagattgcctgagctcaggagttttgagaccaccctggccaacctggtgaaacattatctctaataaaatacaaaaaaaaaaaaaaaaaaaaagccaggtgtggtggcaggtgcctgtagwctgagctactcaggaggttgaggcgcaagaattgcttaaacctgggaggcgtggccaggcacagtggctcatgcctgcaatcccaggactttgggaggccgaggcgggcagatcacgaggtcgagatagagaccatcctggccaacatggtgaaaccccatctctattaaaaatacaaaaattagctgggcgtggtggcgtgcgcctgtagtcccagctacccaggaggctgaggcaggaaaattactggaacccgggaggcggagcttgcagtgagccgtgatcgtgccactgcactccagcctgggcgacagagcaagactccgtctcaaaaaaaaaaaaaaaaaaaaacctgggaggcggaggtggcagtgagccgagaatgtgccactgcattccagcctgggcaacaaagagcaaacaaacaaacmaacaaacaaacaaaaaagtctccttcaggctcagcacaattaattatccagcatgtgcttcttgaacaccaactacacgtcagacccaaagtgttcaacataaaaaaattaatgagacaaaaggatcttatctaaagccattaataagaaattctaaaagattgaaggggagagttcagtcaccaatgaggtaatatttactgttaaattttattgctctgacttaaaaatggaagaggctcttccttactttttttcagatgaaaaaaggaaaagagatcatttccttctaactcaggaaaaaaaaaaaacagggaaacwctaatactctcagcagatcatattactcctaaattatctttacacttctttgttttctggtgtacacaaagaaaagaagcaatgatttgagatgattttgaagacaaagttcttcccaatgactagttaaatctaaagagattccccaaggctgaatctcagaagaggctaataaaatactgatatgagagatgagagagtctggcgaaatggtctggtgtggggcctgggcattatcagggaaatctaatgcaagtcctaggtgagaaccattgtaggagagacaaagtaaggagagttgaagttcaaagctctggggaagagcatcctatgatataataaaggataataaggatatacaagtcttatttttaaaactatcttacatgtttcctttgaaaggttgctttaaaattattaccgtaaatgattttattcttgaaattaackatttaaatacaaatttgaggagcgtggtaaataatatgaaagttgcagactgggtacagtggctcatacttgtaatcacaatattttgggaggccaaggcaggaggtttgcttgggcccaggaggttgttgtagtgagattatagtgagccatgactgtgccactgcaatccagcctgggtgacagagcaagaccctatctctaaaaaagaaagaaagaaaaaaaaattaaaaaagaaagttgctattaaatcttgaggaaaatataattatctcagaaaaacaccatctgatgatttaagccaccatctgacaatttaaatcacttactctctataaatatttaaatttccatgtggtctgctttttgagtgatgaattttctttttttacaaagatatcattgaaataattaaaattgtcaattgattgcaatgtcacacttctcaaaaaaaaaaaaattagtattgcagcgtctaaaccaaaagcataagggcagtgaatgcaaaacagatgttcatctcggtgggtgttcaaaacaattttttaaagtcagatgtctctgtatatgtgtttgtacagcctcaagacacggtcttaacagtttatatatttaaatgctcactcatttgatataatgtcaagtaaacaagatagcattaaaatcaactactcaattaatttattttttccatcctttatttctacggatttttcaaacatctagtactgaaggatcttgacatttttaacccagtacattccctccctcttattaatacttcacccaattatcttttttaaagtatcctatttagagggaagctagagcctataatttattttaatattctggtgagagatgagaaacaaagatatccatcaaagggctatttaattttagaaaagttaaccagccattagacattcatgggcaatagttcaaggaacaagaaccacaaaaaaaaaaatgagagttagaattgaagaaacaaatctttaaccctcagaaaaccaagaggttttttaataccttattttctatagtagcatttagcaaaaggcaatgaaattctatccccaaaatgaagaagtttatgatggttctgacaataattcatttatgtagaattatattatttacactttcatccatgttgtctcatttattcctcccaacatctttgagtaatcattttacaaatagaaaataaatctgagtaatttctccattagccatagtgaatacaacacattaggaaattaatgccaggttcatctctctcaatgctcagtgccatttcccctgtatcagcaaatacttaggataactgtgggcctgggattgtggagggattggaactaaagcacacttaataaaaaggagagaagagttcctcagggctaatcctaagttaaaagggatgactttactttgtctgagtcagtgcaaaactacattttttttttatcaaaacagaaaackaaaacaaagaaaaatggtaagtgcttcaatcataccatccaaagcagagaattaccatattcaagtcatggagctcccccaggcctacaagtatttgagttattctagttctctgttcctctgggataaaatagaataaaaccctgcaagactcacagggaaagccaaatgtggaaccgaagcaaaaggggcatttttggcaaaatgacaaaacacagtaagcctctataactaatctggacttcaagctagagatatttatgagcttctaaagagccactgggagagtctccccgtgcccagtgcccacctaaacttctgtagttacattcctcactcactatgggggcgcccyctttgggaactttgctaatcaagctgggcactcaagatcaaatttttgctatacaagcaaattagtctcacttatagggggtcagtatttcgttttgtctctttagagacatatgttatgaatccctcaattactaatttagttttgcttttcagtttgatactctgcccccaatccatgttctttcattgaactgtaatgttttactacttgtcattatttttgraaaaacagtttctaactctcttgttactagtgctaatttgcataatttgaattaatggagaatttgccaacacttacgtagcttctacaaagtttgcagttgcttcaagaattttcacattttataaatccagtgacaaagtttagagttatctatgcactgtagtgtatacccttgttacattataatttttatacccctgaaagacttattacaaatcacagaaagccaaaatcattgtattcttgcctgaattgggtagtctgtttttttcaatttctcttaatttgatgaataaaaaataaatctatttttatgtgcatttttgaatatgaattatattttcaaatgtttttattttctctttcgtgaattgtttgctcaggtcttttgcctattatttcagcaatctgaggaaactctagggcaaaataaggaagctgctagccacattttataacttgcttaagaactggcaatgacagtttatcaggattttatacataaggattccaggagtatacttcataaccacaaacttgggagtcacaattcttttattgtgtaaatggtagaattcctgagtgcttggtgcattagttattaaaggaaataaaacaaaatttcaaaatatagtaaccatgaggactaatttgttacctactctttgtaaaggagatatcaatgtggataaaaacaaacctgggggtacatatattaagactttcaaaggcccttgacaatagtttagaataaaaatgatgtttcatttttttttaacattttataacttgtttttttaaattaaaaaaaaaacaaaacaggcaatgtgaatcatgtatttagagcagcttgtccatggctagtgaactggcttggaggtagcaaaccaaggacaactctccactaaatgaagtaaaattaaacactcgtgttggcttatgatcagtgctggaaacatctgactctgatattatagtgtgatttggaagagaaaattcacgatgacatttccaattttcagatgacaccaagtttttccaagtcatgacataccaagtcaaattgggaaggaagatagaggaagctcccgtgagtctttggttttgaggtactactccacaagggtaaacctttgagatgtatacattaaatacattaggtaaaatctttgagatttaccctataaggtaaatctctagtgtcattggcccaatttaaagatgtgaaaactgagtctcagagatgttagtttaagtyacccaagttgactcagccagtaagtgaggagtttgtatttgacatcaatctaaataagagcctatcctttactgcccccaatgtgagagaggaaggaatcacactcatgaagggacccaaagccaacgtggggtgaggggagggcaggaacctgggaagttggattcatttggttttttgagttggtgagaaacaagcaggtatatttaaatgtggggaagtatgaagtgatatttttaaggaagtccagtgctgcaggaaaatgaatccctggaatccatgagctttcttataccacttactggcaacacaggctctaaacactaacctgccagcaacatcaacccagttcattagctaacttttcctgtttggaaacacaatggcaaatattatcctacccagtacaaagccataaccccctatacaggaagaaagctgtggaaatctgaagtgaaattttaaaattgttatatattcctatgtatttaatatgtgggttttttggggggttttcttgtttgtttttgttttgttttgttttgtttttgagacagagtctcactctgtcggccaggctggagtgcagtggcatgatctcagctcactgcaacctctgcctcccgggctcatgcgattgtcctgcctcagcctcctgagtagctgagactacaggcgcgtgccaccatgaccggctaattttttaatttttaatagagacagggtttcaccatattggacaggctgatctcgaactcctgacctcaggtaatctgcttgccttggcctcccaaactgctgggagtacaggcgggtgccaccacgcccagacaatatgtgttaagcattgtgctaatacttcatatgctgggcaacatccaacaacctataaccctacaaacctataacccaacaaccctatragataaatctctagtgtcattggcccattttaaagatgtgaaaactgagtctcagagatattaggtaagtcacccaagcttacttagccagtaagtgaggagtttggatttgaaacccatctaattgaaaacctattctttactgtccccatatgtaagagaaggaaccacagccatgaagggactcaaaacgactgtgaggagggcaagtctggggaaaaaaagccttataatgttgtaatggctctggtaaaagtctgcaaaaggtagagatgggtraagttaaagcaaacagagtctaagtccaagataaggtaattcatttataagagtcattaatgcaagtgctacarttgaaaattttttaacgtaaaatgtttaaactagtaagtgacatatttgcaatcagtggattcagaaaaattaagttactggagagaatattcctgtgcttgggttggcactaaagaaagataactctgtctgcctacaaaggaacctgtggtattgctgtcagaaaaagaaggctggggtgaattagactgaacgtttgtgtataatgattcttaatctgtacttcaaaaatgtatcattagacatgcagatatgtttacccatttttgttgttgttgttgttgttgttggccttgctttgtttttttggactgtttttccttatgtctaacttagattctgataagcaccaagctgcttccctacctgagtgccttggaatatgcatttttcctcttacyggaatgttctttctcctctccctcctactaccattcaatggagagggcttctgggtagggtaggggcatcatgttatttttatttgctgaatcagggaattctacattctggaaggaaacttctgatatttgtgacaacggcgattttaaaaactgttcatttaccacatctttccctgagtccaaggtccgtggcagcagagaccatgtctgtccrgcccccactgaggccagcgcagtgcctggcacacagggaactatcactaagycctggttcaatgcmggacatccctcggcttgtacatgaagcccggtagctctgttttatgagggtaggaaacatctggtcaccattggtttatgaaatatttrccacctgaaaaaccattattattaggkcattccttgttccttgctttatttttctgagtttttttctctccattaagaacatatttcctggaactccttattggcaaggaaagctaactcactttttactttctccaatacccttattgagtttctctcttactcttcagaccgccaatgattagtggggaaatctaccaatgctggagcaaagacactatcccatctttaacggggagaaatttgtagaaccataaaactacagcaaaagtgttgaacacctctatgtcagccaatccgtggtcaccacagatgttcatagtctcacagcaatgcatgttacctgtatttttagaattgtttaaaacaaaagcgactrttattatttaacaagttgtaatgctgacatggtaaacattaaaatatttgaggctaagtacgctcttaatttttttaaaagatttttgttatggagcaatttgaaagtctttaatgctccatatataaagaaacctttttatattttgctttatatatctttcgtttaataatcttgatttcagaatctaccagaatttaattctagagccctccaaaataaataatcagctttcaggttatctcaacaacttcactgatattttaaagaaaaacctatcatatttatactatttacttttatactatcatgtttatactatttatatttatactattcatatttataccaagatacaaattaaaaacactggaacaaaatacattaaaatggaaacaatgtttgccttcgtagggcataattttgagtgattttttgtttctatttttgtatttttatttgtatacgatgagatttatatgcaaggagaaaaaacaaacaaaatattcaattttattggagtccagtcttctaatgaagtatgaaagaaagaaacatgtagatctactattattaaagatttatacgaatattaaggatgttccctggggtgttttccccagtgaattgaacttgtgaataagtcctaagtgccagcaatgaaagcgaagcaggtatctgtyaaggctgattaggaacggagcatagagaatagaaccacagaaaccaaagaagactaaaactggttctaagggttgaggcctgagaaaaatccataccaggttccagcctttccctaactaaaaaggaggaagatggctgaatctgcctggtggggagaggggtaatttgctgcaggtggaaccaytttattcagacctgagcaccgcagcgagccctctgtggaccsgctttgctgagaaaacttgctgctccctgggttctatccagagcagcmtggcgattgtgttctaattttccttttagatagctgaatatgagtattagaatgaaagatctgatattagcagatcaatcatctctttctccactttctgttacacaattaaaccagcaggtgaggcagagtgccgcaaaagtaagtagaccagctgttccatttcagaatagacttgccaagcataacacatttagaaacaaaatgcagttcattccaaagcagttgatttaatccctcattatccatttatgtattcagcatcatggcccatcttgacaccttattaataaattattcaraagcttacctctggatagcatagttgttaagacctagggatccagtcaaaaagagggatcgattscaggctcagatgcaaattaactctataacctaagacaccctatttaaccttcttaaatcttcatttcctcatttgtaaaatgtgtatagaaccaccccgaagttccgggatcatggattagagagagaaaaggtttaagacctcttagcacagyttctaacacatagtatagtcagtgttcgtaaatggagttcatattaataccctttttttttttgagacagagtctcactctgtcgcccaggctggagtgcagtggcgcaatctcggctcactgcaggctccgccccccgggttcacgccattctcctgcctcggccyccagagtagctgggactacaggtgcccaccaccacgcccggctaattttttgtatttttagtagaaacggggcttcaccgtgttagccaggatgctctcgatctcctgacctcgtgatccgcccgcctctgcctcccaaagtgctgggattacaggtgtaagccacggcgcccggccatattaataccttttaaaatagggaccagaagttgaagaagaagaagtgaagaaaaaggtaaagtgttttccctcttccattcacatatatttttcattttttaaaaatgggctttccggaagtgaaactcctgtaccagcgaagcaggatgctttcaatgtgtgcaaatcaacctcttggtagcctgccttttaaaagctcaaactatccatccccacacaagtctgggactcttaccctgtgttattttttaagtcatttaagtcatgcttgagaggaacatcattgttactatcagtcttaacatcttaattcaaaccagcctaacaaaaaagactgagaaaatatgaaagtacagaaatttgtgctagagaaaaagatgggaggaaaagtgtcacaccttggggctgccccgatgtctctttgcctcttaggtgcagggtactccatactctcgtgactaaggcatgaagcctrgaagtggctacttctgcctgtggtttatagccctactttattctagacagctccctgcacagattagaaggcaggaagcagagcaagtgttcctgtaatcagcctcccccgggaactgtcagtattcaatgggctctcaactcacatttccacttgtttttgttttgttttgttttgagacagagtctcgctctgttgcccaggctggagtgcagtgacgggatcttggctcactgcaacctccacctccyggcttcaagcaattctccttcctcagcctcccgagtagctgggattacaggtgtgtgccacctcatctcagtaatttttgtatttttagtagagatggggtttcaccatgttggccagtctggtctcaaactcgtgacctcaggtgatctgcccatctcagcctcccaaagtgctgggattacaggcgtgagccaccrctcccggcctccacttgttcgttcaatatacgtttgccctatagagttccaygcatctgagaatattccaacaaatcttagaccatttccaagcaacggatccctattgtactatttcttctatttctctctgtaagcattaactttgaaactacagccattaaatcatattcattagttcattccaggcataatcaatatgttggactaggacaactcaagaagtaaacaaatcataatcaattcctcttgtcccctacccctttaaacttattccattggactgcagtaatcttcctgtgtcccaatgtggaaacacatagacactatccactgttacgtaaggtgccctacatgtgcattaaatctcaagcacggtctccttcagtagtaagaaggcctaatcccatgtaattctcaaacctctgagcttgttgtggtatgagattttctcccctaccccagttaggacctacttcaggcttgagtcagctgtgagcagggggattccctcctgctgttaatctctccctgctcacccctgtctgtgcacttcctaccagcagggatgtgggaaagggagggaaggtggggagataggacaatccttacttggctgggtagctttgctctctctggtcctggtgatggctaaaaccagctctttttctcattgagtgctttgtaggctctacagagcctatgcagagcccttcgtctcctcattaccaatggccatttgggactccttcctcagctcctgcaaatcagttcctcatcttcagcctttttctgatgaggtcacctctcmcccctacgggctactgtgttgtaccaacagcagctccatccttcatgtcccatgtttactcatcccccagctctggcccccaaactgcaagtgaaaaccagtgctggcagatcagcgcttccctggctcctccacacaaaggcactcagatctcctttcctgtgaaactttccaggacaggttagaccccagtccatggtacactttacctttctcaggcaggagtcaggcgccagccctctgggtatcccacatgcaaggaaggcatttcaaagcggtagaggtggcccttcctccatcaccaggcttatggtttggagataacacccctccctcagctctttcacaaacagaaacgtgcctggcagcagctctctccaagtgagtctcttcaccagcccttcttccctctccgaactctgaccactttttatatccttgatgcgctgaagggcccaagagtcttggaactggtttttaattcctttctttgaaaatccaaatatatggatctgtctcagatacacgtgggtacccattatccaccaccatgcttgtgcttccattgaagcagagaccagaggakccccattctaacatcctgttacataagtgaaaatggaatttctttggaatgccatttattgtcatggtgccaggagttcatcataatcaacattacaaaggaaataccaaaggaagcaataatgatttgccatttattgtaaaacatgacctaggtgtgtcttttttctctgtttataaaatgacaaggttcaaattataatgtaactttccacatagcaattgaaatcacagactgagaggttattacaggactaggttggaatgaatagattatccatatgatttgatttaccctaatatagtttcttttagttccaacatgaaatctcccccttttaactcaccctgaattacaaatgacttaacagaagcagaaatattttctctggaaaaacatagtaaagtgtaaatggaactctggatttttagccataacaagatttttacactgtatttcccccgatgtatctgccttaagattcttcagtcacttcatgttgactgtttagcctctgaaaactctaattagtttaacaagttagccagccaacgccacagcaagactatacacaaatagagaagatcaggtcagttttgctgaaaagaaggatcattaaaggtacagagcatgagatattgacccaacccttctgataaatgatacagaaactatttgctcatgaacgagtaaactatgcccccaccttgacactgaattttaatcactagaaatggaattatatcaaaattcaaacatagctgaaaaattttaagataacatgtttaaatatgcacatttcaagtaaaagaacattattatagtgataatatcagagccatttgcagagaacttttgagtcttatcaagaaagcaatacataggctgggtgtggtggctcacacctataatctcagcactttgagaggccgaggtgggtggattgcttgagcccaggaggtcgagacaggcctgggcaacatggcgaaaccccatctctacaaaaaatacaaaaattagccagatatggtagtgtgcctagctactacaggcacctgcctgtagtaccggctacccagggaagttgagcttgcagtgagctgtgatcacaccactgcactctagcctgggcaacagagtgaaaccgggtctcaaaaagaaagaaagagagagagaaaaaaaaagagaaagagagagagagagagcatgcaagcaagcagtatataaaccagtgaattttacctggcgcttttaaaaataatatttgagttcatatgaaattcaamtagcatcttacaaatttcaatgtatatttcctagaagtaattcaaggtaccctcaatatatgctgtcaggtagagtataaaggggtgtaatgatcaatgcagcaacttcatgacagacatgagctgaaatgggttgtagaatgttctttctgaagacccataattagatttctagcttgttgttcaataaaatagttcaggtaccctaagtgaagtacatgacctctcaaacaagaaaactgtctcattctgcaaggccagttgcttgcttttcacagtgacacccatcaccttactgaatcctttaagaatgaagttcttcttgtccagtaacactgcagctggaaacaaggcagacgctggaaagcactagaactgtgcacaatgttgacagtgtaatctgaaactactcagcagttcctagtatcaggttcacacataatttgaaccagacagatttcttttgaaactttctcttaaaagtttcatttaaattggaagacgaagagtatgagtatcaagaaattactcttagtaatccaaatgaattaaatgatcctaaaatgatttaagtgattcatagcactttcccaagcagtctctgtccccatagtaccggtttctgtatcaagctgtcaggagatcagagaagaagctcattaacccagtcagacatgtattcaaccaacatttgagttcctagtaagtgccaggtactgtcataagcaccaaacctattagttttgtggaaggcaggtctaaccctgtctttaggaagctttaacccttatatccatattcacagaaagctgacctaccagttgaatgcccactctggatatgggcaaatattttattctatttttaaagtgcatacatacacacaagtactctagcataactaagctgttggttatgatttatttgctttgaaaagcagagttgcctgcaataatagaggaagcactgtcagtggaaaagtaggaaaacacatctgcagtcaagagggaggcatttcagtgcctgttattatgccctggagccaagatgatgacagtgagacatgagcagccctatatcaacccagttctgttgggttctgtgctctgaggcctccctggatgcagtcaaggataagtcagtgaagcccaaatcaccaccaagaccccttcctttcccaaagttgctatagacagatacactacctaataagggctaataagcagayraccaattttctttttttttctctctctctttttgaaacagggcctcactctatcgcccaggctagagtgcagtgccacaatcacagctcactgtagcctccacgttctagggttaaacgatcctcttacctcagcctcccaagtagctgggactacaggctactacagagaatggaccattgtgctcagctaatttttaaatttttttttggaaataggggtcttgctatattgacttggctgatcgtgaactcctggcctaaagtgatccacctgccttggcctcccaaagctctgggactacaggtctgcacctctgtgcccagccccagatgaccaactttcaaaaatccttttcaagttagaaaaaatatattcaaaacatattcatacgcttttttcttaacttatttttcttaatcttcattcatgcatataactcacagattattcaaacttctcttattatttttctaaccctttaaagaggatttccaaagcttagctttacttgaagtagagtggttcccatccattgatattcrggggaagtagttcatctgaaatgaggccagtattgagacttcaacatatataaacttaattatttcaggaggaatgtccgtgggaaaaaaaagagctaccgtgacttttccctccactaatcaacagatatttccatatgataataatatttaaattayatgtatttgctcagcactttacactttacaaggcacttttacagacattgcctaaatatttattctcataacagctggattattatctacaggtgatgaacttaaaactcagagaagtggaaagattggctcaaaggtcacaaggataaaaaaaaaaaaaggaatgcagacaccgtacttctaattctaagcctcttttcactctatcaaattaccttccagtatgtgccatgagtcataggaagaacatcatttctacagtcaccgaatatctgttctgtgccttttatatttctggcactgtactaggtgatttacatatattatttctaaacctaccagtgtttaaagtagcaaacaaaggcacagaggaggtaagtacagcctgagattcattcattcatccatcattaaagaagttcaggagtaagtctgtgttctaagcactggagatatcgctatgaacaagacagattaggtttctgccttcaagtttatgtgctggcaagaggaaaawgatagcaaatacataaacaaataagtaagtaatgtaattttaaatggtgttaagttcttgaaaaagataaagatgcaggctggaaagtaaccaggactacaggattactttaggtggtgtggtcaggggagatctccctgagaaagaaatagttcagctgagaggaaagtgttgctggaaaagaaaaccagtagagaaaggcactgaaatgggaatgagacaggcatgtttgaagagagggaaggaggccagtgtggctgaacatggagggtccaggaggtgaccctgaaaagaatggagccgtgtggggactctaggccgtggaaaggaggttggccctcattctaattgcaatgggaagccattagatgattctaagagagaagagtgatctaagttttgttttcagaagatgcctgcagctccatcgtttgtgtagagaatggactatatagaagggtatgtgaaaggcaagagatgagtgaatccaaacggaaaatagaagtggagatggtgaaaagaagttggatttgcggtatatttttagagagagagctggaagaacttcctggaagattgtttgtggggagtggcrgacagaagaataaataatgatttggggcctgagcaagtgagtggatagtggatctgttagctgaaatgggaacaactggtgggtgggcagrtttcacaggcaggtggttgagaagacagttggtgtcaagcttctgttttagacatgttaagttggagatacctattaggcatctgactagtgatctcagagcagttgtacgtaagaatctggagctcgggggaaagggatcagaagtggcttacataaggcagttaaaggcatgtcttttctgctaggaaatgagacttaggcagagccttgaggttctctatcatttaaagacacatagaccataaccagaaacatcatgctgtcagtcagatatctttctattacatcactccatctccatgattaaagtcaaatctcagtaaaactgagcacatcaagaaaccccaaaaatattacatataaaactatttgccaattttcctcttcagccttttcttttgttagtaattttaatttgtcttttaaatgaatgtagattttcaagtgtgacattttagcaaggtcaaactgttcattatcagttaaagtcatatgaaaaagtggtaatgttccctatttatatatataatgcattataaaaaacttttgcttgatgtgatgtgagttacaagctaagattttccaagaacaggtagttctccattatataaatctctttctcaaggcattgattgtctgtctgtgttctactaatgaccaagaattgtgaagcaactctagttctgtggaagaaaaacatttttaataaaaacttattcatatgaatttatggggtacaagtgtaattttgtgacatgcatagattttgtagtgtttaagtcagagcttttagggtatccatcactcagataatacacctcgtacccattaagtagtctgccttcatcacccttctcccagccttcacccttcccagtctccattgtctgtccacatggaagaaaatctctctgggcttcattaggatgagragatgagagttttattctgagcctagctgtcctttactatgacattatcatagttcatagtatccaaatgtgactcacagggaattcactcaacagttactgagatacctgaattaacatttctaggtctyttgttcaaatgttaataaagccagtgcttcttagaggcgaggtgaggttagataaggtcacgtagactccaacataaccagtgtctcaagtgaggtgacctattctccttcaacctaccatgacgttagcatttcatctcttcacaattttttctataaacatataactgcatattacatttatttctttgtctacttagcaaggatctgttcagtgtctatgacataacactgttaggcacagatagaaatacaaatgaaatgcattgctcttcaaggtcttactagaaaagatgaaataatctaaaattgtggatagactaaacaagatgttttctatatatggtcgaggagggattatataatgcctattaaaattcttgactgagactaatgacagaaatccatggaggatttaaacatttgggggctaaacctatggtaataaaataacagcctatataaattacatgtactattatatatgcacaaaatgaatttctctgggatctcaaggacattaatgtaattattcatttcaagtttatatatttatgtttttagagaaaatcactatagattaagtcataggtctctacattgatcaaaagcagatccaccctcatatttgctcccataaggggaccacatactttcttaaatttaacattatattacccttaagaaaacttggctgggtgcagtggctcatgcccgtaatcccagcactttgggaggccaaggcaggcaggttgcttgagcctaggagaccagcctgagcaacatggtgaaaccccatctctaccaaaaaaaaaaaaaaaaaaaattcgctgggcatggtggcacatgcctgtagtcccagctactcaggaggctgaggcagcagatggattgaacccaggaggtcaaggcagcagtgatcctgggaggaaaatgagaccctatctcaaacaatagaaggaaaagaagctttagtctttcacttttttttttctgaccaatgccaccaacaaaagcaactattcctgttcaaacttacattcattaaacaaatattcattgaatgtttattataggctagatgtttcagtagcctctggggatacaaggggatatttagagaccattccatgctctcggcacaagtaattacacatgtgatgagtgcagcacagagctgggggagatgcaacacctctgcaggaggcttagagataagtcaggaaggaaggtgttccagaccaagaaaaycaaacctggaggtaagaaagaacacggtgcattcattcagctaaaacctatccagcttgacttaagccagaggagctccagagagaggcacatgaggagactggggaggtcaggtggccaggtctaatgtcatctggaggtcaagggaaagccaggaggtcctccagcaggaaaacacaggtgcagatttacactccgagaagaccactcctagaagctcaattctgcttcatggtattactagtttattagtgaataatatactttacattgtcaccatcaccccacttcatgaaaaagaagagctcataaaaaagaatctgtattgaattgaaaggtaaagctgtcataattgaaaagctgattccttgtcatatttttttaatgctccatgaaattttatagccttgagaaaattttgacttctaaatctagccaaataatgctagtggctgttgcagaattagtgtgttttgtgttatataatggtgtggatttttttttcttccttaaaatactcttagaacttttgacctgtcctgtgactgaattctggatactattggttataatagtgcaaaacaggtcagagataacataggataaataatatagtctcttagcacttagccaatctctttggccatcatcccacagaaaatattcttcaggagtgctaaggtatcagttattagaaagtaatctatttttagaaacaccaaactcagcttaccttcttttctagatttagaccttgttttaaagaatacaattctttcagtttttcacagggagacatttatctatactaatcaattccactaatttatttatttatttttaattttgagacagagtctcacagtatcacccaggctggaatgcaatggtcgatcacagctcactacaaccttgatctcccagggtcaatcaatcctcctacctcagcctcctaagtagctggagctacaggcatgagccaccaagcccrgctaattttttatatttttgtcgagacggggtctccctatgctgcccaggctggtctcaaactcctagtcctatgagttcctcctaccccagcctctgaaaatgctgggattacagggataagccaccatgctcagctatctccacatatttatgtcatggaaattgtactgattcttgagtccatgaagagtccatgaagatacaaacatgttctgttcaataaacatattgttgttagcatgcttctttctacagtggcgtgaggattaccatctcattattttcctatactcttagttttaaccagctattaaaataaagtgctaagcagaagaaatctgcatattaatataaacattgggctcatttatttgtgtgtttttcatgaacacatgatgaggtgtttctggatagtgtggattggtcaggcccaacagagatcagcaaatgcagtgaagccagagatacaccagattgttctttcaaaacttcctcaggaaacatgttgtcttaattgaggaggcaacacagaaaaacaactggaaccacattctgcagcactttttctagctatgagcatttattaccttacttgaacagtgagttgtctctgtagctccattttgtaagtagccaaattttagtagcatcatgtggttctcacatgtttgagttaaaaaattatttttataaaaacaaaaatagacaaataagatttagtttaactaaaaagcttctgcacagcaaaagaagcagtcaacagagtaaacagacaacctacagaatgggagaaaatattagcagactaggcatctgacaaacgactaataattggaatctacaagaaactcaaacaactcaataagaaataaacaactctatgaagaagtagacaaaggaatcaacagacatttttcaacagaagacacacaaatggccaaaaaacatatgaaaaaatgctcaacattactaatcatcagagaaatataaattaaaaccacaaagcaaatggaaagcaaaattgtggaatcaacctaagtgtccaatgtccatcaatggttgattggataaagaaaatgtggtktgtgtgtgtgtgtgtgtgtgtgtgtatgtagatatatatattatacattatatataatatatataatatacacacatgtacaccatggaatactactcagccataaaaaagaatgaaactggaggccattatcctaagtgaaatgactcagaaacacaaagtcaaatgctacatgttctcacttataagtgggagctaaacaatctgtacacatggacatagtgaatggaataatatacaatggagactccaaaaggtgggaggatgggaggggggatgaaaaattacctatcgggtacaatgtaygctatttgggtgatgggtatactaaaagccaagactgtaccactacataatatgtccatataataaaactacatttgtatcccctaaatctataaagttttttaaaaaagaagtgattttaaaaaatcaaacttttccattggattatctattgagattcttttcaattatctacaaatatttttcattttagtttttaaaaatactctaaataaaagytgaaatttcttactattctaggccagagtttaaagcaacatgggcccttttggttttatgaatatattagtttattagtttttatttctattagtaaccaataaatatatarcaaaaaaatcattaggctttatcgacctagtgataaagagaaaattagaggtacatagataatttccatcataattgatcatttttagaaattctatagcagaacactgaaaagcatcctacttgttaagcaatttattccatttttctcatggtattgggtacactaaaaattggtcattaaaggcatattgaatattcttgttttcatgtacctctgttcattatatgaagttcaattcaggatttgaagtctttccttcacacaatcccacaaaaatgcatatggtgagtataaattgaaaaaaatagggtatttctctaaatgcaaaaagaaaaacatctgtctttaaatttttttaaaccctgcctaaattgacatgtgctttacattagtcctgtattattcaaactttcatacttatgtgtgcattatgtatgctcacacacactttagtgatggggtttgtgtatgtataaggtacctgcaaatccaaactacttcatttgaaatttgggaaatttttcctaaaataacttccacaaatatatgtgtgtatgtaggtatatatgtatattttatatgtaaatatttatatatgcatattatatataatatatgtattctacaaatgtattatatatctataaaatagtaccatggawtgctttaaatatattgtaattggttttcagagttggggtgtgtgagttgttctatattttaaggatagtgtcctttttaggaaaacatttaagtgtgatcttttagatagatgtgccttcctgaagaaggaaagactaatttaaaaaaaagaaagaaaggaaagaaattatctcctggtctggtttactttttgcaacagctgttaaaattcggacagtgacagagaaatatctgtagcagctctacagatgtttacaaaagaaaaatatctcctttacctgccttggtgagcatcttatcagcaagcacattaactcaaacaatagctactcttatctgcagaggacaggttcaggctcattagtgaagtgaactggcagccactcccctctacatagcaactggagcaaatattgttccagcccgccaagtgaccaatgagaactgagatagtgccgtggaatcttttcaatacgagtagtgttagtgtgaacaacctctctttgactctcattcgccttctcatttaatcctaccatttcaagagaatgatctcatctacagactgtaaatacttggggacttttatgaagggaaaatattacaaagggctgaagtttgcttcaagaacaacttaggtaggcacttcagtttaattactagcaacttgcatatgttgtggtatttcaaaagggctgtagtgttagtacactcattatggaaatttctaaatgtcagtgtatgaatcagtaacggtgatgatttttattattctaaaaagatctctaagataactaaaattaagcaggctgcacgttctctaatcatgtaatgaatgaatcaggattcttgtctsagatgcaggccaaatgtgctctggaactggttagtgcggcatatggtgaatctacatcagacttgacccccgcaggtttgtaactgaaactttgtataaattgaccacacccttcattaactcttctgctgcctagaaaataataaaaattgtgaagtgggactgatggcttttgaaaaatacaatcaggggcttgtgtctctttgcaattctagaagaaacgtcacrggattttaattcctgccaagcaatattgaccacgtttcctgtctcttcccttcttgtgctttttgccttgctttatgatgctggcaagtatggaagcctttatctaccgtgtaaatgtatatcgttgyaattcaacagggaaccgggcttcaaattacagcctccgaatgcaataaccttggttatttaccgagtacaaagtaaacaacttactttactgtcaaaagttttactgcaatatgttgcggggcttactactagaacaaccattcaataattgtctgtctayttaacgggcggattttatttcaaaccaaatagatactgtctttgtaaatgctgaaatgtttggtttttgtttttagcccagaagaaaattcccataaatacaaacccattytggccacctaagaattttgtcctagaagtggcatgctttctttcccttacgggttttaaaacttggccacatggtatttttaagttggcaaagtaataccttttagacacgccttcaggattttgcytaattgagtacagcaggttaacaaaagtgccaatgttcctttaaaacaaaaaccaaaatgctctgtggacttaaagctaatgctaaatattagattaaattgccaattgcacttttccatgtttatcttctgagataggaataaaattaaaatgtgttaccatagaagcatctgtaacattttatgagacaaaagatccttttttccacacaaagatccaagccaaaagcattatccattaaggaaagcaataaggctagagggacatttttttatagtcatattatggaaatactaaagatccaatgtcctgaagtcaaattgggaaacacagctgttcacattcatttttgtcctggattgacactcttggttaattcctgaatattgatcagttcttatcctccaacatccctaaaactggaaaagttttctcctatccacatttattctcaaatcacattttagggaataacaaagaggtgaatataaatctatgccttgtgaagcatttatttaggctctatgcctgacttggttttgtaatcttgatttttattctctggagcttatttctttggctctcttctttgaaaataatggcagggttctcatctaaagaaaaaacatagagagcttttaaaaccttgcagtccatgaattttctttgcatttcatcctaaccaccgttgccttctttaccattcagttctcctttctcccagaagctttccagagtttcttccctctkttccttctgcttcatttattctgcaccacatgctctaaaacttaccagttcattcatctatttactctatgtgtgattctgtgaactgtaagtagaagattctagctggatccattttaaaactaagataacttttttcccctaaacgtaagcactatgtccaagttatcaatcaaatttatctgctttgatagttgactcattacayacctgaaactggaaaagttttcttccattcacaattcttaggttagcttaatatttacgtaacttatcaaccrttcaattagaagtttttaagtatatctaaggaaaaaattttaattgcaatccctgacttcatttaaattccagttgactcccaaaatgtgttacttttcacagatcgagaatttgtaaaactatagaagtcaagccactcagttctctgtattctccttgtctgttgacaatttttagcattctttagaaatctggttttatcggcagaatgcaagattcttgaaggtaaatttcatgctatgaacatcagccttccacaactgcttattgagtagactactaarccaaagaatcttaaagctttctctgtagattttaaacctgaagagaagttaatgttctgaataattctattgcctcgagactactgtagatgactgagttacagcatttttgtttataagaattatcagtgccaggcctgactgagttacagcattttttatcagtgccaggccgggcatggtggttcacacctgtaatcccagcactttgggaggccgaggcrgatgaatctattgtagtatggtggctggtcaataggcttggcccttrtaatacctgaagcactagaagcttaaagcctgagaagaaaggccttgcttagtaagaaatcgacttcctgtccctcctgatacagtactcagtgcagtggacacagctttttcttcttggcagtgaaacctccctctgcacttgtcaccttaagcactgcctcatcaccaccattatagccgtcagtttgtggtatcatttttcagcactcagtgtggtccaggtactctataaatataccacatccatgatctgatttaatcttcacaataatcccatgatatagatatatttgccagatacggaaactaaggctcaaacagaacagttatccaaaatggttatgtaggaaaactggggtacaaactcaggtcattctccctccaagggccaagattctaactgctttttcacagcggtagaaaaatattaaggggaacctccaccttttgatttgctctgggttagtaaaccctttcactaggtgtggacgtttaataggcctctcaaactcaacgtgtccaaaccgaacacttgatttgatatcccccttcccaatctgttcctcatatagtctcagaaaatggcaccaccatctagccacttgcttaaagccaaagcctgagagtcatactctgttccttcacagcttacttcrtcagcaggtcccattggcaaaacctccaaatctgaacacgcttcttgccacccacactgctcagccctggtccaagccatccttccacggacatcagcagctacctcctaaatagtataccttcttttgtgctccatataatggtcagagtgttctttttaaattgtaaatctgatccagacatcagcctgccaacaacccaccagcacaggtggttgtcagcaggctgatgtctggagcagattttttttttattaatttagaacaaaatcttctgttcttaatataatctacaagtaaggcccagccagcatgttctagagtctgtccacctctccaccctcatctaccatcttctccccaactcacgcctacagctgtgttctgagtaagctttctttccatttctcaagatttccaagcacaggaagtctcagggcctgtgyatttccagttccttctgcctggagtgctctttttcctagatcttctcatgatgacaggtctcagctcaaaagtcaccatctcaggaagccctgctctgaacactcccgccaaaggatccctcccytaccccatttctttctaccccattgcctttttttttgttaattgtgtagcatttaccactctctgcagtcatttgtttatttacctgcttatgtgttgaactatctctctcctttcactaggtctttagttccttatcagctgagtttgtctgtctttcccaattctatacccccagtgtccaaaacaccttgacatatggtttgaatgaatgagtgaatgaatggctaagaagattgatggtcatgtaaggaaacatatcccaaatacccttctggtttttattggtgggggacaataaatcagtaactacaatttagagagatgattgctatgactgaaaggtatgaagagttctaaaagaacgtgggaagttgggaaggaaccatctcaggctgagagggttagaaaaggatccctggagaaaatcatgcttctaggaggccctctttcctatggtctgttcataaagcataaaggtacccttcccaattatacgaagctgcataccattattggtgtggaaaaacagtaaccctggtattgtatttmtaaatgcttgagactactaacataatcttgatcactatgttcatttatccttggaatacaaccttttacgtttgaatcttaattaaagagaaaacaacttctgggaagcagcttttttttttttgcaaggtttatcctcagcttgccaggatagctacatttttggatgatctgtgccacgtcttgctttcagactcttattggtattgtcgtggtgcttaattaagcataatactagcataaacagtatagtcatggaatgctggagataataaaaagggcatgttgagaagcatcagacacttattgcatagttaaaaacatgactttcagaaacctcccaaagtcagagaatgtttagaaacttattttggatatcctgagtcacttcttactttcagtgggtacaatgggatcaatcactgattataaattattgtgctttacaagatgcttaccacaaaaaacccccaaagaaacaaaaaattaagaaagaaagaaagaaaatgctcacacagatgtcccttctagcttttgccactatttagcctcttggttaaaatgttccagtagcttcttacttgtcttcttttcttgttattctcatcttcaaaccactgtcaggccagttataataaatgatcattttatgcctccattatgcaaggcagcatattgcagtgaaattatttatttgttatgtctgtctccctaatagactgtatgttccttgaggaaaataactgctattctatctttgaatttttagtatccaatatcgtctaacctgtggtagatgctcaataacaagtttggggaatgaatcattccccaaagccttcattttattgtctctcccatttataagagtggagaaaagaaatatcaagtaccaactcttttgccctgaatgagttggaagttggcagcacttcaaagtagaacttattagctactatagagaactcataatatgatggctttgtcacagaggctctaaagagtcagaaaaacaaaacaaaagctagagtaagagattaaagctagaagagattcctgaggcttagaatgtatttatcactctctgactcacttaaaaatgagagatcaacattcaccagcatattatgtcctgtcttttcccaattgttctatctgctattattttaatatccgggattaaaagcttagttagcctttgagatgctagttaatgcttcttaatcaccatgactgcaaatcaggtgtctgccaccagctgaatccctttgccttgcatgaatctgattcgctacagcaatagttctctcactttagtatgcatcagaatcacctggagggcttataaaaccgtagataacttgagctccaccccacttggattagtccgttttcacactgctataaagaaatacctgagacttggtaatttataaaggaaagaggtttaattgactcacagttctgcatggctgggaggactcaggaaacttacaatcatggtggaggggaagcaggcacatcttacatggcagcaggtgagagagtgtatgtaggaggatctgtcaaacacttataaaaccatcagatctcatgagaactcagtatcacgagaacagcatgggggaaaccgcccccatgatccaatcatctccctccctcaacatgtggggattataatttgagatgagatttgggtggggacacagagccaaaccatatcacsactctaaccccagattttttattggtgaggtctgacttggggatgaagaattsgcatttctaacaagtctctcggagctgccgttgctggtcttgaaaccacaactttcagaactcctggtctacaatgcttctctcagtttcatgcacctatgaatcacctggaaatcttgtgaaaatgcaaattctactttagtacatctgagctggggcttgagattctgcattctaagaagtttccaagttatgccactgctattggcctggggaccactgttgaaaagttctctcctctggctgcatgttagaatcatccaaaatcttaaaatatcttgctgcccagaccctgccacaaaattccgtttcaattaaccttcagggaagtaggggcagaaatctatatttttaatgaggagctccaggtatttctattacaggtaatccatagtccacaattggaggaaaactggtctagaaaggataaaatcatctatggaattttcatataaatataattgtctaaaacatatgtgagttattaaagaatatattttttaaagtatcattgcatttaattgttcctaagatgcactttttaatatttcaatatctctaaaattggaacacttcataatctgtggtgcttacaattatttaatataattggcagcattttctttttttttctttttttattattatactttgagttttagggaacatgtgcacaacgtgcagtttagttacatatgtacatgtgccatgttggtgtgctgcacccagtaactcgtcatttaacattaggtatatctccaaatgctatccgtcccccctcccccaaccccacaacaggccctggtgtgtgatgttcccctccctgtgtccatgtgttctcattgttcaattcctacctatgagtgagaacatgcggtgttgtggttttttgtccttgcgatagtttgctgagaatgatggtttccagcttcatccatgtccctacaaaggacatgaactcatcatttttatggctgcatagtattccatggtgtatatgtgccacattttcttaatccagtctatcattgttggacatttgggttggttccaagtctttgctattgtgaatagtgccgcaataaacatacgtgtgcatgtgtctttatagagcatgatttataatcctttgggtatatacccagtaatgggattgctgggtcaaatggtatttctagttctagatccctgaggaattgccacactgacttccacaatggttgaactagtttacagtcctaccaacagtgtaaaagcaaaaccacaatgagataccatctcacaccagttagaatggcgatcattaaaaagtcaggaaaaaacaggtgctggagaggatgtggagaaattggcagcattttctttctctgtgatacataaaatgattagtagtgataaatgaaaaacttcaaccgaattaaatttaaaagagtttaattgagcaatgaacaattcatgaatccggcaggctcgaagactccagcacagccataaggtggaagaagatttatgaacagaaaaaggaaaatgatgtacagaaaatggaagtgaggtacagaaacagctgaattggtaacacgttgatgtttgccttatttgaacacagtttgaatgctcagcagtgtatgagtggttgaagtatgactacaggaattggccaagactcagctattgttatagacacatacacctaagttaggcttttcagtcttttctaccgactaagttaggttatggtttgcccacaaggactcaaatatggaaatatagagtccttctcaggccatatttagtttgctttaacagtagataaactatgagtattcttatttctattaaatacagtatatcaatttttaaagatctgaaaaaaatgcatgacattcacaggattgtaacatttgttagcacccatttaattcaggtttttcttacataggaaggatttaaaatatatcaaaagtatttgcaatttttattctctaagagattgtttgttatgctggggcaggagtcaagagtagagaggcaatttggaaactgaaagaaaggctaaattgaccattackcaaaagaggccaccagttccagggactcttggaggacccaagagtagagaggcaatttggaaactgaaagaaaggctaaattgaccattacgcaaaagaggccaccagttccagggacttttggaggaccttggccaaagaaagaagaaggggaatgaaaggacaaacccagcatgcagcaatgggcagcagaagaggaaaagaaaacagctgaacagctgcctggaaagtggaacttcgataagagaggacacatgaatgggggcggggcggggggaacgttgtgaatctctcatcacttcctggagaaaatgttacaaagacccatactacttttcaatgttctttcaatttaatgtgtgcttcctttggatgcaggatatactgaggcaaagtagcctagaatattcacaaacaacttgttaatttgaaatctgataataaataacattggtttgttctacattatcttctagggtcagcaatttccctggacatacaccttccattaagttaggatttaaaaaacatctaattgtgaatcaaatagcccttacaaaagcatttccaaaatttgtgtttgatatggttcagctgggtccccacctaacgctcatcttgaattgtagtttccataatcttcacgtgtcataggagggacccagtgggaggtaatttaatcatgggggtggttaacctcatgctgtccttgtgatagtgagtgagttcttacaagatctgatggttttataaggggcttttccccccttttgcgcggtactgctccttgctgctgccatgtgaagaaggacatgtttgcttccccttctgccataattgtaagtttcctgaggcttccycagctgtgctgaatgtgagtcaactaaacctctttcctttataaattactcagtcttgggtatgtctttattagcagcatgagaacagactgatacagtgttctaaacaataagactgtggaaaatgttttacatgtgaagaaaaaaacacagaggagttagataatagattgataraatagacagatgatagatgattgatagatatcataggtagataaatatgttggtaggtaatatgatagatcaatggatagatagatagtcccagtgcttaaaaaaaaacctatagtaaagaaagttatttgtgtttttaaacctattacttcccaaactcatttaaaaagagaacactgtttgaggctcacccattaacatttggtaaacactattctgtaaaattccagtttgtgtgctctrtatgtgtcaatttctagttttaaccaactcctagtagatttctattttcaagtagggaaagagttttcacaggaaaagaagagcatttggagatcaaagaaagggataaaggagactatctgaaaataagcttcagctctgtaattttgactaaggcagtccttgctttcaatccctagaaagtcctagtaaatctcccacagtggggaggtcaaggtagttcaccacaatggctaatagtgccatgtaaagtgcagctatttgaaagttggttaatctccctaaacgtcatttcgtaccttcatgtaattcgggtaagaatgatgtctcctccagagggacattggggatattaaatggaatgtcatattgaagcatgccataactaatcaatgactgtcagttgtcattattaacaaatgcatccaattgctaaattttaatctctaaatgtttgagaaattgatttggaaaaacataggaatactcaaacattgcagcaattttttttagctatgcaatacagcgcacaaatatgtataaatcaacatatatctagttaggtaaacaagcatataatatcgggtagttaaagacggaaaaggtctaggtcaatgttcttaaaataaatatttaaaggaaaattaacaaattaaaaaatatgagaatcatgtttatgcccctattgtgaagatgactcttcggtagcttaacggggcattgttttttattacataaaaattattttaaaataagttcttatctgacatgtaagacataatttttttctggaattttattttattttgacagataaaaattatatataaagtatacaatgtgatgttttgatatacatatatgttgtaaaatgattactgcaatcaagctaattaacatattctcagctcacatagttacagcttgtgtgtgtggtgagaatacttcaggtctactctcagtaaactttaaatatagaacacagtgttattaattataatcaccatattgtccattaaacctccaaaatttattcgtcctgaaactttgtaccgtttgaccaatagctcctcatttcctccaccatccaaaccctggcaaccaccattctaccttctgttttatgagtttgacttttttggattccacgtgtgtcagatcgtgccatgtttgtctttctgtgcctggcttatttcacttaagatgatgtcctccagcctcatcaatgttgtcacaaattgcaggatttccttctttttaaagactgaatattatttcactgtggtgtgtgtgtgtgtgtgtgtgtgtgtgtgtgtatcacattttctttatccatgcatccatcaacagatgggcaaaggacatgaacagacaactttcaaaagaagacatacatgtggccaccaagcatatgaaaaaaatgctcaatatcactaaccattagagtaatgcaaatcaaaaccacagtgagataccgtctcacaccagtcagaatggctactataacagacaaaaaataacaggtgctggtgaagttgtggagaaaaggaaatgcttatacactgctggtgagagtataaattacttcaaccattgtggaaagcagtatggaaattcctcaaagaactaactacagaactatcatttgacccaacaatcacattaccgggtatatagccaaaggaatataaatcattctactataaagacatatgtatgcatatgtttactgcagcactattcacaacagcaaaaacatggaatcaacctaaatgcccatcagtggtagactggataaagaaaatgtggcacatatacatcatggaatactatgcagccaaaaaaaacgagatcaagtcctttgcaggaacatggatggtgctagaggccattatccttagctaactaacacaggaacagaaagccaaatactgcatgttctcacttataattagcagccaaaaaatgagaacatgtggacagraggaggaaaacaatggaaactggggcctactggagggaagaaggttggaggtgggwgaggttcaggaaaaaaaaaaaactgtcagatactatgatttgtacccatgtgacaaaataatctgtataccaaaccactgagtcacaagtttacctatattacaaacctgaacatgtacccctgcacctaaaataaaagttacaatattaaaaaaaaatacccagatccttaggttgtttccaaatcttggctgttgtagataacactaccatgaacgtgggagtgcagatgtctcttcaggatactgatttcatttcctttgtgtatatacctggaagcaggattgtgctggattttatgctagttctatttttttttttgagcaaccttcatactgttttccataatggctgcaccagtttccattcccaccaacartgtacaagggtttgcttttcttcacgcccttgccaacgcttaatcttttgtctttttgatagtagccattctaacaggtgtgaggtcatatttcattgctgttttgattkgcatttctctgattagtgatatcaagtgctttttcatgtatttgttggccatttgttttctttgaagaaatgtctgttcaagtcctttgcccatttctaagtagggttatttggggatattgttactgagttactcagtaaactcarctgaattaagtttcttatatatacggatattaactccttaccagatttatggtttgctaatattttatcccatttcttaggttgtctctttactctgttgactatttcctttgctttgcagaaggttttagtytgatgcaatcccatttaactatttttacttttgttgcctatgttttttaggtcatatcaaaaaatcattgcctaaccaatgtcaaggtttttttttatgttgtcttctagtagttttacagtttcatgtcttacatttaaatcttgaattcacttttagttgaccttgtatgtggagtgaggtaagggtctactttccttcttctgcatataaatatccagtttttctagtgccatttattgaagaaactgtcctttccccattatrtaatttgggcacccttgttgaagaccaactgtccatatatgtatgggtttatttctgggttctctactatgtttcattggtctatatgtctgtttttatgcaagtatcttactgctctcattactgttttatagttctcagtgtgtccagatttttcacctccttgattaaatgtcttcttaggtattttattgattttatgctattgtaaatgggattgttttcttaatttctttttcatatagttcattgttagtgtacagaaacacaactgacttttgtatgttgactttgtatcctgctactttactgaatttgtttatcagattttttgtggagtcgttagggctytctatataaaagatcagatcatctgtgaacagagactatttgacttctcccttttgtgatctgaatcccttttattcctttttcttgcctaattgctctggctaggacctcctgtactatgttgaatttctgatcttagaggaaaagctttcatttcttcgctgtttatgatgttagctatgggcttgtcatatatgcctttagtatattgaggaacatttmtttgatacctatctcgttgagaattcttatgaaaggagttaattttgtcaaatgttctttctgcatctatggagatgatcagataatatttatccctcatcctgttaatgtggtatgtcacatttattgatttgcatatgttgaattattcttgcatcacagggagaaatctcacttgatcctgatgtatgatccttttaatatgctatgaatttggtttgctggtattttgttgtgggaaaatataatgttatatgcatagttgcctccaacctaagccagtgcctgataaatgaaaggctttgcactcttaattgaacaaattccttggttccagtactttacygttcattgaaagccaggaagtactgggacaaagaaattattagagttgataataaaagagtaaacagcatactcattattagcagygtactttctcattttccctccctgataggactttaactctcttctatatatttcagccctaatgtacttatcatatagtctttaggaacargagaaaagaccaagtagaatatgtacaaaactaaaataaatacagagacatttctttttgttttattaggaaaagttaggaggatgagaaacagtgaaatctaagatattgttcctacaatattttgctatgtgtatggtatggatgaataaagtgaaatatcctttataattatctaaaaagtatgtgaaagtgaatagatgatgctgaaactaaaaaattttattctagatcagtgcttctcaaacattaatgtgcatacgaatcacctgaggagttttccaagcacatttcgattcagcaggtctgggctggagactgagattccacaatcacaaagagctcccagggagtactgatactgctggtctgcatatcacacttggagtagaaaggttctagattacatagaccgtcatcttcatgcaccagacttatttcctagtctgggttcctctggaaatatttccagtgcaccaatcagtttgatggagttggataaagagggagactcaagatttacttcacttgaaaagaatatttattttccatttaaggctaatggactaatggactaaatattacacatctcagcccttgggatatctgtgataatatttttcttttcctaccaatgtgcttttactctatacttctgctctgctgggtggccaatgggaccttgtctgtttaccaagcctagttctcaggtctactttccttcgatatcttttctttcttccaaccttccaatccaaactgaggtggtggtattccccaccaccaagaaaggcatagtttccattttttctcyaccagttctagtacatgcaattaaattttctgagcccaaaatttctcatctctgaaataaggagcatgaaactctgtgcgtgggtgcatatgaagctaatgaaatggcacataaagtgtctaacacaaagaaggaaccaaataaatatcagattctatccctatcccacttttattttgtcccattccaatgtggctttgcataattggaaatcattatgtatagacatcaggtaaaatctagcaccagcttatatagtactctaagaccatcaggtttttttttttttacctcgtcttcagttttaatttaaagcaattaaaattaatatattcagatttcaacaaagtgtaagcatccctctgctgaaccactgtatcattacagtgtgcgttaagaatgccaataggcatggaacagatgccagataaccaagatggtacttttastgggtctggcattaaacaaagaaatgtgttcataagtcatctttcttggatctcaaccaaaaattgttattttggattttgtcatctttccatttaaatttctacttaatccttcattagagtatgtgttaacaatcttaatttgtgtgattgccttcatgaaaagttggatatataaaataaatgtcacttttaaggcatctaaggaattgttttctatcttagtcaccaagtatgtcagacacattgcttacaatgtcttctatttcaatctgtggtttgtttctgccatccaaaaatgagtaaactttagtttcacccagccgtgtttctgaatatgaacattcaaatgtggaccatgtgtgatggaaaatcctgccatggctgagaatatggataaacttgagggggactgtttgatggaaagtcattatataatgtatattttctttcattcatttaacaaacatttattctaggccaatggtgagcaaaatattccctcaacaaagtacccatgcacacacacatgaagaaactacacatttatttggaatgtctagtagagttcccccctttcttggctattttacaccagttcccatataactggtttatataataatagttatttatgataaaaatttgactaattctaactgacaagaagatagatatgtttgttttggaaactatttctatttggtaatagattccaaatgtattgaatggtctctaaaagatgtaggaacacaggacatactgctcatgatgtacaacaaaaacaatagtttcaaaattttatgacatattgcagtttatcaagtggttttataaccattatcttgtttaattctcacaacatccttatgagtagtgtgtgtgtgtgaccatgagaatatatgagtgtgaktgtgtgtgtgtgtgtgtgtccgtgtaggagaggaaatgattaacccatttcatagatgaggtgtaacccatttcatagatgaggtgtaactaacaatgtagcttcaattatactggcaggtcacagaaaagagatttgcaaccagccttatgcctctcctcccacstctctctactgacccacatctttttatgaagtagggattgcagccatcccacagctcatcaatgctgtcatgtctatgcacgaaggcactcttagatagaagagaaaacagaggggggcctgggatccagtccccagcgcaggcactgagtgtgcccctggccccatcagtttaattctgagcgctcaggacagtatgaggagcagcctgtcgttttcggagacaccagctgagggagcctgtggacacaataycagttgaaaagctccccagcccagggtggaaccaagcagcccacgcctgctcttaggagccaagtttcccaaacaatgtcagagttagcttggggaatcttcttagtactcttaagaggccagagctgagatttccacacaatgacatattaaagtattggatccagggtcctttgcattggkagaatgtcaggaaaatagcattagctagataaacttctttccctcaaaccaaatacagtcgtattgtttactattataggtctattaaggttgctgtttaaatgttaccaatgtcctcatattttggtaattttgttcgagttggaaagaaatgtcttgagaaatttttatttagccagagtgtttgagcactttaagatatctttagtatactacatcgcttctccaggtcctcaagagacctaaaaaaaaaaaaaaaaaaaaaaaggctttctaagcagtgcctatcaagctactacttccggccccacaaaaaagaaaagctgagactcttcaccccttgattccagtattcccaaactcctggtaaaccattaggaattagatatgccccaaatttatgtagcaactcccttcttaagaatatagagaacgtttttttttacacaccttgttacacctcacaattgagcctcaacttgagattcccttgcccagcaaagtccagaattcaccactgtctacmtgctggacccaattcgttttgctgtcgttgatcactaatttgggaattgtgggagggagaggaggagcgartccctctctttactttagaactggtaaaactgagatagccagagatttctagaactgccaagctaaaacgtaagctgaatcattgtgcaagtatggattagaacccagtactgggtttgaactgtaaacccagtttctgatcatatggctgcccagtgctcctggtggcagagctgattgcttcctgggttcaaatgggtcatgctttccagggcactctggacatccatggaacaagcctaatttaaacattagaggtctttcaaacccttatataccaaatcatcatcagttcagtctctcaattctgcattaattcttttgtggaattaaaaaatattttctcctgaatttccttaaaaaaaaatcgaacgttccctcagggcaaggagacatagctaggggtaccatgcgataagagrgtgagtaaaaaggaaaagtctagtatcctagacagtctctttgcagagctgcgcttctgctcagaagacatttgtcaatgcctagagacatttcggttgtcaccactgggagaggggtgtactagagagtagaagccagagaagctgctaaacatcccacagtgccctggacaccccccgacgacaaagaattctccagcccaaaatgcctgcagtgctgatgttgaagaatgcgggtgtgtagatataaacaacaatctgctaagctttcaaatgatagcagctagaaagatcttcaagagtctagggatttggaaaattctggcatcatgatagtcaatccccartggagacattctttgaagaccacataggcaatcacttgaccaaatgccacctaaaaattgaaatatttttcacgttttgcttggtttgctagaacacaccaatatactttcacccttgaagaaagggaactgtttatgtcattcagtagcaggactccttggctaaagcagcagacagctcaccagatttcactggaaagactgcccaaaccagtctctgccagggactccaaagcgcagggaggcttcagtgctagggagagcggatgtgaaggcrgttatgaaggacagctgtgccagcatctcccaacttttccgttttttctcaaacctcagcttgccttgtgcatggctaaggttatccctggccagctgcttttttccctattctacctctcccctgctgtagcaattccctaaccagtgctactaagactaaggatttcaccacctcctcccattttccaccatacagaaatccacaaaactgagttaagagaactctcctgccatccccaatagccaaaaaactgagtcaccacttggcctaacagcactcagatgattcattaaaatacagtggagcgctcttcaggggggtgcaggggagattcaagtgggaaggtaaggctgcaagcaggaggggaagtggacaggagatgagactgcgaggcgtgtcacaagaagggagtctcctggtgcctttctccagggctaaaccccttgaggcagaaactccgttgagtcattctgaagtcaaatctggtgctaactggcgctcttggatctgggtcagtctcgatggggcctgggaatgtctgcggagtgcccattcctctcagcagtttgtgagattgagagccactgctctgcttttcttctcccttgaccccattcccagtttcctaccaggatcactgtgagccctgggaggatggatttgtaaaaaattcctggagccaaacaccctgagctatgaaactggcccattattgtgagaattttcaratgttgaagaaatgtggggttgggaaagagaggagcaccttaaagaagatttattcacctagtcaccctcagatggttgtctgcagattttgagagagaaatggaaatagtttcagatactttttattttttttttgagacagagtctcactctgtcacccaggctggagtgcagwggcgtgctcacctcacttcatcctccgcctcctgggttcaagcgattctcatgcctcagyctcctgagtacctgggattacaggtgcctgcagccacacccggctaacttttgtatttttatttttagtagagacgagattttgccatgttggccaggctggtctcaaactcctgacctcaagtgatctgcccgcctcagcctcccaaagtgctgggattacaggtgtgacctaccgtgcctggctgagtgtcagatactttttaagcatactctggttatcattcttctcagattacttcactaaattaaaatgttctaaatgtacaaagagcaaaatggtttgtttaaaaaaatagccgtgttcaatctctatcagaaacagcttcaagtaaaattattttcctccagccaatttcttctttcaagtattctcctctatgaaatactcaatttgcaactctagatgaaattactgagtcaatttgtggaaatttcatctgttccttgacagtgagtttttatgtttgggtcaaaatgaacttaaggccaggggtatctgtaaaacactaggtaataggacaacagtccctaaagtcaagcgggctattgtcaagcacaactgtactggttcgtcagagctggctcccttagcagggaaagtttgtgtcgtttctaaagtgctttaccatactgtaatttgtcattcttgattgtaatgtatggtaaattatgcttctagaaagttatcactctgatccacgtctgatctaatgagaacagctgcatccactgcaggccgggtgcttgtcagcttattccctcagggccagacaggtgtggtctaagctccaatttaggtaggagaccttcagggaaagtccaggtgcttcaagaagctccaagatgagatcagaaattggccccaatccctctgagtcagaattctgagtcatctttttttaaggccattttttgtccgtttcctcctgcgactatcagtgcctatactttaaagtgttctataaccgtgaaatctttcctgggataacccagtccactrtacccactcccaccaacccccaccaccaaaaactatagatctactgctgagtcaatttcttcacatttgaaagctcaagaagggggagaacaagttgaaatttctattcagagctgacactccatattaaagataggaaagaaaagtttggggagttgctaagcatgagaggcattgttgataaattatcttgagatccagatattagttgagcctcrctcgcaactgaaagaatcaagcctaatggacttttctgcccagtgccagactggaaagatttaaactcttgaaggtctctaaggattcccaactgcttttcctctcatgatcctctctgctcctgttctgtatacctgcgtgctgcctcatttggccccatgtccacctaagtgtaaaacccagctcttcaccagtttttacaaggatgtccatttgcaccaaatgtcacatggtggaagaatttactgaagcctccaggattggcacacttaaaagttcttttctcaggttgactagaagtcttaaccactcaggctgggctcagtggctcaygcctgtaatcccagtactttgggaggccaaggcggggggatcacctgaggtcaggagtttgagaccagcctggccaacatggcgaaaccccgtctctactaagcatacaaagaaaaattagcttgccgtggtggcagtcgcctataatcccagctactcaggaggctgaggcaggagaatcacttgaacccaggaaatggaggttgcagttagccaasattgcgccattgcactccagcctgggcaacaagagcaaaactccgtctcaaaaaacagtcytaacaactacacaaaagtctcaatatccgcttatccccagtgcatatctaastattttttccaacaaatagcattattcctcagaaaaattctgagaccagttagaaccaccctgttaaaatatcatcagaaattcacaaggaaaatgttggctttctgtataataatggcacaacaagaattcacttctacttgtatcatctattaaataatgaaatatttagtggcttttaagtagcagggcatatggttttgaattttgtttttccagttggagtaagaaacaattcttcatgattatcctaragaaccaggaagaaaatgagcaagggactggctgggcttctaggagatgtccgtggcacacagtaggatcttggtaataactgacctactctataactaagcaaacctgctcttcagcacagggtagaacaccatggagtgaagaatgggataaaataggtgaagaagagtatgccgtctttactcagaaggggacctagaaagttttttttttkkttttttttttttttttttttgagagggagtttcactcttgttgcccaggctagagtgcaatggtgcgatctcggctcactgcaacctcctccccccaggttcaagcaattctcctgcctcatcctcctgagtagctgggattacgggcctgtgccaccatacccagctaattttgcacttttagtagagacagagtttcgccatgttggccaagctggtcttgaactcctgacctcaggtgatccacctgcctcagcctcccaaagtgctgggattacaggcgtgagccaccacacctggctgaaagtatgtattttctatcatatcattctgtaagaccctcttagcttctctccaaaagatttactggaacggttcctcccactcaatggtgttagagagatgtcagtaatactatgagtctgcctgctgaggtgcacaacataggactctatagtcaggcgatgggttcaaatcccagtgggccagataccatttagctctaagtgggtccttatcctccctgagtctgtatttcctgtatttcccagtttacgaagaggagatcataatacatccctatgaaactgatgtgggcattaaagacgtaagtgcatagtataactcacacttagtaaaaagtagtcacaattttactaccatagatgctttctcatcaccggtaaaaacgacctttcatgaaagtctcacctccaaccctgcgtataatctcagaaactcactcaataacatcaactcaaagtttatgtatgactattctatttctatataatattgatgtatctttttaaactgtaytttgagaaattccaaaatatgttatgatttttagtgtaaaattcctggcctgagatgtcattatatcttctttcctaaaagaataatttaattacatttccttttatgttaatgactgaatttattattattaatttggcccccaggaaatgttcaatgttatctgtggagaatgaaaaggaaataaaagacgaggctttggagcaataaaaatattatcctaaaaagtcacttgggtatttgagaaataacttccaaaatatggatgagtgaaataaaccagggaaatgctactcttcggctactcttagtactattatggatttttttttttttttttgagatggagtcgcgctctgtcacccaggctgcagtgcaatggcacgatctcagctcactgcaccctccacctccgaggttcaagcgattctcctgcctcagcctcctgagtagctgggattacaggtgcgcaccaccacgcacctgtaagatttgatagatatggggttttagcagatagggggtttcaccatgttggtcaggctcgtgtcgaactccagacctcatgatccgcctgcctcagcctcccaaagtgctgggattccaggtgtgagccaccacgcccagcctattatggatttttatgagcttgaaggggtcatgaggaagagtcccaactatatcatagaacatgtctatgagaactcagttaacaggagaaaaacaacagtattgtcataaaaagatgagaaactttacttagaacctaaagtaccttggagtgtttttactttgagacctcaaaaactagttaagtcatgctaaaatgtgcctcaaaatacaattgttagaagatgcatgcaaaatagaataaaatgatctgttcctaaaattcaggaactccactgcatggagatcaccaagttgcagcaaaagatcaagttagatcttatttgacttgaccctaactcttcttctgttatggttatgccttacatatcatatctctcctatagatgtagtcatttgaaatattaaaaaaaaaaagctcatcttcatctacaatgtgtatcttttctaacttagcctgcttgtctgtctagaagccaaggtagaaagactactgctattatactgtgtggggcaacaagccctacaggaccaaacttgaagaggaatctaggtcattgtcctgacagatctgagctttaaaattttgaagagacctacgtgtctagaaccatcccaaatagtcacatgaattaaggctttgctcctgagatttatagtggaataaaatgcaatgtcatttgcctcttcctttwaaaaaaaaaaagtcaactatgcaaaaattactataagagacttcataaagtataacacacagtgaaattactggttccctaataatcttctatataaattttattttataggctctgctggattgttaaaaatcatgatgatattcttttaaatgtttatggttaatttcatctctttcatcagattttccctctccattcttctaaactctcatctctcctactaagcttttttccaacacagctaaagtttcttggattctttcraatatcatgggctccagcttctctctgctggatctgttctgattaaggggaggaagagagacctctcagctctaccttttctgctcagcatatatcttgttagccaagaaaagtactttgtttagtaaagacactaccagtcaccaggcaaaaaaaaaagaaaaargaaaaaaaggaagacgagtccaatcaaaagttcagctttgaaattcagaccaaaagcacatgctctcttctacgtgcaacctcaggctttcccacccacctgtcttggcaagttatcatctagcccagaaactggaggaagatgccaaaaagcaagaggattccagtcaaattggtcatccacagataatcaaaatgcaaatatacatctccactccaacaaatacaggaagtccccaattttaaaacgtagtgaattacagtgtacttgacggtcagatgtttagaaccaatttggaacacttagtgttacaaagcaggcccaccaaaaatcccatgtaagtcccaacaacttggttatgttgggtgttctatgtacatctgtgtttaaaatgaaaaaatagaaaaaataccattgcaattctaatgattaaaaatttttaaagacataaagtgattttgtattgtttttccaaagtgctctgctatggaaagatgtttagctagatgagtttattggaggcttatagaaaaaggaccatctgggtagtttcacagccttggatgttaatggcctcttggttttcggtgtagcattattaactcttgtatttgtcagtcaccattaggaaaattcttgaaataacaaataagaagtagaggttatatataaaggagtggcttgtttatttttaaagaactggacaaactttttaaaagaggaaaaaaatcaaaatgaaatagagagggaaggtaaggagatggttaacgatagtgtaagtagaagtgaaaaggactttgactaagatggaatttgatgatcagttattagtcaaaggctgaataaatagacgtggatacaagcaaggcatgtgaaagcttagaataagctttaccttagtcgcaaggtgataccatcattcctgacagtttagttcctagacagagacagcaggatgatgtttatgaagtagccttaaaaaaaacagacgcgtgaggggaggtagtatcccactaatacttaacaaatcaaatgtttgtaacacagagaatgaatgtcttttcagaaccttgtatasagcttaatgaaaccggtatagtgaaagagcatcatttgtagtcagaccaaagaggacttgaattcttgttcatgtgatattgggtcaaatgatctaacctctctggtgcccaattgggatatattacaaatgagcattcagtaagtcatctcaaagatattatatacagatggtgtcaactacacattcaataactgacagttattaggctcctgaagtctgccagtaatgccttacaggttgtgtcagtgatatccttgtagtgtttgatcctgtaacaaattcagtagctattttacacccatagtatattaaagataataatagatcaagaacaaggttaacataactaactctatgtggaattgtcagagttgctatggaaactttgctaggcttatgactttcaaaaaacagtctcaattaacagaatcttcttacagagtaatctatttcatgtaaatgaattatctgttttgcagctcaaggtcaaatgcatttgaaccagtcattttgggatttgttttcccaaaggaatgataaatgactaatccaaaagactatggattagagaaattgactagatgtcattaaagaccccaaataaatgtttgctgtccttgacctccatgaggataagttgtggtggggcctgtggttatccgctgtcttttattgaatcaataacttggtttctttaacaatacctgtttatgtgcatgcctagaaccaattaaatactgggctattttaagtttcccaatgcagctatattttggcaagygtgaaagaataaattagacacttttccaaagcacagtgatctactgagatctgtactatgtaataaacatgggatgatgcctaagcctgtggtatggtggggcccaggggtcttctttcttgtactagttcacatcgtttatgataaatgcttaaaagactttgaagtctttgtccaaaacacttattatgtataattatacagatgagcatttattaaagtaagtgtattggccttttagtgccaaaaccatccctctctatagatgttagcagttttcacttaaagtgtgattgtatgagtaaatgtgttaacccatttatagtgaagcaagacagtgtctacaaattgctgtgacaatgtccttggctcttcaaagtgaatatggttatgaattcagtcgtgagagtgcaggacctaagaaacctaaaaataaaaatctggcctacagtgtattatttttgtctgctcaacagaatgccagggtgagggtagaaaaactacctatcaggtactgtcctcactacttgagtgacaaaattatttgtacactaaaccccagcaacatgcaatttacccttgtaaccaacctgcacatgtaatgtaccttgtgaacctgaaataaaaattgaaaaggaaaaaaaaaaaaaaacagaatacccaactttcarttatgaccaaagcaacccataccatgcttgtgttgttataaatgtactactaatagtaattagattttttggtagtttaagtatactatttatactccatttaaatcatgtttatagactttttgtacattccacaaaaatgaaaatgtcttgagtacctattattgccaaaccctttgctgggttctgtggatttcaagatgaatgagacacactcctacctgcaagaagcccatggtctaatagaggagaaagatgcagactatatattatattatacatatcttaagtgctataaagatactgtaaaactactgctatggaaacttcagtaagggtgtgattatttattccttggaatccagaaacatcttaatgaagcagcatttaaagtgggccttaaaggacagaagtagcttgccaggcaggtgagcaggtctgttgtcctggggaggctactgaaagaaccaaatgtgtttctatgtagggaactcttgtcttctgtatgaggttggcatggttcactcatcaaaatgtataatgagctaagagcctggagaaatgacttttggacatttcatcccagagagaataaacagaggcccttcccatggaggcagcagcataggtagcttaggtttgtacttcagggtcacttcttgacaaggaaaatgcaagtcttatagattgggtcctatagatttcctcaccaattccaagtatagactaacttggccttgttaaaaaaaaaaaaaaaaaggaaacaggaagaaatatctagaatccttggtttctaaaaaaaattataatttaccatctctctgacttggagaaagtaagccaaaatatctaggtttttatgtttcttaaactgtgcttatctcatttaaccttaaaggtatttgattgagtcaatccatacttaagccccaataaattcaatatagcacttttacccttttcaaagtgttgtcatcaattggtaaatctaataaaaattgaatattttttaatgggaaaaaaaattacgccataagcaaagtcaaagaatcaacaaataattgagaaaaggatttgaagcatgattgacagacagagagataattgtgttacagtcagaattgtcacagatgaatttttttaaagacaactctggcaaagataatgaaagggatttctatataagataataaaatgctcagcttaatttataattaaatataaatgaaaaccataaaaatataccatatactatttatcagattggcaagtatacaaaattttaacactacctagaattagcaagagtgtggggaaacaggcactctcataaattcagggatggatccacatttgtgcctgaaactcatacagttttggagacttctttaagaaaaagaatacaatattaagcatgctcttgaatttttatttagaatgagaatgattctaataaattataaatttttaaaacatgacatataccacaaacattgcaaaatctagaataataacataatatttattgatgtactgcctggcatagctctctactaacttttccctatatttytgatacattctttctgagtatcatttcatgcaacaatgttataatacattatgtagagagaatagaaatataagtcatttttcctccagcatggttggtcaaaagaaaattttttatttttgatatttgaaaaagtttcttttagtttcacaacttattggaaatatcttataaatttttaggatagctgataaatttgaaaaaaactctaaaacatttatttcatatatgatctgtaatatttcagggaatttcaagttggttgctatgtaaccatatcaatgttaaagaccatttcaattgatggcacttctttgtagttgatgtgcttgtcacagtggtgtgttatgagctttacattattgtccatgccaatatttctgtcaaatcaataagaacttcatcattttcatgtatttatatgatttgctcttctttataaacatgattatcaaataatccaagagcctatttactacccctataagaaaaaatgtatatccttttaataaattactgcttttcagagtgaatttttttaacaatgcacttcttttttaaaaatatgtataatatttatattattgaatagcaataggcaatacaccctgtatctgtaaaactttggaaccactggcttatttgttaaatctagtccatgccagcctccaaacaccagaaaaaaatttagttagcttcattctttgatgcctcaccaaaatattctacaagatctgaaacatcctcctcctcatcattgtcttctgggtttggtgctttgctattcaagacttgccatgggaactgtttggctaacttcctgagacttgttaagctgtcagcaccaagctgacttaatattccaggaaacatttctgtgattggtttggcttctgcatgactggtaactgcaaaggtgttagcagagagagaagaactagagagaggagcagagagaggtaattscaaagatgttaacagagagggggcagacagaggttagactttgggatcgttgaaatgaaaaactgtcccatcttcaatcatgttcacctctttaataccagctatattattcacagccagtttagttacggaactctgaagctttctgtcatctgctgtaactctctaggttccacctttgttttgcaagctgtacccttgcctcctatctggacctgagcctgaagtttggctaactttcttgattcacactgttggtaaatccaaagcagggagggtcctccaacaccagcatacagcaacagcaaaatcacaattcacttctgtatatcaaaataattccatagatcccaccacacatttttattgccttggtttcatatttcactgacttttaatctgaattttatttctttaataaataattttaaagatgaccaaaaacatattcttcctatatgtcaacatcaagggtctgtaattccttattatattgaaactttctaaaaggtctttataaaattctgttaaaataacatatcccaactcaacttctccaagcctgatccccaaaatagcgaatagccactccaactccatgtggcaagtaaggggtgtaacagtgaagaattcagagttaagagatggtagtcataaccaattgtggttgaaatgtcttacttttgctaattttacaaaaacattagaaatgtctacatattttaagggctcatgcagggccttggaagaagaccatacaagtaagatttgaggttcacaataaattggcttactataaatattcctcagtacacccttaaggtgaaagtcaaaattctaatcatctatttgaaggacaagttggcagcatgtaccaaaatttagaattaaacatccttggatccaacacttccacttctactaattcactgttacagatagactgtcacagacaaacaaaacattttgtacaaaaatattcaatgaagcattgtttgtaacagatgaaaaaatggaaatgccgtaagtgggagaatagtgcaagtaataatggatatcaacaatataatatgctatgtagttattaaaaagagcaagttagccaggcatggtgacacacacctgtagtcctagctactggaggctgaggcaggaggatcatttgaggccatgagttcaaggttgtagtacactgtgactgcatcagtgaatagccattgcactcctgactgggcaacatagccagaacctgtgtctatagaaatttttaaaataaaataaaaagaataagttaaatctttctatgtatgtaaccatgaaatttatccaagttgtatttcaatttgaaaaagtagtttaaaacagtgcatgtgtgtgtatatcacacacacacacatatatatacacatgcactgttttagactttttcaaatatgtgtgtattgtatacacacacatayatacatacatgtgtatacacacacrtatatacatacatgtgtrtacacayayatayatacatgtgtatacacacatatatacatacatgtgtatacacacacatatatacatrcatgtgtatrcacacayatatatacatacatgtgtatacacacayatatacatatacactatataaactgtgtttgtgtgtgtatacatatataaacggtgtgcrtgtgtgtgtattaatagtttggccacaatttagtttacatattatatttatacagatttttcaacagttacatgttctaccattcctagtggctatttttggggattagactaaaaggacagaggacttctacttataaaaatttgtctatttttactctattcctctcccccttttaagcaaaatgttttactttcataataaaaaattatagctgctgctcaaatcaatttctatgacttctcatgcttaaattactttccctctttaaactcatctttttaaagcaataaataaatgaaaatatttgagaacccctgcttgcaaatcatatataccatttttagcttttaggtgaggtcttgttttttattcctctattttaatcacaatctgtgaccagaactttaggaaaaacatgaacccagaatttctcaggatttcttaaataatgccttaacataattaaatataatgatgattgagtaatcagaaccattttagtatattttgttcaaaaatcagaatagttttatattggggggcagcatcatgattaaagagaggatgcaaagaaagtctagactgcaagcagttaccaacagggcacaagagactaaaagacttctagtcatctcaggagagaatgatgggagtactctagaatacttgcaagagtgtcttccttaaaaagaaaaaggtaactcctaaagacggctgtgatatctatggtgcaatgtcaactttgcctggggagagaggggaacgtccaggcttgccagtgagctgtctttagcataatattctaaatgatgcaaggatattaagaaatcaatgatttattgctatttccttgtgtctcagtgttttttcttctgcaagtttggatttgccttaggctcttctttaaaaaaaaaaaaatcttagctagttgtaacataggtccaaaattcctagctttttaagaaatttgttaattcagtaaaaaaatctatctataggcacattagattgcacatagagggaaagaggcatctctcacatcccgggagactgaatgccttgttttagagaacagcttgtgcacaaatggcccccaggtgaataagactcattatggtcattttggtcacctttggtccagaagacctcaaggcattagctcaatttgtatgtcatcagaaagcaatgattcataaacttcaatgcgtagaatgccatgaatagcctgttagagagaaccaccctccaccactaccaccgtcaccaccagccacacacaatcctgattcaggaccacattgacaaacctgccttaggactttgggcttactctagagaaaattcacatgcacaaagccaaatcaaactccattcctctctctgaatagatccaaccctccgcttcctgatctgtattaaaaaaaagaataaaaataagttgtctgataatctaacatgcccaggttagcttaaataacagaagttgaatgcaaggacacaggagatatcaaagaaagcaaaatctcagcaattgcacagcttgatttggagaaatgggaattcattccttgctggaaaagaatatttcaggggctccaggggccaagggtagctcttcgagatccaaaagcacgagtttattaatgagctcatgacccctcatctctacttttctatcccttcagtatttcctcctacctcttatctaccttccctctatttggtgtttcatggcataacttctgccttctaagggccaacttccagagcctctctactttctaaccactcaatctaaccaagacaggaggggataatggggccgggcaaccaccatccagcatagagcactcttgtgactccggtgagtctgcakatattaatgtttgagtcagacagttggtctggccagtcagggcaagagtgcagggtcacaaggtccaaagcatggcaactaagcgtcaaaaacccttcagggtgagatttkgaaatggacagatatctgtcaaaagagagttatgtactcgccaggcaggcactttggagaccacttattcacccagccattccaccatttgttgaatgcctactaagggttaaacactagaaacaaacactgattgagacatagactctgaattccaggacttcgagtacagggatatggttaacaggtaaatcaacaaatatcacccagtgtgacaactgccaaaagagaaatgtgttcagatctagggaacccagagaagcagggaatacaaaagactscatacgtgaactctgagcaaagttccattaattagatgaagccatgcagaaatattgccaggtatgaaggcacagtgggatttgcccgtgttcagcaggctgaactctagctctgttgctcagcgtatgataagtttggctttgctctactcatttccagactccattttagccatttcagatgttataaggaaaactaaaatataaattaccttaaaagtaagggactgttagtatccacagaactgcagaaaaacatggttcctggagggcggctttggaaagaaacataccaacttgaatatatacagagagaaaaagacaaggtctcactctgtcactcaggctggagtgcagtggcatgatcatggctcactgcagcctcgacctcccaggctcaagcaatcctcccacctcagcctcctgagtaggtgggactgcagcaggcaccaccatgcccagctaattaaaaaaaaaaaattgcagagaaaaggtcttgctttgttgcccagtatggtcttaaacccctgagctcaagcgagcctcccaccttggcctcccaaagtgctgggattataatgtgagccatcatacctggccctgaatgtattaaaactatgcagtgataccccagtcatggattaaccactctaaatakaaattgtttctatcaaatacatatttatctctaatttaaggactggcaatggagaattttttaaagatcctaagcaacccattgccatcaaaacttccagtgtttatcaacattttaatagaccacttaaatattcttgatctaagttataattaaaagtatctcaggatttatttttctgagaaaacatacagcagttttttsttcatctaaaaatctttatattgtaaactttatatcataaagtactttaagactgttgatatgctccttagtagacttgcagaagagtaatcaaatgttatacagatgaaaatgtgtccagttaattatgaatgtataattttatcaatgacattttattaccatttaataacttcargaaagacctatttttcaaaattcagaaaagtacagcttgttctatgttaggcacagctgcttaaatgtgttcattatgttttgttggggatgtttcttgttattttcatagtagccctcaggctacaatgcatttttgcaaggtggtagggataggtgtcattctcttcgttaaaaatgaggcaagtaaggttcaaaaaaattaagcgttgtgcccaatgttacacagctggtaaaatttgaactcgtgtattctttccatatttcccaaaaggttcacaggatgcaaaaaggttccatagtaaaagtggtttggaaaattttggatgaaacaaaaattaaacagttctttttaaaaaattgcagacatctcagtgaatggatatacacaaatgtgcttcatcaatctccaagtagaaagatagtctgcagcatttcccaaacatacttgagtataaatcccttttatatccagaaatatctcatggtattaatcgtgaaacataatctggaaaaaackattctacattattaggcttcttctcgtgtagtaattgaaaataactctgaaaactctcccttaggaaagtaattcatgagagctgcagtgagaamcaagaagggaaagaaaataaacaggcctgacaaattctgtagaagctgagaggttagacagtaacatcagtagtgttatacaaaccaagaaggacaaaaagacacttgaaattcattacaagccaaattttcctctggatcaaggacagctataggggccaagagtaaaccagatatccattatctttatgtttctcagttctgctttaagaaagaaatgtacctaaccaaaggaaatgtctcaatttatctatgaaacacacaacacccagaaaaatctcataaaatctcatacatggaacacgtaacatggccagtttaacaatcggccaaacaatctgcaaaaatgatataacagtgmctgaatttgaacatctctagacataacaaatagagcatagttacattaccagactaacaacgcttgattaaggcatacagagaatttggaagacacaaagagcatatgtctataaagcttaagtttgttatgttgcaatatgaatattaatagtgcatgggatttaatagcaagaaagttacataaagtgcatgtctctgagaattcctgctgtcagtgactggaaaggatcccactggggaaatgctcgctacctaacaatgccactggtggtgactcatccaaaattcygacacagacctaatgagcttctgagagaatgcctggcagactcagtcctattcagtgtgttaaatagagggtaagaaacaaagttctcaactgatasagttttctgtaaagctctattgtttctgcgagttaagatatactattacattggtcaaaggatatttgatcttccagctaccactttggttaactggagaaaggaaaaacgccacaaagcaagtttgcttttttgttttgtgtttgtcgaagtctttgtactctgataccttctttggaatatcaaatataaactgcccctctggtgcagagtgtgatcaagggggtaattaactgagctccaaatgtgatgtttctggtggtcacttcaagtcattctaaccaattaatcaatctcctggtgctctgacttggatcctatgttttcagsccctggagcagtggttctcaagcctggctgcccattaaattcatttgggggattaaaaaaaaaataccgatgcctagaccccaccctggaccaactagatagaatctctagggatagaacttctgtatttgtgaaaagttttctaggtgattctaaataaagtcaaaagcctccaaaaactgctgttatgttcatgtccagctactgagtatctagtctccaatgagtgatccaaaaatctcaaagaattaagcatgaaaaaaatgcccccaccaatgactgccatacagctggctgtttgggaccagcacataagacattagaagacaggcccatgttgaagcaaggaaatgtgaggactgtgatcaatgttggtcagcaggatccagggaatgactcacagactgggcaggggagcctggactgaacgtgggctctgcagagctgtctggacacactgggcttggtgcatctgcggaccagcggctagcatgtttgttctacccagtctctgtagctgctaccacccatgctatcacctctaccagtagyccccaaaaataaatagacataaaatggttttcttctcacaaaaatttgtaagtagtgtaaaagatattatatattgaaggaattcttgccaccagaagaattcactgyttgtattttggtttgcagacttgggctacgccaatgtcaatatagatttttatccttttttttaagagtttgcccaatttttttttagggcaaatttctagaaatctctttttttcattaaagggcatctatattttaaatttctacaatcattgctaaagtaccttctgtaaggcttgtattaacttatattcctataagtagtcctctttctctgtgtccttgcctgtaaagtgaattagaagttgttttaatctttactagtatgggaggcaaaaacagaaacttatggttgttttagtttgtgtctctttgattatcagggaagttgagcatccttacgtgtgatttttggacactttattgttgttgttgttgttactttcctctttgtgcctgtaatttattttagtgccagtggtggctgctgctttcagaccctcgccacccaggacaacagctcagctatgccctacttgccccgcgtcagctggagttgaagcagtgcccttcacttaagattaagcttcctggccaggcgtggtggctcaggcctgtaatcccagcactttgggaggccgaggagggtggatcacgaggtcaggagatcgagaccatcctggctaacacggtgaaaccccgtctctactaaaaatacaaaaaattagctgggcatggtaacggtcacctgtaatcccagctactcgggaggctgaggcaggagaatggcttgaacctgggaggcggagcttgcagtgagcccactgcactccagcctgggggacagagcgagactccgtctcaaaaaaaaaaaaaaaaaaaagatcaagctttctcagagtcagtttcctcatataaactacatgttctcgaaaaagacaagagcttggtggctgaacaccccagcagtctagtgtcccctttgaatccctactgccatcatcttcagagcctggggtgggaacacccatgaatacactgagggccagcaaaacccacatggcccctaggccttcctgagatcagaggagccatcttgaggcacaagctgagattttctcttgctcataacattgagttccaaaatttaagatgtaaacaagatgcaagataggccrgccatttttctttaagatgagggagaaaggtaaaatcatattttgtatgtgtttcactaacctatgctaagaacctaagatacaaaaggcacgggggctgggagatggggatgggagttgacaggggaacattatatataggtgcttgcaaggaagttgagaaaaggtatgatatgaatggtacaaaggagggagtgaaaggaagaagagacagtgcagatgataagtcatatctgcggaaataaatttagaatgataatgaaagcagattccctccctcatattctttggagcatctgcctgtctcccctttcattcccaccacacttaatgtagtttattaaaaaacaaacaatgacagagggaactgggaagtacaaaacacacagtgaccggaggtgtaactgrttgattactgttctgactcatgtaattttgtcgactcrtgtaattttggcactcggtgtgagctttttttctgtaagaattgaataatcaactacagcggacccttgtattccaggctttgatagttatatatccataatacttataacagataatatttattgagagccagacactgttctgagtgctttacctgtgttattggcacttttgattatttcaacaaacttgatctccatttaacaattgaggaaagagaaagttgaagtaatttgttggagaccacagaactaaggtaatttgatagccaagtagttgaggctgtcatgctgttattctgttcctctataatgctaattatttgtgagtgttttctggaaaaaaaaaaaattggctgcaaggaaaagaaaatccacctgagctagcataagcaaaaataaaagagtattattagggtaagagaaatgaaagacagggttcagaaaccaggcctcagaaacaaatggtaacaaggcactctacactgttgggattctgccctctgcctccctgtctttgctgccaatcttactctgttcctgcagtccaaggggctggaaatatggctaccagctgctcacaagtttgcattttwtaggtcccaccacttwaagagctggctcttgttcagtaggtcccgtttttacaattccaaagaagagaccttggttggtccacctgtttagttaaacaatcgctgtggctgtagagcagggtcgcattgggagcagcgctggcaacctataaatatgtggtgcagaaagagagatgcttgagcagataaataggagcccattcctgtgagtaactccatgctttataactaaagtggtctgccgtttctcagaggcatgaatctgaagcctgctcatagcaagccctgccaatgagctcatccaatgagccccccatttgcatctcaagacggttttagtctccttttaaatgataaaattttcaggacatattatagtgttggtcttcatgagactgagacttcatgacctacatcagtatgacatcacttcccaaagaaacatgaatccatatccaaaattcttgcaatacataatgtaagcrttcattgaagtttcttgaagcrgctagaagaggaattactacatcatgtaacatgtatcaagacctctttagaaagcctcattagatatttctcttcttcctccccacaaactgtcttttctcttaatccatctctgatatccagrgctgtttgttgttattgctgctgctgttgttgttgctgctgctattttggtttttcatttgtttggatttttctataccctaacttctatgaatcactctggcattttttagtatctgtcattttttttctactaccactcagatcagtgaaacaggcataggataatagaagatgaggaaggcggaaagctataactattttttttttttttttgccttaccaagttttgtctcactggaatcattgcagttttccacaaagaaggggacatccccctgaggcacccagagtttcttccagttcatgtttcaacacacacacaccccgcttccttcctgtatcctgctgagctgagtagaattatctccaaggccttaagagcattacctctccataaaattgggtgatctggagttgtcctgaatttcagcagcaggactcaaacttcctttattcagacgctgtggctcgggtcaasatacatattagccagaattatgtttacctgtgaataattggcagcccaatttgcagkggcttacattaataggggtctattttttactataacaagaagtctggccttagagagttgctgatgttggtttagcagttccacttgtcaagcactgatcccaggagacaggaatggaggacgaggagataagaaagcaggagtgaaagctgttaccaaaaaaaaaaaaaaaaaaaaaaaagttctccaggtggatgactaggcctgttcctgttgtgatccctccaggacatctgtacattgtccttcagaaatgtccaaccaacagatgaaagaaaggtgcattgatccctcagtccctgaccccacattgggcaagggctgccctgtgggatgtcaccagcacttccagctgtgcatgcttgtttgctgagtagggttctggatgccttcatgcgggggtatcagagtggcctaggggcagagcacaagaggtgctgagggcagcttagtggatgtgggctgtcaagatgtccttgcagggagttgcgatggctggagtaaaaggtgggctcctgtgtggataygatgtgggacccaagacgcatctcatacagctcagaaccttctgaatctgaggtttctatgtgcttccttaattctgggaagttctctgttactgttccttcaaaaatgtcatcccaagtattctcttcttttcttttgggattccttctatatcaatgcagatattgtcctccacaatgcttagtttccttttacaaataccctctccttatatcccctccagaatcctttagagctagctctgcatcccaatcttcctacttgctaattcattttttgtctatgttcaatctgtcattcgatccatttatgatatttgttccaatgcatatatttttctacttagtatctccaattggttcttcataacttcttattgctgtttcatgtctatcttccctcaactcttttataatatttgatatgcttattttaatcttcctggcccatcaactatgttgcatctcrgatagctttccaccaggagtctttctctttattctccttggcagtctcagtgtttttccctcagagctcctgttctcctgagggcattcatctccttgattgattaagtatctctggagtgagggctagaagccagggcctccatcggtccccttcctagagggccatttcaaggctgagatgctcaggtgctactctctgggcttaatcacttcatgtagggcattgccccattccccaaatgggtgaccctgtccctagggacttcgtcgaaggttgtgtgtggaggggtgctggggaaggcaatgcatgcagctggccagacagcttgagcatttccttatcagtctctcatggagcagaagtttctgcctcaccacgtgctctttagcagccattcagtggcaatctggcaatgcacaagaccaaaggggtagaaataaactcgtgctcccaacccagaccctcctctagaggccaacttccattcggggccagcacttttacacaaacatcatgatccaaccaccttctggctctccaagtgttcctcttagtttttccagtaactctggcttcaacatcctccctctcacctccatgcatcttcagaattgacttcaggagtggcagccagcagcctggtcatttctattctgtcagattccctatctgtagagatagggagttcttttctccatgggtacagggtgacctctttgccacaactaataaaagctgcatgtggctccatcttcccaaatcttgtgcagtcacaggtatattatcaaatctgtctcccacctactaatatctagagtctactcctggctggaacagttgaccagtgtgatgaatcctggaagcagatcctggaagctgtccatgattacataccaggaggctctgactggacccttggtcactggggaccaggcccttcctggtttggacctratatcagcaaacggagttgttttctgkttctggggtctactccaagagcctgcgccatactctgccatttgctcaggtttcctgacagctgccacaactgctccttcctctttcttccctctaatgagctccaccaacaatgaaaattcagaccatcccaccagtttgcggtgaagtctaagcttgtttaraaactccttgctataaatcactctctgctgaactgaatcgattgtctctgatcctgtgagctatgttccatcacatcctgccgggggccagctgccagagctcctaaagcacaaacacaaaggtagcaccttcctctcttcttcttgttaacatacaaggaaacagcaaaacaaaaacacctaaacctacagatcgtatcaactcttcaatttgacatatgtatctgaagactatcagattaatctataagcaaaactgaggtccttgaagacttattctatgaccaaatagtaatgaaaaattctgcaggctacatttcacttctggcatttgtctgttttgaagttttgcctttctggtaccattttaatgctcarctacctggaatctgggctgatactgctcacggatttttcttctttctggtagtacatgtttctcaccagcagtcttaaagcctgcttgattctctgtcctactgaaagagctcagaggatgcagttccattaatgagtcagattcatcagtgtaaagatgtccaacaggccaggcgccatggctcatgcctgtaatcccaacattttgggaggctgaggtgggtggattgcttgagctcaggagttcaagaccagcctgggcaacatggcaaaaccccatctcaacaaaaagtacaaatattagcyaggtgtggtggtacatgcctatagtcccagctacttgggaagctgaagtgggaggaccacttgagcccgasaggttgaggctgcagtgagccaggatcgtgccactgcactccagcctgggtgacgaagtgagaccctgtctcaaaaataaaaataaaaatgtccaccacagacctcttctaagtttcctaaaatgcctacttttaagaaattcagtgtccttgaaatctaggtttacaaaaaaaaaaaaaaaatgctcatcttataatttccaaaatcatctcttcaacccccttgaaatagggaactgatatatcacatccccatgtggttccacccccaacccaggatttctcccatagtgataattctgatcccagagacgtctccacagttttctgattcgtggatgatcactacaagaaccatgaatgcttgtgtcaagttgagccccaactcccttgctccaatctgtccagcagctgaacaatggtgaaagttttccttggctgcattctggggtaataattttatctaaggtacagctgtgcattgttctttaggtcgaaaatctgggacatttgcccccaaacgtaaggtgaattaaaccagactgccttgcaactgcctcaaagtctgtctcaacacagtgactcatccaagagaaacagagatgtgtcaccaaaaatatctataawtttttttcctgttttactagaaactccttagggatagagtcgagggactcatgctgtgcttagagctaaacttcctgaaaatcttctcccagggtcctggaggcaaaaagggcagtgcagaatgctccttagaagggagtgtggaggaaaatgcatgcttatattagagaacccatgtctctgaaaccctggaattcaaagagctttctggactatgccctcactggattcggaactaccaggctttcatcatcaagaatccatcttgccagcmtggggctgaagtttctgcttcctgaataccttttcccccatcaacttccttcagtaactagtggagaaaaatgaaaatattctgggaggtggcatgacagaaaaactgagtttctaatgtcaccctttgcaatgcatcacacacatttagatatctcaaatgcctgtgtctaggtgccttgtagagtgaccaaccatcctgatttgcctcggactgaggggtttactgggatgcaggacattcagtgctgaaaccaagaaagtccaggacaaacccaaatgaattgttcaccctagtttcatgctcaagatgaatagagacaccaaaatacaacaaagataaacatcttgactgaggtgtatgtatttctgacagccataccgcatcaaagagcatgcaccgtaattcttttcagaattcccctcacctacagaccatcctcagcctcaatctttacctgtccacatcatcttctcctcatcttttggatatgtgtcagcactctctgcaattaattgtgttgcatcctgtattccagataacaatgccagaaatggatgcagattttggttttggctataagggcttggttgtgaaacatacatatttatattgagaggaaagtagtggggagaagaatcctacctcctttggctggtttgtgcaatgagctcaggactacacatttagatatgaagtaattagaaataatgaacctctgggattaccccaagacttccaggagacagagtgtgscccaagtcatgctggctacaaagactagaactcgttatggataaaaatgggagaattcgattaaactaattcacgggtgtatatccaaagagtatttaaaaacatggtagtggtgccacataaataatacatagatcctacaaagtcatgccaacatcgtgaaaagaaatctgagtcgtagagctccacatcctgctgccctccagacctaatagtgttattcttctggtttgtagctgggaattcatttaaaggctggagaattcggtttcgactgttctttctctgcttaagtcatgtcataagtaatgtccatcagatgtaactctgtggatggcgccttcactttagcagagaatctccagtctcaggaagaaaatgaaaagtgtattttcctcttggctggattcctgcctcctgtcttttttctctatcatattgagcactctactggtcttaatcattttttctaaaaagtcctggattgtattattttttaaaaagacactgtggactctgtcactcatatttttaaaataataatagtaataaattaaaggaaggcctatgtcagtgaccatgctgcgctagggagacccttgtgcccaaaacaacagctcccagctcaagagagggagagagcagccacactggctggcctagtcaatgtttttttgccaaagatttctttgtatctggaaattgctcttatgtgtatcatacatgtttgaaatagctttctccaatttgaaaaaccataaagcagcaataaacaaatgggactctgattaaaaaaaaatactttgtaagtatcatgcatacttttacaagtgtttattagatggtatcattttgcctttgcttttgcatagtggactctcagtgctcatgtaaacttccagatgtagttaggtccctagaccatccactaacttgggtatatttttctctattaactatttaaaaaaaaatcacaggaaaagaacctaatgctgaaaaggcagccaaaagtacaatgaaatgaaatcaatcctaataacaaagacttctcttctttccaaaagcatgcgttcctccccagtcctgcacggtaaaccacatcagtgtgggatggtaacatttcagtaagttatttgaatatcccaagactaagaccatgaataaaaagcaacagcagcaagattgccaataggctgtgggtatttaaaacacaatggcagaagattcctcgaatacaagggatagctagagccaataagccccagtgcatggatattaggaggttcattgattagggttacatgattaaagaaataggctaagggaataaactgctgtatacagggtttagctcatatttcttgcaatgcattttttgagtacttttgccctcgttcctgggaaagatggtaagttaaaaaaaaaaaaaaactttataaagcattacattaaaaaattcatacaaaaggtactaagaatagaaatcacattcatgcttcagtttcacacactttctgtcccaaacagcatataaataaatatgatttttgtaacagctacattgtggcatataccacaaagggctcgggtatcaggcaagggaaaaacaatttatcttcattaccatctatccacacatactttggtaatcatgaagacatttctccttacaatttcacaaggaaaataacagaacttgggctctgggtgtcagtatctggcccgagtccatttagtggcaaaaggaattcttaagtactgacattacatttcaacggggcacaaagagacaggatttacattccttcttggattaggttttgttttcayactcattctctttagataatcaaaagcatgtgtccccacaccttgccagttccaccaagggatcctcagcacccatctcagaggggtctgatgtgacatctgaaaggcraygttgctgcctccccagccaaggggggtgcttgtaatttctcctgcattatctttgaggtatcactcaccaaagcaatgaagggtaaccattccgaaycccaccagtgactccttctgaaaaacctatcagtaggagccttcagttttaaataatccctgccttgtagtcacacaggggaagaataccccagtcaatttatgaggtctttgccttcaagttgtagatgaaaggagtttgttgctagctgggaaagcttatttatgacatgattgttaaggaaggaatggtagtgttcccatttttttctttttccttttttaagccatccttgggttttgatgattgtgacagtattttttgcctatgttttacatactccttttggccttgagtttaaactgggttgtattcaaggagtcaactttaattttgtgaccaaaaaaaaatctgtcatcagagctatcctgccttcattttgagtactccccacgctatcttctctttaactctaacttgttttattttgaatcgcacagagaaggaatttgaatggctgcatgcatctttggagatgcttaaaccttttctcattttgggtcttaaggataagtagatctacatcagaaaaatattaaaggagggatcctatattctaaaaatataaaaaagtaattcagagtagagtagttcatcaaattaaaagactatttgttgacttcatcctctttagtgacaaaggagaatttagttgcacttctttcagtcagggaactccactgtggatactacagaagcaggccagatcatgtatataatttcactaggggagaaacagatggaatttattttcttacctgagttcaccaggttttctcatacctcggcctctctactcctggtttctgattggaatcccatatggtatttctcaagtgggaggcaaatccctaagcatttgcttcaaaatcaatgaaatgagcaggtagggtgcttgagaaaaataaggattcccaagccccatcccaagtctgctaaatcagcatctctaacagtggctccaggaatctgaatttttaacaagcttcccaggcaattcctaagaccctaaagtttggggaatgactactgtgatgtcataagagattctagaatggagactggcaggattgctgttgtttaccccaagaccagctttgccctcatgcctcaagtaatagagcccctaagtcttggccaggcacaactctcttactgctaggtatgtccgttttatggttccaggccaccatggagatgcaagcataagtgctgtgagcagcttaaaagacagttaattgacacacgcacttgcttcctgcttcttctttcttgctggctggaatcggggcatcatggctggcactcaagcatccattttagaaaggaggcaacatactaaaaagcaaaagggaaagaatttgacaacaatgagcctgccataacaggcccaaatagcccaactctccatttcttctatacgatagagaaataaatgtctgcctggtttaattcgtaagtctctcattttggtgttttgttttcagttgtgraatggagtagggtagayggtatgtgcagctaagcctaaactaaatgatatagactccaagaaaaaaaatgtctgctttttcttccataatcctagaacctgcctggtactgataagctgatttcttataagcaagcagtccattgtgggggatgagatatggagatgggtttccatgcttgcagattcacagcctttgcagctcctgggtcaccagaacaagactaggggccggccagtcaagcrgtaggaagattatctgcaaccttatgcaatcattagaattaaagagagtataatgaggggatgaagagcaaagactataggcagagtcagactccctgggtctgaatactgggccctcactttttcgtgtgcatttcagtaaattgcccaactccttcgaacttcagtgtccaacattataaaacgaggagacttagaaaaccaaccatacaagacttactatgaggcttaaatgctatacgtaaagtctggcatctcaataacaaattttctcaataaatggcaaatattatgatggttatttttgaaaactgtaagaggaaagaaaatgaaacatcaggaagtgtagttatgaagctccctccaccagctaccccagaacctgattttcttccaccttgagaaataaatactgtaagcagttgagttttggagagagaaagagagatgtttaaataggattttgaagtccctgctcttgctttgcaaagaaatcatcagtaaagttctatatttttcttaggaaagaaaataaagtaacaccratgagaacagggaagtggaataagaggccrctacgaagtgagaggtagcttccagtcctaccacctctgattagtttattggctggatgatctcaaccaagtcgcttatactctaagcctcagtttccttttctgtagaaaggaactcatctgcctcagatgataactgagataagtgaatgaaataacaatgtagttatatgtaataatcatataatttggaatttataaagaactataactttctatggttttattacatattcagactccatgctacattcctggggatagcagaaactctctcatgtaaatcttctctgtgccaattaatctcaacttcagggaggatctgggtagagaagctttgggcacgatcatctccagttgctgactttctagggttgtaagggccatactcgtacaggtaagccaccagaataatatatcgaagcatctaaaaaaattttgttacacacccatcttagtctctatttaacccctttcattgtacaaaaggcaagtgctttgaaaggccagttataatcaagtattaggaggaaatgcagaaatcactttcaagtaggttggctgtgcatagcatggaggctgtacttagtccatcatagtctgaagctcttagatgacatcaggcatcaaaaatgccacctgtcactgctgcccagccacaagaatgagtccttccctccaaggaaaatactgactgctatcaaatatgtatttacttattcacaagcttccctcccgctcagctcctcactggcgtcaccgattaggtccttataaatcccagtacagtacattttttcttccacatggatcctctctgtaacactttcaggcttctagaaggcagtgataatttctatcacactcaacatccatcagatctagatgtttaacatgtaatgtgcagttttaaaggatgtggatgccgagccatgacgaggcctgctggctccatcttttctgagtgtccacactgggccaggtctgtatcaggcactgagctgtgaataggaacatgctcacggaggtcacctttcagcaggagatccactttgtacaaagacacacatatctttgataagccgtaggaaagcagagtctaaggctgaaggaagagtttctgaagcgagataacttggcaacttggaggatggataggaactggtgcaaaggccatgtaagtgtgaaggggctgatatggattaggagctgaatgaaacccagtgggctggaatgtggaagggagctggcaggagctggagaaggaagsagcagccaggtcatttggttggcatttaaatgacttttgcttttaatctaactgaaataggcagccacttagctgttttaaacagggaactgagctaatccaacctgcacatgaagatgatgtcactgctgttgtagggatagccagttaggargctcttcaggtgcctggtctggaaagagttgtgtgattcaggttgggctgataactgtagttagagaagtttggagatcaactgtttcttatactgtggtgggaaatctttcagtagaaccaactcagatctatggatccttaacagctggaggaagacagtgatgggggagtctgtacttatgacgagctccagggttatcttacatacacaatgttcgaggcttggactgacacttctgtatcttcttattgctagtgaattccttaaaaggactaaattcatgagtctggatccaccccaaacctagtctcctgaaggtttcctaaaacatcagatttaactgtcactagaatggttgtccccagtgaaaagcatagttctcctggccaatggtcagtaaagtctgcactttaagctcttccaatagtagtgatgagtttgtgcaaattggtccacacattttcctgactcacaatgtaaatgtttaagactagtgggcaaacgcacaacctgctgacatggaacagagcaaaatcagctgactccaagccacaaaccaccccagccccatgctaaaaatgtcattaatgggcttgattaatgatacttaattttgtgtttgctttaatggtatttcaataaaaaattatctggctgggcccagtggctcacgcctgtaatcccagcactttgggaggccaaggcaggtggatcacgaggtcaggagttcgagaccagcctgaccaacatggtgaaaccctgtctctactaaaaatacaaaaattacccaggcgtggtggcacgctcctgtaatcgcagctactcaggaggctgaggcaggagaatcgcttgaactcgggaggcagaggttgcagtgagctgagatcgcaccacygcactgcaacctgggygacagagtgagatgctgtctaaaaaaacaaaaaaaattacccttcattgggcaaaaaaccagggaactcaaccaaaaagatgtccaaattatagtgctcagtgaaaaaaatacatcacagggtaataaagtataatattatgccacagtcagatttgcatttgatagataactttgtgcactatgtagaggctggcttaaggaacaagccaggggacaaaacacatggcaccctagtctgtgcggccagcctcacacaccctgactttctgtccttttgggaaaagacagcagcatgcttgttaatggaagatcctagacttcagatgcagaccctcaccaaatttctggctaaaccatgggtctatacctcaaaattaarccacacagtatatgcaaaaagtatgagtagtaaaagcaacaaatgttactttcccccacttcttttaaaataaagtaatataatattctaagctagtgattctcaaagtaggctttgaagttcattttcatcaaatagctgagaacacttgtttaaaatacagagagcctgtgctggccctctgaatccaagtggtggggcctggcaatccacacgttgacaagacccatttgatctgatgcacacaacttgaaaactgcaattccagactagcagatgcatatttaattattttccaattgtttcaaatgactataagtttgctttgtgttatttttctcttccctagccattgataaacctctgaaagttcagcctaggcttccaccagacaacctagcagagggaaggctcaataaacaatgaatcaatacttgattgatctatggcatgcaaattatattacgcaaaacttctctcatcactactaaaacttttccagatgtacagtttattcactgttgccattgtcttacaaatccttatctagagtttatttctggagagagggtaaaaatccctagcccgcaaatgaggatctatggaactcccgctggggccgctacrtgacacaaaccagagtgagaaaaaaggtgccctgctcctattttcagctccttactccttccaccaccccagtcttgatagttaatcctagaaatttttctcatttgcttactttaagctttgctgtttatggaaatatgcctttctatctggaatttgtaaagaccatattaccatatttccatatttccttgttttggtatgtaagtccctctctcaaatgtatataaatcccgtaagtgatgaaaggaattttactaaatggcccttttgccatttgccaacctctctcttggcaggtgtgacccaaggggtccatcactttgttaggcggcagataagcaagctgtgaattccagtggcctatgacccacctttgcttctcagaagcttcctcctgaatttatgtagggatatgatgctgtgtaaatctaccgtaaaagtcctttgcacacaaaagacctgattcttcaggtctgcgaacacatgcttcttctgtttgacttatatgggcaccctagggtttgtatttgcgccaaaaagtggaagccaagctttcattgtaaacagatggtgctgctaacaaggaaagtaaaaaattcttccagtcactcctcgcaccagagacctgaagaagattstgctttaaaaacaaatgaacaaaactatcaaatactccctctcccctattccataggctctgggtcaaaacacacatacacacagcccctcacatgcagacaaaatctggtctccattcctcactttccccatcytcctccctatgccaaattctacattcctccagtgtagatactataaatatwaaaagaacaaactcaatcccgaatcacgagggtgcttttctttgcatgaccacaacataagcactggtccatcattttgggatttttatgaagccttgaagaatgttcagaattccagtcttgctcaaacaatgtctctcaccagtcggcatgattcagatgttgagtttcaggacaacctggggatttctggttagaagaaaacattctcctgaagtgtctcaatgtgaaagatttccatgtatttcccccttttttctttcagcccagaagaaaagaaatgtggaaacgcgtatgttttctttaacatgagggaatttgaagttgattgcaatctccctgtccctaagcccaaaagagaagtagcattattatgctgtaatcaggtcctttcttaaattcctccattaggtagcatcttattacataaccactttatgcttttaaatctgaatatcgataacaatctcctgacagatcatacttccggtgcctaagttagaaagcgaatgacccagacactctgagatgtcctttgaagcattccagaggaaggggacactggaggttatccagtcacccgtgccttggggcaagaccacactcaagctgttccaaagaaatgaggatcccttttatttttgaagtttccccagagacgcagattccacagcctccctaagtaaaccctcagtgcttcaacagcattaacattttcataggagagttaagcccactatcaaggtacttattattgaattgacactctgtcctttgagccttagaaaatatctacatcaaggcctttctattgtatacatgaaagctaaattgtctatctacttgtataagataccatgagaaaatacacatttttggaaaccttacctcagtctctgccatctgtttaktggggatacctgctctgccaaactcacagtactacctgaaggatccaaagagatcacatgtcaggctgcccaaggtactatttgtatcaccacctaaataactattctaaacctgaatctggaagtagttgtttaagctactttattatagaaataacagggattcctgaaataatactttaattataagcctaagttacaaatacaaacatgtggttcatgaaatatcactttaatgctcacataagcaaactatgtgttggcatctcacaaagcaccagggaaaaattattcccctgaagatgcaggacttgctctgaagagcaatggtagaaagctatctccatggtttagcaatcacagatgcagggactgggtaggtgaggatggaggcggcgaactgcctaacagaaggaakccctgtacaagagagacacacatagatcacagtggttcagaaagcctaagtgtgaacgcataaggaaaggcataccgggcaaacggaactgaaaaagcaaggttatgaccttactctcaggtgawgtgtaattcaggccagaaattaatatagtaagaaaaggggcactttgtaatgctaaatagtgaaactcaaaatgaggctacagcaattatgaatacacattcatcaaacaacacagtagccactgtgtaaagcaggaattacagaagaggaaagaagaaatagacagaaatgaaaattcagtccatgataaataagtcaacatatcttaagttcggaaaagacataacataataagatacatgttattcaactctgtatcctgaaaatatctccatattatctaacatcattttttcaagtggtcaggaaacatatatgaaaattaaccataggcaaggcccacaaagtcaacaaattccaaaagatagaaacattacaaataatatttttggtcacaatgcaataaaacaaaaaattgttatcaaaatctcagttatcaatatcratacagaaaattctaaatgaatactggcaaacagcattcactagcacattaaaaaaagtaattaccatgacgaaatggagcttgttgtaggaatgcaagaataattcatggccaagaaatttattatatcccattaaattaatagctctatggagaaaaaaatatatgatcatttccaaagataccaaaaagagcatttggacaaaagtcaatactcacacctgatccaccccccgcaaaaaagcttctaagaacaaattaatattctcttagcataataaaatagatcattctcatcccaaagcccacatcatgccctgaatcactgggcataggtaatcactgaagccatttccattaaaataaaaaataagacaagaatgcccactcttactactgttatttaacatcatactagacctaatagataatgaaatttgaacagagaaactaaaagtataaaaattggagagcagatggttaatctttatttttagattacattatatagttagaaatacaagagaattgggaaatatttataaacaatatgagtaagatagaatggcacacaaggaatacactgtaattagttgcttatatccagctagaagatgtaatgagagaaaagaccccatttacaatagtaataacaaagataaaatacctatgaataaacttaatacatgtccaagacacatatgaaaaatctgtaaaacattcccaaaggacacaaaataagatttgaacagatagaaagatctacctttttcttagctagaaagacttgataacatgaagaagtcaactttctctatgttaattatttaaatttaattctgatgatacaaacaggaataagagtttctattattgtttactctgaagtttatatggaaaaacaataaggaaaactgggaaactgagaagagcaatgagaaacgatattaaatgtataatagaagtgattagatattagatattaagaaaatattaaaaattaaaagcattgataattaactggtgtggyggtagcacccaaactaaaaaaaaatcaaccaaggaaatataatgtccagaaatagactcagctatacacaggaatttaatagatgatgataatagcatctcaaaacagggtaaaagattattatcatgaagtggtggtgaagcaaagcacaggcaacagaagcaaaaataggcaaatggggctatatcaaacttaaaaacttctgtgtatcaaaggacaaaatcaacagagtgaaaggtcagcctatgttacagaagaaaataattgcaaatcacatatccaataagggattaatatccaggakatakatagatagatagatakatakatatatatatatatatatatatatatatatatatatatatatatatatcctataaggggttaatattcaggatatatatatatatctcctacaactcaacaacaaaaataacctgatttttaaatgggcaaaggacttgaacagacattcctccaaagatgaaatttacatggccaacaagcatatggaaagatgctaaacatcattaattactagagaacagaaaatcaaaaccccaatgagatatcacctaacacccattaagatggctgctatgaagaacacaaaaagtaacaagtgttggcaagggtgtggagaaattggaactcatgcgccctgttggtggaaatgtaaaatggtgcagccactatcgaaatcagtctcacttctgggtacatagccaaaagaaatgaaagcaggatctcaaaaagatatttgctcatccatgttcatagcagcattattcacaatagcaaagaggtgtgggcaacccaaacatctactgttgggctaatagataaagaaaaagtggcctgtaatcccagcactttgggaggctgaggcaggcggatcacgaggtcaggagatcgagaccatcctggctaacatggtaaaacctcgtctctactaaaaatacaaaaaaaaattagccgggcgtagtggcgggcacctgtaatcccagcactttgggaggccgaagcaggcggatcacgaggtcaggagatcgagaccatcctggctaacacagtgaaacctcgtctctactaaaaatacaaaagaaattaggcgggcgtggtggtgggctcctgtagtcccagctactcgggaggctgaggcaggagaatggcgtgaaccgggaggtggagcttgcagtgagccgagatcgcaccactgcactccagcctgggcgacagagcgagactccatctcaaaaaaaaaaaaaaaaaaarggtggtgactgggcactgtggctcatgcctgtaatcccagcactgtgggaggcagaggcgggtggattgcttcagcccaggagatagagaccatcctgggaaacgtggcgaaacccatgcctctattaaaactacaaaacttagccgggtatggtggcacacgactgtcgtccctgctacttgggaggctgaggtgggaggatcactggagccctggagattgaagctgtggtgagccaagattatgccactgcattccagcctgggtaacagagtgagaacctgcctccaggaaaaaaaaaaaaaaaaaagtaaatgtggtatagacatacaatggaatattattcagccttaaaaagaagaaaatcctgccacatgccacaatatggatgagccctkgaggatattatgccaaatgaaataagtcagtcacaaaaagacaaatactgtatgatttgcggtgatkaaagcagtcaaagtcatataaacatggaaaagaacagtggttgccaggggcttggaggaaggagaaatagaaagtcattcaataggtacagcatttccattttgaaagataaaatgttctggagatcttttgtacaacarcatgaacatactyaacactacagaactgtacacttaaaaatgattgagatggtatattttatgtgttttttaacaacaactaacatttaaaaaattattctttttgaaagtggtagtggggcaactggatcattaataataaagcaagatccataccttaataccttatacactaaaccaggataaaatataaatgaacaggccaggcacggtggctcatgcctctaatcctagcactttggaaggctgaggcaggtggatcacctgaggtcaggagttcgagaccagcctggccaacatggcgaaaacccattyctactaaaaatacaaaaattagcctggcatggtggcgtgcacctgtagtcccagatactcgggaggctgatgcaggagaatcacttggacctaggaagaagtggttgcagtgagccaagattgtacaattgcactccagcctgggtgacagagtgagactctgtctccaacatatagatagatagataaatagatagatagaccaaatacctaaatatcaaaaataaaatcagagtatataggataagayaggcctatctatgactcttttaaaaactgataaattcaattaaataaaattagaaacttttttaatgtcatgagatatcaagagccaagtygaaagacaaacggcaaaatgagaaaacaatctgaaactcctaacgcaaagggataatctccttaacatacgtggagtttcaagaactgaagaacaagaccaagaacccaataaaatatgggaacactatataaacaataaggccacaacaaaggaaatagaattggctcttaaatatataaaaaacttgctcagcctcactcaaaatcagagaaatgcgagtcaaaactatcttgagacatcacttttcacctatcagactggcaaacatccagaagtttgattgcacattttgctggcaaggccgtggggaaacaagcaccatttaacattgctagtggaagtgtaaattggttcagccctttgaaaggcagcttggctgtatttatcaaaattcaaaatgtaaaatccagtaatcccacttgtgggaattaatactatagataaacttgcacaagtgtaaaatgtcatgtgtggacgtttgtaacattgtttaatagcaaaagattggaaacaagtcaaatgtctatcagtgggattctgattgaataaatcgtggtgcatttatccaagggaatgctatgccacattaaacacaggcatggttactctgcactgatatgcatgtaagtctcatcgtgtccgtcctcttctcaagaccctccaatggctgtctgttgctctgagggtaagtcctgaaatacttacactggtttagcgggtcctacaccatctggctgtcctgtctctctgacttcatatgacattctacatctcactttctctgtttcagccacattgtcccctttgctrttcctcaaacgtgctaggcatggtccctccttaaggcctttgcactagcttcttctgcctggatcaccatactctccaaataatcccaaagctcactgactcccttaccatgatcaagtctttgctcacacgtcactgtctcaagaaagctgcccctggccgctccgttttaaattaaaattccccactgacatccccaacccccattatcttgctcagtgtgttcaactgctcttattatgtcctaactcaacacagaattaacttgtttagtatgtttgttttctgcctaatgtgccccttgcccaagatataaatgccaagggacagaaagttttgtcagcttgtcccctgctgtgttaccaacatacacaatagtctgtggcatgaagtaggtcttcaacaggtgtttgtttccaaacaaatgaattaatgaacatacaatgtggaaaggactataaagtgtatatgtatttaagtgaagatgtaagacgaagcccagttattgttctgcctatagtattttttttttttttttgagatggagtttcactcttgtcgcccaggctggagtataatgacgcgatctcagctcactgcaatctctgcctcttgggttcaagcaattctcctgcctcagcctcccaagtagctgggattacaggtgcccgttgccatgcccaactaatttttgttttagtagagatggggtttcaccatgttggccaggctggtctccaactcctgacctcaggtgatccgcccacctcagcctcccaaagtgctgggattacagacgtgagccaccgtgcccggccctgcctatagtatttttaagaaataaagaaaaagtgtaagaatgtatttaggccaaaagaaacctggaagtctacagagaaaactattatcagtggttacctggagggagatgtatggactgggcatatggggaagagtggtagaaaggagactgtggtgcatgtacttttatataaattatgtaaatgtattacttattcaaaacattaaattaacaaaagaaaaataaaagctgatgtcagctcccaaagaytgtaattcagtagttctgagcagggctcaggggaatctgcattttcaacaagctcccccaccctcccatcccttcctgggtggggtagatcaccctcaaaaatcactgtcaccactacctctcctgaccccaaaacgccacaaaccgcgtaacgttgggatagttctcatttggagcacaagcaaatgggcaggcacatcacagaaactaatggcagagttttcagtaacatttgacaccactaacagctgccacccaaaaggcagcctccttgtgtggaagaacagcagaaatttcatctacccttcagtttcatccccacaagcaagcaggaccagtaaaaggagtgtcctctctgtctaagacatttatatatgttgggtgtttagactaaatttcagacttctaaacattcacaggtttagcgaaagtagttggaggggcttcttcagatttctgcgctcatggtgatcatatactgaaaccctccaaatttttccttcctctttcgcccaggcattttaattaatacaatgtccttcctaattcacagaggaaagatctttctaagaacccttgctggagatgagaaaggtggtaaggatctgaaatgtgtcttagcaagactcacccaacagggccaccctgcttcattgtgatgcctttcagataaacgaagtattcggctcttgttattcaatgaccctaataaaactttacaactgaagtgtagaggaaaaaaataaataaaaagatctaatgacatacaagaagggactgaacctgtcaaccccagaatattttcagtctgaaaagcaacctcrtccttattaactttacattgattcccaaagagcggaaaatttaataaggaagaaaaaattcaatatttcatgactcaccacttcctcgggataataaatacgaactaaagatatatacactgaacgcttttaacattttattttcacttcaaaaaatactgtttgcactatctctactattgacctctcaagatgattctatttccggaacgcattttttgatatggtttctaattcaaaaatctgtcacatctttgatatttcataggctccattaaaattaatagcttcatgggtccctcatgagtttcttccttaaattttcaaacggtttgtggtctgtttctcagactggccaatgacaagcagttctgggactggaagatggaagtagtgaaataatctttaaaaatgtgtaaaaattaagcactgtctgccaggggctttagagttggcaaatagctaggtctttattaaacggttggttttgtttctcctgttgtttcttcctgatatccgtctgtgtggtaactgagtcactatgacataataccgcagagaaagactgcaggacaaccagacgtacacatgttcatccctcaatgagtcgcaaccttgggtctgttccctagacattggtggaaagacttgattaatggcagacttgttcaacataaaaaagaacaaagaccagatttattcttggcattccctttcctaggggcttacttgtaatggggtaattaatttatggctttgcagtaaggcggcatcagaggagcaatttaactcacaagaggtaacgcagatgsagagtacaactgaaagataccttgtgtggaagggtacagaaggaacctcaagctggacgttgatttcttttatcagtaatacaaattcactactagctgcttcttggatttccccccttgagagctgcaacgtttcctaaatgaacagaggtctttagggaatgcctcaaaccacagctgaatggggagtggctttagaaatcgccggtggaacttgcctgttaccttcttacaattccccccgcccctgggcaacgcaaaagccgtcctaagtgcgataagagcatggagtgaagggagttatttctggagtttagcagcattcctccccaggacacaccctctccccctccccagcagcccggcactccgacacactccgcgcacacgcgcccctcggcgagacgcggcgcattcgcgcgctggagaccggcggcctctcaccgagcctgagtcgtggccgctgcgccgccaggaggcttcccgggagccggcggggcccaggacctctcgagcgcagcaggcaaggggccggccttttggcagcgcggctgccagttaattttctccgttgcattctgcaaacgagatcgcattcagagcccagaagttgcaagctgggaataagcgagatctgaaagacccccaagaggagcttgtttgggagtgggggcagacggcgttttgcgcccaactggtaagtggcagcattaaatctatgcagacatggaggaaataaagctttgcagcctttccaggcagtggcatgcaagtactcgtgcgaagagtactgtttggggtgtttagttgtagtggactcagaataccgtgttccgccacggttttcctaatcccttcttcggactcctctttgggggttggcgggggcgggtcctgcttcgcgggacttttctgttgttggagttagggtgggggaggggagaaaggcgtgaggttgaataatctctcctacccacctcacccttttttttttccattaaaaaaaatgatacttttagagaagcttctctttcatgtgtttaacttgcctgctgcgatttgagcccaatgagtttgtattttctctaattactttgtaatcggctccatcctcggttgaaatagaaggaaactttcacaaagcaatcaatttctgacagcctaagagctgctcagttgctgaatgaggtctagctggaaacactttgtttctcacaaggttttggtgatttttcccatgagaaatctgggcgttttcacacctgttgcttttcagttgcctcaaaattgtttgcttgtttgtttgttttcttgggtttcacttgattgcagttctttgtctaaccaaatycaatgctactttcccggttctcctctccctttggacggggtccctgttgttagcattcagttggcggtggttcttagggaacaagtggcaggcagaatacaatagggaagaatgcattcctgatgactcctctaccatggaaagactgaaaaactgacattctccattagtttttatggaaagcattgctgacgcttataaatattcaattttggtgagttcctgaaattatttaatccagaagtaaccagcatgacttttacagagagagttcccctaatctatttgcattacaagcatagagaccctggcacctgaacacccccagaatgctgaagtcacctttcacttcactggcaggtaggctactgacaaggaaaggggtgatggaatgttaggagaggggcagcggggaagaccccctgagaagggggctgtcctccaagggaccagcatgatttcagctttctgatgattaagaaaatcatcaggatattggagtgtaatttaacatcctagtaggttaagttgaattcctgtccacatgatgaaaaagactttctatcagcccttctcacacttccaagtggagctcaatggaatgcttgtttatttctgttgccgataaatccatgggaaatctctgctgaacccagcaattttaaaaaagcaagttccagcttataattgcccgtataatggcaaacaggttattttcagtaacctaagactcttacatttccccccgcggttgttataggggttacatgaagatgttatgagcatgcatttgagcttacccacccccaactgaaatggaaagttatccttgggtgtctgatggaaaagattgttgccagataccttaggaggctataaaataacatgtttctgaaaagatcataactagtagacatgagtgtctatagctactatataatttttcattgttcctttaggaaagagacctactttgatcactacagtgtttacatttgttgtttatttgttgtatggtttttctgagtcttttttcttttctttttgctattgaaaatctcccttcatttaaatgaaatcacagactagaaatagcaatgattgctctctagggctaaaattagaaactacaagagactttttagacacatccctcttgtctcrtggaaggttctgccgagttttctttaaaactcccacttaagcaattattgtaagatgatgtttactctgtaaaatagcatttttatttggacaatttttttccatcaagctttaatcatactttgccaatgcatattgaactttgtttctctgaggtgcctaaaggsacatccaatacatttaccatcccttcaaagtctgtatacttagctctttgaacagtttcttaaaaaaatrataataataaataaacaaaagctccaatggcacttgcaagagacaagactgggtcctgtgatgtgatggcagatggcagttgcatgagctttgtttatgctcagaacaagctcggtgtctcttaaattaatcatgaattgaataattgatttctcacaccttgggctgcatttaatcttcagctgtacatttaaagataggttatgattgaggtcttgttcacttggacgtcctttcaaagcctatcaagtgattttacagttgggtcatttctaatcgtaacacatattataaaatgtaatgacataaacttcgagctttcctggcttttcaatttccaagatgggcttcagtgaccttcccatttgttggtcagccccaaagatggtggggctaatggatacagtggtttttctgtaaatgtaattaaacgtgcctctgccagctgcctgtggtatttgtgaatgttttcgtaagaaaagctgttcttcgactttatctgcccactgtggtttgtggcatgttgtgctattctgcagccttgcagtttttttcctgaatgattgggctatgatgtcatgtgctatctcagcgcagaaccttttcaaagctttgctggggtctgtgtgcctgagcgaggggagtggaggctccctcagagcgcacttggtagcgactccccgtctactccagcacattccatcgcctggagaccaaagccaccaaatgatttgcggtcagagtgatttggggctggttagagatgatttaaaaggaaggttatgggcatatgaagtgtagcgtaaagaaaatatattttactactttattgagaccacatggctccaacttgaactttttttttaaacatggaaattgttggctgaactggctcacagtgttttttccctttttttcatttttattgctctgagcgaagagctgtactccctatttattatatgcttgacctctccattatttctgaaagtttgaaaagctttttatgtttaaagaaaacaggaaaacgtaggatttatctgttgtgctcttcaagggccaaataccattgccagagaagagacccaactctctccaataactgaaagaaggtttctttctcatgtcaagcttgggaagccatcagttatgaaagagacaagggccagtctgtcccagggtacccgagggccacagcatatcagtactgacagtgtatccatgtctcttgttgactgggagagatggttttgctcaacctcctaagggttcaatataccctacgattaataatggggccaaataaagcatggtcgatcttttccaatgccagaatggtgatgctagggctcagagaccaggggctccttctcattagcggtccatgggaacacataacacttgggtgcaacacttcgtttgtgagactaagcagccatctcctgcctctcctatgtgggctaccacaaactggcacagtaaaccacctattacctctgaacaggttcccaaatctctgtccagcatgaacttaaagtatctattatcacttcactctgtggctcaggttcatcctatttcaatcctcaaggcatatgccatagtctaatagtccattacaagctatcagatagccagctccaacttgcaattcggtgttatgacactagctagagaagtgccatggaaagcatgtttgtgagcatgcccagtcccttggcagccatcaacccagggtctgagggccatgactgtgatgtaatggaaggcctgagatcttcccaccaacccttcatggttgctggtctgtgatccatctgagccagcctggattcccgcagtttgagtctgtgtgtgtgtccagggatttaaaggaaaacatgtggagaccaaattagtgtggcacctgatgagaaaatcttatagaattggaaaaatgtcaagaaggcaacattgtatgatggaaatcaaactacattggaattgaggatcctggttttgccaytatgtgaccttgaaccagctatttagtaatgtaacattgataaagcactgtattacatttgatcatttccttcccaaatatgacatgtgatcatcagaaccacatttggaagcaggtagggcaggtggcgttatttccattctgcaagtatggaaactggagctctagaggttaatgacttgctcaaggtcacaaagcatgtgagtggtagaatttgacctcaaactcagaacttctgccagacacggtggctcataagcatgagcctgtaatcccaacactttgagaggccaaggcaggaagatcacttgaggccaggagttctgacaccagcctgggcaacatagtgagaccccatccctgcaaaaaataaaattagcccagtgtggtggtgggtacctgtagtcctagctgcctaggaggcagaggcgagaagatcgcttgagctcagaaattcgaggctgcagtgaactactattgtgccactgccctctagcctgactgacagaatgagactctgtcccagaaagtaaacaaaaaaacccagaacttctaacttcaaatctcatgatctgtccaccatagcaagcagccctcacaattctcaacctctatagaactcactctcctcatttgcaaaaatgagacatttggcccagaaaattacaggccattccagcttaaaattctgtgtctgatgaatcactggctggaagggactttaagaaatcacttagtcatattccttgcttccagaaggactctatctaaactattttgaaaagaaaatatcagcccttttcttacagtcccagtgcagaaaagggccccagagagtgtccaagtgcatttgggagtgagaaagaaacgaggagctacagagccagtgctcagcagggtgatccatttcttgggctcagaagcagtgagtcttgcctccctggatgtgaatgttcagccctgagatcaatatctgaagtaggagaggagagtcacaagcatgctttrctggttagaaaggaagtctgtaagagagatcagaaaactggtaactctgtgaagaggaaaagaagagctaagtgactcagtaatgatcttaaagtttattaaggactcctggagagtgcgatgactacaaatcagtggtaatgtttctacttaaagatagaaacggcagaatcctgctcattcagcaggtgtgacaagcagaaagctatgctaatctagccttactttgcttgtatcggaggggttggtggcagaatgggagtgaaaggggcttctccctgaagacggtgcctaggagccccactccagtcttcccttctctctcagcacagttctcagccggctggtgtaccagttagtgtctagtaacctttctaggacaagggactaccagtagacaactaccagcaagcacagcaagttgcaagttcagtctcacattgctcagctaacccggttataattttaaaaactgatttggctccatgttcttcctatgtcactcccatgaaatagatgttactttttatttaaaaaaaaaaaaaagtagtgactgagatcagaagacaagtaattatcacaactctacaacttacagagcttagacaaggcatttcctactctgggtcttgatttctcatctgtgaaatgggctaacaatagccacttcaaagttaaatatttctgaggattagccaggcgcagtggctcacacctgtaatcctagcactttgggaggctaaggcaggtggatcacttgaggtcaggagtttgagaccagcctggccagcatggcgaaaccccatctgtactaaaaatacaaaaattagttgggcatggtggtgastaccggtaatcccagctacccggttggctgagacaggagaattgcttgaaactgggaggcagaggttgcagtgagccaagattatgcctctgcactccagcctgagcaacagagggagaatacatctcaaaaaaaaaaaaaaaaaaaaaaaaaattctgaggatcaaatggggaaacatagatgagcatgctgtgtaacagtttacatcattattaaaaggagtccaatttcaggcttttctgtaaaccacaaggtcacagatgtttctttttattctgccttaattccattcccaagccaaaatcagaatcacagcagtttatcctcacttactatgtgtcaagcacataaccacctttaatcctcacaaaaatattatgaagtagatatattacccctattttattatctggaaactatattctcacaaagataagcatcttgcccaagatcacatggctactaagtaacagagacaaagcggaaaccaaggctgtctcaaggcaaagctgtgctctcagaccttcagggctctgaagaactggggccctgtcctacctgagtacagccccagtcctcttggtttcaagttgcagttgatctcctggcaggccttccagggggtctcctcagctgttctgagtctagatcaggtcctttgcttagtcccttagctaaagcttcatcttaatccatagtttagtccattctggcggctataaygaagtaccataaactggatacattataaacaacagaggtttattgctcacagttctgaaggctgaaaagtccaaggtgaaggtgccggtagattcagtgtttggtgagggcccactttctggttcatagatggtgccttcttgctgtgatctcacgtattggaagaactaactagctcccttgggcctattttataggggcactaaccctattcatgaggctctaccctcataacctaatcacctcccagaaggccccacttcctaaataccatatgaatttgggagggggggcgggccataaacatccagaccatagcaatcagcttaccccgattcacactccaccgtctcctctctttttcctgtccttattcctaggtggcttgctgacccctctcatgttcctctcccactccacacattcctctttggaacatcctacattctcttccccacctttctctcagaagcagatacttccccataaggatcttgtacctctccccagttttcccagcccatgacattagyccatcaagcctagatcaaatgccaatttccccagcatgtttactgtgtttcctttcactggaaataaattttagcatgttaaagacagcctctatattacttatgaatatcacagaatgtgaattttcaaaactgtgaaaaccacagaagtcattgctcagttgcctttattttatagatgaggaaactgaggcccagacaagttaatttactgcccacagttataactgtaggctagagctggagctgattccaaatgcagtcagtattgttgtcaaaatagtttaaactgggcatgttattgtatccgcatcctccagtctggtgtggccccttggtcaaagtttggaaaggagtttcgcccttgccacaacagtctgattggactcagaccatgaatcataagaaatgttttcttttacttaaacctgttcactcctcartaggctacaaagaactattggccattcaactttttttttttttttttgagacggagtcttgctctgtcacccaggctggagtgcagtggtgtgatcttggctcactgcaagctccacctcccaggttcacaccattctcctgcctcagcctcctgagtagctgggactacaggcacccactaccacgcccagctaattttttgtattttttagtagagacggggtttcaccgtgttagccaggatggtctcgatcttctgacctcgtgatccgccygcctcggccacccaaagtgctgggattataggcgtgagccaccgygcccggcctgccactcaactttaatttgtggccaggaagagttaagtctccccttagcttgcctgtcttttaggttcaataataccagatctttttgctttttctcacagttcttgttctccaacaatttcatcatctttatttctatctgttgaactatatccaagtgctccatgcatctcaaactgtgaagtccagaagtggacaaagaagtctcatgaaggtatgagaaagtgacgatgacctcacaattccttcaaactgtgcttccgttggtgcggccaactttcatgctcgtgtttcaagcgatagccgggcctcactggctcaagttcagcgtattatcctcatttggctggacactgcttagcctgtgtttgtgataatgattgtttcctccatgtagcatccagaacttttccgattgagcttttttccctttgttcctgactactactccaattcatcaactcatttgggactctaatcctattcttccacctcttaattcttaaccccagctactgtcccaagtagcttagcacattaaaagtccctggaattcacccctgagacttctggcccctcaaagcacttctccctcatggctccaggattggataaagccagtagtccatctcccagtacacacaaggcactcacacaaggttataagttctggataaaataagagatcaccagaaagccttccaagaggcatgtagctaagggtcattacatgggtagattcagagataactgactacacttagacctaacttgggtatgatggtgggagtctccaagattttcctttggctcagaaatgtgataattatgaatatttgcacttataaatcacttatctccattagcgtaagctacacttataatgatatacattaccccagtttacagatgaagaaattaaggctcagtgaggttaaggtcacacagcccagattagtacttatgtttcctgtctttaaattccttgaactttctgtatttcagcaggttttaaaatcttagaattcctaaaaatcccgtgtgtgagttgggtatggtgcttttgaaaaatagagattccaggccgggcacggtggcctacgcctgtaatcccaacactttgggaggtcgaggtgggcggatcatgaggtcaggagatcgagaccatcctggctaacacagtgaaaccccgtctctactaaaaatacaaaaaattagccaggcgtggcggcatgtgcctgtagtcccagctactcgagaggctgaggcaggagaatggcatgaacctgggaggcggagcttgtaatgagccaagattgcaccacggcactccagcctgggcgacagagcgagactccatctcaaaaaaaaaaaaaaagagagagattctagggccctggctctaagacatactgattgcttaagtctgagtggagccctgggatctgcgttttaataagcaccgyagagggttttgagtaagcctttgcatgccatacttgaagaaaccctctcctaaactatgctgtctaggccagaccctttaaatactacagatctacctttgccctgggataaagctggcacataaaaaccagccacagaaacctcctgatccagacagtagctcagagggctctctgatgaccctaagacccaggactgtggtgctcagagcctgccaccaaccctggttccgtcctgtttttgtcctcttcagttttgctgacgcattgaactcctctctttagagcactctgctttgatccyactcaggtcttagatatgctctcacccctgattttgtcggcctcggctgctccagatgagaaagcctatctccctaaggcctttccagatgccgctgtaaaatggatctgaaacctgactcatgagagacaatctgaagactttatctggggaactttctactcccgtgcaccccagctgggcaacatttacaaactgctctgagggaaagcttcacagccagtttccccagagaggcatagtggttcttacagtcctactaaactaagtttacaatctattgttcctgaaaaaccagatactccaggaggcggatagatgactagggaatggacagcgcaatgaatgttgattgggcatgcacagtacacaggcactgcactgatttctttccatgagttgtgtcttcgtctcctttcacccataaggagcacagccaggatggtttcacctggtgcctgctctctactcccagggcacttagggattgtgtgttccttggattacaaacatagccctgctacctacacatccctcgggtctttcaggatcacaaaatgtgcaagtggtctctggctggattctcttatgtgtgttttatcaaggaacaagtagattcctgatgaaaaaaagtttttagactgaaagcagactaacagagtggttgaaaattgacatgggacrcaaccgaactcccagtcttggtagacacattccacttactgcctcttctctattcccttttccaagtgcaggaatcttcttttttatttttatttatgtatttattttattttatatttttgagatggagtttcactgttttgcccaggctggagtgaagtggcgcgatcttagctyactgcaatctctgcctcctgggttcaagcratcctcctgcctcagcctcccgagtagctgggattataggcgcccgccaccacgcccagctaatttttgtatttttaatagagataaggtttcaccctgttggccaggctggtctcaaactcctgacctcaggcgatccacccgccttggtctcccaaagtgctgggattacagacatgagccaccacgcctggcaggcatcttctgctcaataggcttgagtcttcctgcactttttcagaagcaaatccagcttgtgatagtggggcagcatgcaataacatatgctggcagcaaatcccaacacagtgggaagaaactgcttttcctgtacattcgtctctactgtcttgtgacaatctgaagagaaattcccaaacataagtctcctgagtgattgtcaggtgtataccttgccttattgttagcagacgtgaaagctctttgagaagacagcaaagtatttggagctggaaggaaaggggtgtttggagccttgttagagaccagctgtagagccttagaatgttctctatataggaaagcttacattgtgctgaaagaaacagttgcctattgggttataacttggcgagttatgtaatgatacaaatgttggatgacttgttaaaggatctgagagcattatggcaaaattctataccctatccttaattagatcaagttaaactgaaagggaaaagcagtctggtttgctaaccacagtggaagtattgctttcgggtggaattcatatccggattgcattgtctggcttgaggataatacacaggaagcaatctggagtttttctttcttttggttttgatatttcagttacaaggaacttgaagtctaggaactggctttgcaatgttaacagttatcacagccagctagccaaaatgtccctgtttaagatcttgctgtttatcataacatgaagtgtgctctatgccgtgtatgatttccaatacacatgtgttagtaattactaccaatatgagtatctacccagccattaatcaaggcacccaacacatcctgccaatgtactttgaaactttatctgctgaaaaagcaaaattcccctccgctaatgaacacttttaggaaagcaggctggttaagagtgtctgaagcatttgagtgacagctccagagaactcccatttatgaccgcaggtgacctagcaaaaactgggaaatataagcacagttctacattttagtttctcctaaagatcatcagtttaataataacagttggcctttactgagccctgatcaaaagtctcttgacatgttttttctcctttaataatcccaggacataaggtctgttaatatccctacttcccgattaggaaactgaagctcagagaggctaagtagtttgcaaaaattcattcatggaggaaatgacagagccagggtactaaccctggtgtgctgactccggaactcatgcttcttggattccattcttctttcaaaaccgcttggtgcctccaaagagaaaaatggtttggtaattagtcccatttgcttccagtgatgaagaggaactctttgatgttgatatctttttttttttttttaatggaatctcactcttgtcatccaggctggagtgcagtggtgcaatcttggctctctgcaacctccacctcccgggttcaagtgattctgttgcctcagcctcccatgtagctgggattacaggcgcctccaccaagaatggctaatttttgtatttttagtagagatggggtttcaacatgttggccaggctggtcttgaactcctgatctcaactgatcctcctgcctccrgccacccaatgtgctgggattacaggcgtgagccactgcacgtggccggatgttgatatctttcaaacatttattgagcactgaccttgtcccaaggggttaaacagaccatatcactgaatccacccaataaacaaataaggtaggttgtagcatctctgttttactgtcaagtaaccacctgttccgtcccatcatccagcgttgcccctgtggccctaagggttgaccgactttctgtttgagtggagtatgtaaataggaccaaaaagccatgtggtagttgtaggagagaggacacagcaatggaagcccaaaagtgtggttctcatcctggacaccatcattcgtgataactctcttcatctcctctgtacctgtgttcctttttcgtgcctatagtatttcctttaactaaagtggaagtgttatctgaagtttcatgaaaatagcatatgcatcagaaatagggagatatcagctgggtgcagtggctcacgcctataatcccagcactttggaaggccgaggcaggcggatcactggaggtcaggagttcaagaccagcctggccaatatggaaaccctgtctctactaaaaacacaaaaattagccgggcatggtggtgggcgcctgtaatcccagctactcgggaagctgaggcatgagaattgcttgaacccaggaggaggttgcagtgagctgagatcacaccagtgcactccagcctgggtgacagtgtgcgacacagtctcaaaaaaaaaaaaaaaggaaatagggagaaagatattttttctaattcaggatcttccactraatatcagtattcaaattatgtagcctttttgaccctcagtatcccaatccgtaaaatgaaggcaatagtacccagctctaaatgttgttgtaaagattaaatgagacaacacctatggtatgtgcagcacagtacctgatatgtatcagtagtagggccctttaaatgtcacttctgtccctcttctcaactccccacctcaccacccgtattagtaagtagtgcttacaatacagataagatggggtgtttgcgaacagcgtcgtgccatccacagtgtcacttatcgggcggcaatatcaagtagtggttaaactctttgaatccctttaagtagactgatgaagttgaaatctctgctccaccatttcctgtgtgactttgagacatttattgaacctccctgggcctcagtttcctctttctttaaaatgggttagtacttctctcatggggtttctgagagggctgaattcattatatactacattcacttagaaaatacctggcccagagtgaacacttattcgatgttagctgccattattattagttatttatttatctctgtgacctcttgtaagcttattaaaggagctgtgcagagtgagaccatgaaacagattttctagtgcaaacggggctgctcacaggaggctcgtggagtctgagttgctgaccttggccccattagcaccgttctctaaccagctcaggcacggggctgtaatgaggattattgaagtaacatatggaaaactcttagagttagctcttgggaaaggaaaaaggcactaaataaatacaaggaattattaaaaaccgggagacgacctcacagggatgctgagccttgtatgttatttgctattctaagaagaaactggggcaagaagccaacttcatcaccaggygacaaagtggtctcctggctgctgttcaagggatggcagcatgcagcatcacctccaggccatcacagcctcttcctggctgcaggaagctcagctttcccacgaaaaagaagggctgggtcctatgccagatgctatgcctgctgcctcccatatctcgtgcccaaatacccctcctttgaggagagctgggaggtgatattctaagtgagaacctaccaagtagaatattgatggtaaattccctctggtactagtgcagatgacttcggggccaccagcaatctgcttccacagcaggactccagtcccagactgggccaagctcggggcttcgttgccaagccttaacaagtatgtggagagcacacagctctgtaattctggagataacagtccatcagtctctacttacaactttaccacccacccctgtgacattcctctctccagaaccaatcctaaccctcaaatgaaatatacttaaagtggtctccaggtatcacttgtgaaatggtgcacaggaggcatccaagaatgaatcaagatctggcccacagccaccacacagcttggggcctctggtttccccrtggtatcagtggcataagattaatttctatggctccaagcaatgattacagaaacatcctatttctctttgctacaaaatagagaatatcttagccatgatgtcttacactataaaatcttagaagatgaggatagtgtctaagtctcatcactcaagaatatagcacttcatgacatgtacctttatttatacttttctggtaacaatatagttttaaaatactcawggcctttctaaataatggtataaatatgatatctcartcctcaaaactaccaacaaatttaaggtatttataacacatacaaccaatacttatgcataaatattataaaaacatggcctacctctcaatgtgcatagcaaaaatagtttggaaaagaaaaaacagaaataaaaattccaccactcaaaataaaaaatagttatctttccttcttcaaccagtttcaaagatgctacattaaccatccactatgaaagggatcaaacatttcagcagccttttaaacctagaagaagtccttaaaaatgtaaagattagacagtagaatattttctctggcatttaagatttttgaagggtctagttaggatctagtaagttcttcagaaaggttaggctgactataaagacaacactgcaaaatttagaagattctctagttcacttactacaatggactgtgttttttcttagagatcaggattaattattaaaatatttaaagaaaaagatgtttctaaggctgctaggaagacaaatcataacagtagatcccaataataagcctatgtgtaaaacagtctcttaaaaaagaggtggcatgtggccgggcgtgtagctcatgcctgtaatcccagcactttgggaggccaaggcaggcacgtcatctgaggtcaggagttcgagaccagcctggccaatatggtgaaaccccgtctctactaaaaatacaaaaattagctgggcatggtagtgcacacctgtaatctcagctactccggaggctgagacagaagaatagcttgaaccctggaggcggaggcagcagtgagcggagattgtgccattgtactccagcctgggtgacagagcccgactctgtctcaaaaaaaaaaaaaaaaaaaaaagaagtggcatgcatatttaaaagtagttacaaagaaagtcttggcagtttttcagagctcccttcatgtaatcactctattacagtgcactcctcaagttgaaaagctcccatttatttaacatttttttaaagaattaaatattttccttatttatccaatttgcaaacgtaaagcaaggctgcatcatctctcctttttccgcatccttctttccgtccactaaggtagttctctgggactgttgacagcttctgaaggtgatttgatgtgaactcccccctgactcctggtttgtctgcttcttataaagagatagtatgctccagagagcaccagaggcagttcttacccagcaatcccggaagcaattttcttctgcttttcttactcaccagagccctcctggaggtttcaagcaaaggagctgagcagtttgcagtagctactagatagaggttcataatggaatagcagcttcaggtttttaatccatcattagaaatagttgttttgcaacttgagagagaaaaagtagaaatctatggcataatgaagggggraaaatgggtcatgttactgtagagatagatgcaaattctatattatgtcataagtgaaagctttttcggtccatatgggtataaattaataagagagaatgctgtcagcgaagaaagtgtaagtactttgtctggagagtaagagaccggccagttagtcctaataaatccgagggttyggggagcctcttttgagataggtgatgcattgckcattattagagaatctcttggcatgagtacttttgcascaagcatctgcttttaaggtctcttcatgaatgttcttcttatgtgctgatatctttatgcttacacaaacttggtggaaggcactattgttgcatcattaaattacctcactgtattctacaactaccctacctaatatgctccaatcactcttactgtattttgttttcttcataacatttccctgtctgaaattattttattcatgtggtatcatttaagtgcttattatctctctcaccctgctcccatcaccactggagtaaaagctgtaagtagacaccttgtcatcttctcctgtatatgcaagtttccattttgtttcataattagcttctctctcctcccagcaaggttttcragatccaacccaaagactgcttaaggagtggaacttagacttcttttacttcttcaagagtcacttcatggataaaaagcatcctgttcttgggactttgactcagcagagccaagaactttcctataagctattgcttggttgttaaggaagcacaacagaataccagcctgacgtgtcacattctgcatgcgctcatttataatacagtgtggtatttttcacctcctatctgcagcaagatgagataatcgctggctggtgtgagtttttttagtatctctttgcatcaatagatctagttttcagactatatacttaagtttataaaacaattgctaacatttgttttctttaatcagattcaatttgattcttattaagaccatgttttagaaagcccccaatggccctcataatagtgggaagttttagaaacaaaggccaatattatgaacacattaatatataacccaggtgtcatggaagtgctctcaaataggaaacgtggaagacattagttgcctgcatcccaagtcagagacttattttcttaatttgctttctgtgcctccacaatggtctttttccttagctttggaaagaaattataacagccagctaactttattgggtaacatgcatcaagccccatagcagaggttagatatgcattaccttgtttgcataacaaccttatgaggaaggtactaataaaatatgggtataaaagacctccatagttaaggaatgaggaaataataatgcaagtctcttttcctacaacataatggtcctaaaacgtatgtatttctttgcatcttttaaaatgcagcataaatggggtattctaatatcattttgtttttcttcaggtttctcttttgtacattttaataagtttaaaatatataaagtggccaggcatggtggctcacgcctgtaatcccagcactttgggaggctgaggcgggcacctgaggtcaggagttcgagactagcctggccaacatggtgaaaccccatctctactaaaagtacaaaaattaaccaggcatggtggtggatgcttgtaatcccagctactcaggaggctgaggcgggagaattgcttgaacccaggaggcggaggttgcagtgagctgagatcacaccactgcactccagcctaggcgacgagagtgagactccatctgaaagaaaagaaaagaaaaaaaagaaaaagaaaagagaaagatttatatttgcttgcagtgaaaataaatgcagaattttccacagtgaaaagttaaagtttttctctaacttcttccctcagcctctgtccctcctctcaagataagttacaaccctccaaaaatatattgttcagtgaaaccacgatggtatagaatagaagtctacagttagtctacgatgtgttgttgacagctgcgtctaacattctttttaaagattgcatagtatttcattatgcaggataccataatggccgtttcctttttgatggacatttaggccaagttttcctttgtgaaaagtgctgaaatgaacattcttgtctttcctgtgtctttgtgtccttttgtgagtaaattaagcacaacttcttagaaatgaaactgctgggtcaattgtatatgtatcctaaattttgtcaaattctttttttaacagcttacaccaaattatattcccacattggttatagcaattttcaatattatgagttttggcttgtattttaaatatcttcattttccttttagatgttcacatagctcccaactggaaaactgtacccataccctgccaccatctccaccaagaaccctcttgccctatgcatatcatatgtgtataacagtattaccaagtataatagtactttctgaatatccctttctttcctcctttatgtaaaatatgtacaatctgatgatattatttgctaaatacataaatgtatttacagatggctttctaaagactaagtgatataatccaaactttagaaaatcagattttgctcacaaggggtttggaaagtgccttttcaggatcgtaattaaacttagctaattgtaattccaagattgatgcaagaaggcaaaaggttcaagaatgaagtcaatttttcctgaggttaggactaaatctgtaaattctggttatatgaatcgctaaagaattattgcgcagggatcaataaatcacttctaaagcagtgttagaaggctgttccacctcctcagtatactagttattaggctcaagagtgttgggcaaactggttcttttagcttttaacattgcagtaaatggcttggcaacagatttaacattttctttgtaacatccaaggttagctctttttttttccttaagatctggaatgttcccaacacaaagaaatgataaatgtttgaggtgagggacattccagtcactctaactggatcactacctgtcacaaacatgcatcaaagtaacacttacaccctagaagtgtgaacagtcaccatgtatcaattaaacaaacaaaaaagcccagcccgaccttggaccaattaaaacagaatctctgaagatggaactctttttttttcccccccgcaaggttagctctttagtcactggccagaaaacctctaatcccagcagaattttagagctattaagtactttagttcttagccacttagaaatcacaatgacataatgatgctttacaagaagaagaggtaggggaggagggaagaatttctactcctcctcctcagtgacatgagagtaaagaagaaaaatgagaggttataaccatgaatatctgcatgttatgtttacttgaacaaaaatgcaaattttatctcttattgaaaagaattgtttttgaacaaaagtgaatagctaaaaatagtgattctgtacaaccaactgagggactggttttcctttagtttttttgtatttgtttgtttgctttgtttttgttttggcttctcaacactgagcatagctggtggggcagaggcagattcaacactccacaccctctcaggagggtaggctctgagggttaaaatgttgaggggcagatgtcgcttgtgaagcgtcacataccgcgtgaccatggcagagagttccttgagcagtgaaaagcactttcctttcccaacagatagtcttatgtgtgcaccaatcccaagcagaaatcatgattttctttactctataggtgataagcatgagattcttccccaagaagaatgctgaaaaatcagaaaggatataaaaatggaggaaggggtgggatattcaggaaactaccaaaatatgtacatgtgaaaataaatttcatgaaactgattctttggttaaatagcgttttaaaaatctcttcaaagctctcaaatgggcctttgaaaaattaaattacaccacattggatctgaatttagcatgtaattttctaacacatttttatttttttattttttatatgtttttaattatactttaagttctagggtacatgtgcacaacgtgcaggttaacacaaacattttaaagttagaggttctacgtcaatgaaataaggctaaaacatgaaccttgggaagaaacattggaaactttagtacaaaggaagttacsaatgaatatgattaagtttagaaagctttcctaggagaggaaatgtgagatgttgattcaggttttcgttcaaagaatgaaagcattatttaaaatatattttgtgatgcaaacagggaaacatcatagtatttttgtgtgtgtgtgctgaatctaagctccattttacagctagtgtgtccccaataaaccatcctaattagaaagcccctggaaatctccagcattatcttaattaaattagcctaatctaataaatgcatcataattaagaggactgtgccattctttagtgttcagcacaccaggcattagatgatttgtcccactttcagccgtcagttgtcatgcttgctaaaagaaaagaaaaatgatagcmccagtcatcgtagtccctcaaggaatcatccatctagttcttgaattttctttacaacacctctgtcaattatttcttcctcttcagagcatctagtgacagggaactcactaagccattttgatctatttcatctttgaacatatggaataattttagccataagaaacctcagggaattttttttaattccttcaacatagacctaacatagtacccagacaactatttttacstccaatttcaaacaacctggaaaaacagcggatcagtggaacactaaaggctatagggagactatgatcattcttgcccaaaggaattgcaaaaaggcaggtgtgtaaatagtatttacatataggatggacctctccacctttttctagtacagattaatttttaattttcccaacatctataaattgccagaatggtaaggtagtggggaaacactttctcacaatgtacacagacttgaaagctgttgacctgtcctccttatgacagacagttcttggcaaccccaaggagagatatggctgaggcagaaatcacattatctagctcttcggctatacacatattgggctctgataattagaacattgatccacaagacaacctttgagtatgctgttcttttccttcacagcaaacacgtatagtcattatcgtttgcttgtttgtttgtttgtttstttctttctttcttttttgagacagagtctcatctggagactcccaggctggagtgcagctcactgcaacctctgcctcccgggttcacgccattctcctgcctcagccttctgagtagctgggactacaggcacccgccaccatgcccagctaatttttcgtatttttagtagagacagggtttcaccatgttagccaggatggtctcgatctcctgacctcatgatccgcccacctcgacctcccaaagtgctgagattacaggcatgagatcagttattttttttttaagacacagagtctcactgtgttgcccaggctggcttcaaactcctgggctcaagcaatccttcaacctcagccttctaagtagctgggactacacatggctcatcagtgataattttaaacacaaaaatacacatttttatttgcttatgcaaacaaaggaacgattataatttcctgcaactagtaaatatcatatgctaaatcctttttttctaattccacctcttccccaccacaccatgtaatagctttagagttgttttttttggggaggagggaaggggtgttatgtgtatttttttgtcttttgccaagtctctaagtgcctctgaagccaatttttaaaagttgtgcattgtgagatcacagttgctttagggcatacaggatataagcacaaaatgatggactgtagccaggtagtgaggctctaattgtgtcagaaagaagaacattttcatcatgacataacgaaaactgtatttttcaaagaaaaagatctaaatctgtatcaagtgataacattagttttcctacttttaaaaacaaaatctagtctattattaatagaatgaaatgtcagccttaggcaatttgctgtgaaaaaccaactgaaatgaaacatggcattttattcgttattcaaatggccaaataaaacaaggtgtaattagtcctgacttcctgttcttgctcacacacctgaggcccctccccgctctgctgcagctctgcatamccaggctctcaggggaagcagtggaggcagccttcttggacaacagctcacttgtctacacagtcaaaagtatgtatttgatcaaaatggttgggaggaggacaggtgttacttagagaattacctgtgtaactagaacaagaaaaggaggcagcatttgcagaatgtttgcaaatctttcaggaacttgattcaaggagtgtgtcagatgttaaatccaggcatatatgtatatggctacttgtgtgtgtgtgtgtgtgtaatagtgtaatttcacttttttaaaaaatgaagacattcacaattttagccagaatagttggtgcaaggtccataagtgctacctgctaagaatataattccttctacctctaatgtttcattatcaaattaaaagagttctctcctcagtggatacttcatttatcatagctctccttggaaagctgacctctaaacatgaacttctagaaggaacacagaataagaacaagggaaaagcattcrggaaggagggtggctttgaaaggagttagctgggaaaacccttgaaaaagaaagtgaatccatttctgtacatacaattattgactgacggggcagtttacagttttaagttygtgtgcactcatgccctgtttgagatgcctgttttgtggttcctcagagaccacactagccacatttgaacaccattagattagactagagccaggactctgcaaagggaggctcttcctcagcctctgacagaatcaccaccaaatctggctgtcctccttgccctgagcaattgaacttggctctgtggagggagcctcaaccaactgaagcatcatttggagaacagatgaaaaataaagaagcgaagccttttgaattctaaagttttagctttttccaaaagyaaggcattttcctctcattctcaatctcttcttccattcagttttctcctcccatattcttagtcgtgattacatagattaaggcaaggaactgggggtttcactaatgaactcggggaaattttgagggacatctcctgtcctttgactttggggmaagttcttccattgctaaggaaaaaagttgtattggatgtaattgtttgttaaatgcaaagaactaactgctgggcattctaggagtccgtacatgaactgttttacgtgggtttctgcaattccatagagtcgaagacaccaataggagctgtggcccctttgcctagtttgactttagtcctttggagtttcataattctgaggggatcattgtatttcagtggacaggttccaaatgcacagaagactgacagcattgtctgataaagcatctcccattttatcccatttggaatgtaatccaagwtacaacaatagctaataattacctgctgtaattgtagcaacagaatagctgaatgtgcacctctagctgatttatgtatgcaatttctcattctcagctctctataatccattctccacccccccmccccccacccccaacgctttggagccttgaaagcattcaatacaaattttcacaatgtaggtaactttgaagtgtggcttgtcaggtcatgctgacttatttttgtacttgcatagggaattggtgaggatgaatctakttttttagctaacaagtgtaacttgagaatttgtgaatgagtgacagatggggtgggaacctttttttccttcacgtattgtgaaatgtactcctgtctactcatgggaatgagtcacatttgcaaaaagccataatattcattagtgccaaaacgacattttttagttgctcttgcaatgagctgtaagtaggacaactgcccatcctagtttacccgaaacagttattatttattcctataattatcaatggttacctatttatttcatcctcagaaatgtcccggcttgggcaatatatgtttaccctgcatatccagattgtggggggaaatccagtattttcatgtgccatgcccaaatggcagcttatttaaaaaaacagaaaattcttggaattaacggtcaaggatacgtgagagattagaaatcaacatttcacattaattcctgygtaagaaaattatacgtaaacatagactgttaaaacaggcatagcaaatatgtttcaactcaggggccaacactaattggttggtagtggctgccyctagcatcactggagaaggactctgaaaccgagttggggatcaatgggatatagggcttgccrtattactgatgtctgccataagctctggaaaagctagttgtaaaaygtatgctaggtattaaatgtcaccaccatagagccagatgaggttttagtgataatccaacccagtgttttcaaaatgtgttcccagaacactgatccttcaacatgattcacagaacacatgttccatggtccagtaagattgagaatgatgcctgccatatttctctctcagaaattcagtgtatattggcacagagctctaaaaagttctgtttaactttctgacagatgtttaactttgtttaacccagtgcttggtaaacctatttggccacagaaaccttttcaatgttatctgtcaacttgctacagaactagtttcttggtacacatttgaggaaactctagtcttagcccattccttgcatttcacgaataaggaaactatraccccaaatgagagactgactggaccacagtcaacttagttgatctatggaccaggcaaaactggaactcagtgatataagagttaagaagaaattatttaggcagatagtgagggtataggagtccttggtaaggttttccttttaatgaaaagcagccccaaaattatactaacgagcagcctgtaaaattgagctgcagacacagacaagcaagcgggaagcttgcatgggtgaatgccagcagttgtgccaataggaacaggcacctgagactaggcatgttcaaaatggcagctccaccttcccttttctttgccagccacatgtacagtaaggagcagatgacatgggctagccaagtggaaagcccatttgcataataagattagggtggggtggccagccttcccaaaacgtcacacctggtccaaccaatctgtgggccctacgtaaatcggacaccaccacctcaaacctgcctataaaatccagtgcactcccattcgggagcccctctgtctcaaaaaaagagagagagctgttctcctttatctttctttcgcctattaaacctttgcttctaaacccactccttgtgtgtgtccatgtccttcatctttttggtgcaaaacaacgacgaaccccaggtatttaccccagacaatgaggctgcttcatcagaactgctgactccaagtcctaggtcctttccactgcatcaacaatgaggaaaatattagaagcaatctaagattttaatagcttctggcagcacagatatttagtagatttcacttatctatttttataggttttggttttttgttggtggtgggtttttatttggtttttttttttttttttgtgatgagatcttgctttgtcactcaggctagagtgcagtggcacaatcatagctcactgctgcctcgaattcctgggctcaagtgatcctcccacctcagcctcctgagtacctgggactactgacacgtgccaccatgcccagttagttttcaaattttttttgtagagrcagggtcttgtcatcttgcccagactggtctctaactcctgggctgaagtgatccttccaccttggcctcctaaagtgctgggattataggcgtgagccrccatgcccagcctgtatttgtttttaaaagatggtaaataaatatctgtatattcctagtgtcagacactaagctacctctcatggtcaaaaagaaaaaaaaaaggcaagataaaatcatttttgtagttgagttttatctgggctggtccatccttctattttatcctttttccttaggagataaagtggttatttgaggaaagacttgctagacatgaatctggttttggttcaaattcyattttattatttcctgggctttgaatttcaaaaagccaatctatttattggtctctttggggccataaggttaaagtacatctgttgtccacacaaatttagctattggccttcgagctaagcagtcatgaaattatagccatagtaaatttagacaaygattaatttcacttcggtctgcctataagtccacatgacagaataaacatagtgtgtcatgtggttaatgtgaacacatgtaaaaaattaagaaatctttggtgaccagacaaaaaatactccataaaaattaattagtgtttcattgtggatgtatgaaatgcaatacttatagatggcctgacttggagcttaggcagcaacaaaacttatcttgggcatcactttcaaatttcgttttggtggttctccagttcktggcagaccactgccattcctttgaggaaaaggaacacctggaaaatataaccattgctgaagcacttatctctctggggttttttcctaccctttattttcattattataccattacagaaactggttgcttcagttttcttcaagtatggacttcatgaagccatgtggttgcatgtgctttgggaggaggaggcagctgggggctaaatttgccatcctgaaatcacccgtgacatccctttgaagatacattttgtcaggaagcacaaatcagtgaagttgtgaggaagaaatggagagacatctttcaacataaccttgtttccccttgagcataaaggaattgatttaaaggagaaaataaagactcaacagtttttaaaggcttttatttaataagcacctgattgtttccattaactggcttttaacatttaccattttgcttagcaaagttggagaacattagccaagattcactgatgaaactttataagygttataagtcagatttgtttcattttaaaagccacatgtttaaaatacagtgcacagagaattttcatgatacgtagttgtggttcaataaaataaagatagccaaaagaaactgtcactcataaaatctatatttcctgctaagtgttagtattaaaatagatactgctagtcaacttgtaagccaagcaatgccatatgtgattttttaacataagctatttgtagtctatactagaaagtgtatcttagactttgcagtgatttgttggttcctttcattaatcatgaatttattatcataaaaatcaacacccatgaccctatcttggagaatcggagtgttctgagcattcccagatgtgtactgcagctccagtatacagttcagagccccactgccagttgccaggatcacaagagaaagatattagtagaccacgtcagggaggtgaatttttaaatgttcttacaccacccaagaatggaagtgactggtggttttcaaggacagccatttggtctgaagcagctgcagccccttgattttaattatcctcctgaccctttgatccctaaccaaaaaggccctakgactgtggacagatgcagccactctcctttaacaactggactcagaccaagtcagcagtcacatttaacctcaccttgaaatgtagaaagtgaacaattacatattgaacattttcatgtaaaacatcttcttgaatttcaatccagccacatcctgctagtgcgataatgtgatccttgaatttttggcaccatctaatttttaagctggaatgtttggaaaatccttacggggagggaggaatcattatgcaacaacaacaatacacacacacacacacatatgtatgtgtaygtatacatatttataaaaaacaatttcaaaatcccagcacagaatagtataaagaaatatgccatcttacagaactataatgttacaatcctttttccttttatgtactataatcctttatgaacaaggaaaattcaatactggagaatattatctcctctccaacaaattgayttcaacttgagtattatatccaaagaaacttaatctgtaagtatgaagctatacccaactttgaaagatttttgaagcagtacaagtttctttcttcttcctcttttttttttttccttttttttgagacagagtctcgctctgtcacccaggctggagtgcagtggcacgatcttgactcactgcaaccttcacctcccgggttcacgccattctcctgcctcagcctcctgagtagctgggactacaggcatgcaccaccatgcccggctaatttttgtatttttagtagagacggggtttcaccatgctggccaggctggtcttgcttgaactcctgaccttgtgatctgcccgcctcggcctcccaaagtgctgggattacaggcttgagccaccatgcctggtgcaatacaggtttctaygtgatggaaaaatctaagctcattaggtaaaatatagtcattgtatttccttatgtctacaattggattttcttctcygttagcccctgctactagtctcatgaactaagaaacctggcttagctgacatctatgcttccagtcgattcctgcattgcggttgaagtgaaaaaagccccttgatgaatgaatgaataattgattgatgaatgaatgaatgaatgagtatgactagatcttctaatccttttacattttatttccaattagtacaaggtaattttcatacgctgtttatggtcttgaaatctgacagccagtcccaactggtttattcttatattagcaacttaattcttttgaaggggcatgtaccatgcccactaattttgcaaggtttggctctccagtttccctcagctccttgtttgtgtggcaattacatagctatttaacagctgcactagaaattaaagaggaagaatcagtaggctttgttaaaacatgtgtctatccatagatacatgttttgatgaaagatgaaagccaaaagcattaaggaaaatgaaattttggagactacgtggtttttattgtttgtgttcttatttttaattgctatagataaatgagagttgctgtatctaaaaatataatgacaactacttcacaaggtacttgtgaaaataaaataaggtcatatttgcatataatatgcattcaataaatattctctttcccttaatttgaatttttataagtccttaagaattgtcattgttcccaaatattgtatgatctttccatcctaattatgagatcataattacatattttyatgattttatggcagaaaataaaaaatgtgattgaagttgaaatttatcagaagttcagaatgggaatgtagataataagattttaattttttgatatgctacccagatactattcactagataaaaggcttccaggtattcaaaatggaatgaataaatgtccgagggggttctcaagtcaaattttacttgagtggattctctcttagccacattccacccacactcctctctcaatcaaaacccctctccactcttagcccatagcaattaaacagggctttcaggatctggaggaaagtgagaatgtatcccctagaaagagatcaaattgaggatggcaaatgtgtttcatttcagccttcaactttagttgctttgtagccttaaacagctgtgctgaggattctcagacattctgtctcactarcaaagaacattctgatgagtgagtgatgtctgccacaggaagaagggggatagtgtccttgcctgtgccatgcatttaccaaacctatacttcatcctattttgtatgtttcactgtttagcttgtcaccctagtatctctttccctaaatgataccagcaacaagaatttaatgtgagagaaatttcaagaggtcaaaatttaaccaacagatctcctcccatttacctctttagagaatagtaaatgttttgagttctttgccaggaagctggtggaattatgacctttgagaaactgaactaaacaaacatgactgtagcacacccatctcgtccaatgtgtggtgccaaacttcaaaactctaagattctgttagtttagacaagaaggtgatgcatctttaatcagctacatraagagtggatgaggcagatttccttttctcatatatgcactaactagattattttcagtttaattttatgctttttaaatgcacttcagtttgagttggtgaaagtctataagcctctctccatatatattttaaagcacaaactgtggccgatattaaactatttgttcagtcctttcttcatctgtaagcatattcttctttgataagctcaatggcaatgtgccctgtttgaaaatgtaggtttgactgctattcggatgtggtgaggtcaacagattaggagatgactgtcattggaaagatactaaatagtttgttattcatagttcccaagaggagggggcatgccacaccacaggggactgcaggggacgtgccagggtcagtcagaaggccaaggagcaagggggaaatgtggacaggtgcctttgcctaggaacccacaggaaagggataggtgaggcaaggtacgcagggttagaactgcctgttttgagtaattccagtgggttctcaagcacaggggctgtttctggttgtctggtatctggccctgggttgatgtggggagggaagttgtggccctgagtatgagagcccaatagagggggtgcagagtgtgtgggctctggactggttagtttgcatatggagggcatgctcccaggagggtctttaacacctctaggaactggctaaccctgggatgggcagtccctgcagggtcagcaatgtcctagatgcaaaattgaatgcatgcaaaattatgttctttttgtatgtttctctctgtactcaaaaataattaacctcattcatttgataattgatcatttgtccctttctgatatcgtctgtattgtttcctcatgccattatttgatatcaaatgtatttatgccaatttccccaactagaaatcaactacttcttgattgtttaaaaaaaatgcaatttttaacttttaaaattgatccatagagtattgaacatagttgatgctttaaaatatttattatcagccccacattactttagaacatgcatccgatgaaataacaaatagtgaagaaatctgtgctctaatagatttgtaaaatgctacatacatattacatctccctccttgatgtttgcaattcacatttccttatttaaggccctgggaaggcctgcagcaaagaaatttgtttaacgttgtctcaatccagccatttactaaacttatttgaccatgaaattttttctcaytgagtacctgctaacaacccgtgaatatgttgcagaatgcttttctgtactgtttcttccatggaatttgtactttaaaaaaataaattaagactgattataaactgagtgatgatgagtttaaggctaaagaaaataatcagtaagtgctataaagtgcttgaaatataccttaatactggcagaaaagttaagacaatgaatgcattttctgcctcagtctaactcatctatttagtcatctgaaatggctcattatgtaataaaactcttcagcaaccgcatatggcaaaatgattggtgcttgtaaaccactaggctgacctgtttttgctttttaaatatgcatgttttttgttctccrcctcagtgaataaaattgaaacagcatctcagattgtaatacataggagaaataatgcagagaaaagaataaatttgcccagtaaggtataagtaaaataattagcatgagccatgcatattgctttcaggsaaagcaactgacagccagggaaagtcagttattgacgtaagtgcctgtcaagtcaccagttctatgttgttaaaatgtggtaagttagggtgtgacccaagaggaggaggaaaaaaaaaaaaaaaaaaccctgcaaatatttkgatggcaggctctccctaaaaacaaaaagggcagcatagtttctggccagtatttagatcagtgtgtgtttgatctatgattggaatcatttgctcaatggaactagcaatggcagagcaaagaggctcaactgtgactttaggaaagtcattgagccttccagttcaggttcctcatctgtatgaagagacaaaatgtcaasggttttttgttaaatggaagagtgtatttttaatgattgtgttaaaaaatatttcacaaaatgatgtagaaaattctttgatgaagggtgcaagtaattaatggcttagcttacttggaatatactaggatacaatcatgtttctgagatcacaggcccacactggacctttaaatgtattgatggatttggcaccttgtctttatcacaaccatggtacttaactttccatgttatactgaaattagctcttgatgggcctttctatcctattggaatgtaagtttttccagggtagaggcctggtcttatattaacttactctctaggttctagcacaatgtttggcatatgaatgtattaagcatgccttttaattttcagtgtctctgctgctttggcatgcgagggaccagaggtacaatatacatttttaaaaaatggttgcttgggaggttgaggcaggagaatggcatgaacccgggaggcggagcttgcagtgagctgagatsgcgccactgcactccagcctgggcgagacagcgagactccatctcaaaaacaaacaaaaaamrtggttgctatgtgaaacaagtgagcaacctggatggaaagccaagactctgtgaggcgggtcattctggtccagaacttatcagaccaacacttcttaaagtgcacatgatcacctaggggatctgaactgattcagtagatttggggtgagggtcaagatactgcacttctaacaagcttccaggtgatgctgrtgctgctggcctcaggaccacactttgaggagcaaaaagcaggagtggggaatcattttctataaagatccagatactacataattggggctttgagggccatataatatgttgcaactactacttgactctgactataatgcaaaagcagacatagacaacatgtaaatgaatgagcatggttatgttccccgccscccaccaaaaaaaaaaaaccttatttaaggactccgaaatgtgaactttatgtcacaaaatactcttcttcttttgatttttttcaaacccttaaaagtataaaaaccattcttagctcaaggaccttataaaaacaggcagtaggcttgcaggctataagttcactgagttagaggacaacatactagtcacttaggtagttggcaaatgtttccctgtggagtacatctaacsaaaagaaacgaatccttctctctatggaacctctgttgcatttttttatgcttcattttcccccagtaggtggtttatatcttttttatggaatgtagaaacactctaattcacagacagactcaactagtttcagagtttagcaggcgttattttttctattacctgtagtaggtaatgcagttcctcacacatagaagaagctctgttagtgtatattcagtttattttagtctgttgaagatgcctttagcttggtcttaaggaagaatagttcctagatgggattaatgaacagggtaaggagataattccaaggagaagaaaatgtgggcacagaaaagtaggcaggtaatatttgagggctatgtaaggagcagtaagtccatgcaaatattcgacagaaacagaggattagtataagaaaacgatagggccaagttatatgaaaacccacagtgacagatctgaagtttagagaatgatgtatgtagggaaaaacctcaagggcattaatctgatgacagaatatagaaagaatttatagtctgctggtgatggagagaccaattaaaacactaaagccacagttaatactgatgggtgaggatctggactgtggctttggaaagataacagaaaaaaaagaaagagactggaggatgactctgggctggaaagttcttcaagactttatgacaacaaagaaaaccatacagtgccccagaatcaagaaatactgtcctgctccgttgcccccaaaataatatggtttgcattgcatagaatgctcagttggctgattattgtatgttctttaattccccaggtcttatctcttctttggtgggaatcacatatttactgttgagcatggtttctggggttgatacycagagtattagcaaactcatttgctttattaactttattttcaaattaaattagacaaaaacctgtattattctactctaaatacagaaaaaacatgtcttccgtgtcatatttcacaaaaggatgtgaaatccaagtaattttataggaaactggacttagagaaaatctctaagtgctcattaagagctaaatggacaatattttcccagagaattcaatccttttagttctaagtggcagatttctacatatttctttaaaaataaatcccatttggggtttttttagggcagctttgggctttgttttgttttgtttgtatgtttgtttcttggtaaaatgtaaaggccaccaaatgctactgagaatttgaggtgctgggggaagagaggagagagagtgagagaacctgtgttcaaacagtctggcagcctgaaatttcccacacgaaggacctgattgtttgggaaaggaaaagtgctgacgagcaagaatgaattacagcacaactgctatatctctccacatcttggaggccaaggcggtctgctagaaagttttgtaaatatcagaaatgtggaaggcattaaatctgttactgctcagctgatcagaagtcttaaggtcaacaaaaatattgctgcctgtgattttttaacatgatgataagtttcttttcatatattaaatattttgagcataatgtttatattttctatttttctttagataagactaatagataaaattgtaataaatggaggaggtatttgttataaagcattttataagacactgagtttctgttccttttataactgaaatggtctttctgagtttgatagcatcacttgggttgataaaatgtacaagatgctttacaaagaaaacctgtgggaattgtctagtcattaatttcacagtctaaattgtagagtttccattagtaacactgacaytgttttttttttaatcaaacaaacatcattttgcrtagcaaccagccttcacttctgctttattgttttaaacatcaccatttcctttctttccctcctatcctttgacctccatttggcctgcagatggttctgtgaagggaaagaactgcacaacactcctgatattcaaatccactgtgagggaggggacctccataccctgatcatagcagaggcctttgaggacgacacaggtcgctacacctgtttggctacgaatcccagcggctcagacacaacatctgctgaggtgttcattgaaggtaaggaggggtgcctggtaatgggggataaaggggtgtcaatggtctaatgactccagtatcttgggcatgcaaatgtgcctttccaatgcaaatggcacaatggtgttctaattcaaacttcatttccctgaaaacctttataaattgaactgttccgacatttaggcacccatcaactatctctgatgtcaacatttgttccttttaatgtagaatgtttccactccattaacttgaattatttaaaatgtaaggtatccaaattatttttgtctttctctagtaaatgaagcatagaaacacaattgaaataccatatcaagcaaagttaaacgataaatgactcaggaaatcattcatgagaattttaagtgattgaatactttttaatgttctcatttttactaaattctagaattttgtctcttttgttaagaccccattattccttctaaatgtattataaacttgcaatcactaggtgagaatattcaagaatcaatgttgtattaaagaggggtacgcagagaatgggctatttctgttgttctgttcatttttgacaggattcagtctccagggagttgaaaaacttgatatcaaagtattatattttacatttttattgtgttttgatcaataccaataatttagaatagttggaagtgttttaagcactgtagtgtatatactattcctaaatccataaattgatgagtgctctgttaattggttgctttcaaaataatggttaaaatatagaaagaatattaaaatccttgaggtctgtactttttwaaactatttaatagcaccaatatctycattatgtggaggtgaagaaggcargatgtgagccaccatttatagctccttcaagaactggcccacaataattagctttaaaagtagggccaggtgaggtagctcatgcctgtaatcccagcactttgggagcccgaggcaggaggatcgctcgaggccaggagtttgagaccagactgggcaacatactgagaccctgtctcaaaaaacaaaacaaaacaaaacaaaaaaacacttttttaaagttagcctggcctggtggcgtgtacttgtactcccagctattcaggaggctgaggaggtaaggagggaggattgcttgagcccatgaggtcaaggttacattgagttatgatgataccactgccctccagcctggaagacaaagcaagaccccatctcttaaaaaaagagaaaaatttraaaataaaaagtaacgattactgatgactaaaagtatgtacctttactttcagtgaaaggatcctccacattacctttggtagaaaacatcttggagtgcctcaagggaccttgtcctattaataaaaacaaacattctatatgtagtaacaactaatacttacatgacacttacaaaatgcacacacacacacacacacacacaatcatttatactttgccgtagcctacgaggtattattagtgttccttttttataactgaggccyrgagaggtagaagaaacttgttcaaagtcacacaataatttgaaccaagacagtcttgctccagggcccatattaaccaccctatcatactgataggtatttcaaaatgctgcatgaatgaaaaatgaatgataaaaagatgtttaaaatttcactaatgagttagcagtattattcaggggtgggttatgtagcaaacttcttaagccatcttagaatacagtgaaggaaacaaacttccataaaaatcctgtctgctaatgatgatcagatgtgtctccaagttcagatagagcacttttaaatgaaattctttatttgcttgcaagattgctagaaatatgataaattttgggttgtgctgctttcatactacaaatattaaatgaaatcatattagatttaagtaaaagcctgtcaacttaatttaaccaacatttattaagatcctactaagtgccacacagtgcaggtataaatgtggttaagagacaattcctgatatcaaggagttctcaatctaacagcagataaacacatttttttaaaaaaagccgggcgcgggccgggcgcggtggctcacgcctgtaatcccagcactttgggaggccgaggcgggtggatcatgaggtcaggagatcgagaccatcctggctgacaaggtgaaaccccgtctctactaaaaatacaaaaaattagccgggcgcggtggcgggcgcctgtagtcccagctactcgggaggctgaggcaggagaatkgcgtgaacccgggaagcrgagcttgcagtgagccgagattgcgccactgcagtccgcagtctggcctgggcgacagagcgagactccgtctcaaaaaaacaaaaaaaacaaaaamaamaaaaaaaaamaaamaaaamaaammaaaaaaamcaaaaaagcygggtgcaatggctcacacctgtaatcccagcactttgggaggccaaggaggagatcaagatcagcctggccaacatggtaaaaccccatctctactaaaaatacaaaaattagccaggcatgatggcaggcagctgtagtcccagctacccaggagactgagatcatgccactgcactccagcctgggcaacagagcgaggctcagtctcaaaaaaaagaaaaaaaaaaatgtaaaatgataaagtaatattataataagtggtataagagaaatcgaaagcattttaagaacttataaaagttaaatgcatgatatataagatatatataaaatcatatatatactataaaatgagatatttcactgcctcttgaaaccagctgcagaatccaactgggatagacccaaactctcaccatactgatctttaacttttaatgtggttcttctgtrtaaaagcctctgaactgccagtcctcttttgccagtcctttcaaatcatctgcctsaggtactgaatatgagaaaagtatccctctagttctatatggtacgtatctttcatgttcgggacttcaacagagatagtggatttcttccagtgcccagctttccatgtgacactgctgaacttactgagacatccgacacctttgggtacctctgactatagatagatcgtatgtgactttagataaattgaagggagrgtaaggaaactggacatagcaagaatgaagaggtgtgaagattcagtctgctaagcctaacataaagtgctttagaaaactggctccttggccttgtgaaatatgaataattttttaaaaaacaaaagattttagtgttttaatccctaagaacagttatgtgaagtgggagagaacctcagataaattcttagcctcaacttatgactcaaagtaagaaatttttatattttacttattctagcactaaattagactcacccatattcctattgaattgcttcctgaagcatgttattactacatcagctgtcgttggcagcctatctatcagagggtagaaaggtttctttttgaaattaaaatctcagcaaagccatctctaaaagtttaacaacctacaaattagaaactttctaaattccactgtcccatgcgtcaagttttagaatgatacaaaagaaattacagcttaagaacagtggctagcattcatttagtgtcacctaggagccaagcactgttcttcatttttacagagatcacctcatttcatcctcacaaatatcacaccatttaaaattttcttattyttttaaattgacaaataataattgtacacattcgtgrggtatgtggttatgctttgatacatattacgtatagtgatcagatcagggtaattagcatatccatcatctcaaacatttatcatttgtttgtgttgagaacactcartatcctccttctagctacttaagaccatataaggtattattgttaactatagtcatcctgtagtggtatggaacattagaacgtattcctcttacacttttagctgtaattttgtatcctttgacagtctcttcccattccccccttctccttcccctttccagcccctattagcccctgttctgcttttttacttctgagattaactttttttttttttgagacggagtctcgctctgtcacccaggctggagtgcagtggcgcgatcttggctcactgcaagctctgccttccgggttcacgccattctcctgcctcagcctcccgagtagctgggactacaggcgcctgccaccacgcccgtctaattttttgtatttttagtagagatggggtttcgccgtgttagccaggatggtcttgatctcctgacctcgtcatccacccgcctcggcctcccaaagtgctgggattacaggcgtgagccacctcgcccggccaagatgaacttttttaacagcaagttaagcaccgcatgttctcactcatatgtgaaaactaaaaatcaccctattttatagttgaagaaactgaagttttaaaaggctaagtaatgaccaagatcacacatatacacacagcacacacacatgcctgggagtcaaggattcaaacctaggcagtgtgactcctgaatctgccctctaccctacagcataaaatccaaataaactcatcatcactggggcagctacagttccttgccttcatcaggcaacaggattttggatctgagcacagcatttttcagggcatataattgagcacttttcggtcattctcaagaatacagtgagtgactactgtaagggaggccgtggttcaccctcgagacacacagcagcgaacaagcaggcctctgccatcactgcacgaacactccagaaggggggcagagtaacccagtaaactcataaggcattccagcagcagcaagtgctgtgaaagaaatgaaggtggctgatgggatgcggtgatcaggaagcctgctccaaagagatgacatttggtctccgataggagcctgagaaggagccagtagggaaggctggggaaagagtgctccggaccaagggaacaaatgccctggtgaggacagccagatgtgcctaagttgcaggaagaagtccagggtaactggaacrtcargtggaagagttagctcagaggcttgggccgcagccggggtatgccggacacagggcctatagtcacygttagtttggctaaataaaattgaaaatcatggagggtttaaactgattcatattttctaactgactctytggttggtagaagcctattgcagcaggacagaggagagatgcgggtgcctcaggaggatatggcggagatgagggagtgagtcagattcgagytgggttcagaggcaggtccaaaaccctgcagtggttccatgtggaggcgaggggaggaaaggaatcagggatgactctgtggattcagctataccgtttgtgaggacaacggtgccaatctctgaaatgaggaagacggaaaaggaataggattggagacagaaggaattaagtgctgtcttttgaacgtgctgkgtgtgtgtgtgtgtgtgtgtgtgtgtctgtgtgtgtatttggagatggagtctcgctctgtcactcaggctggagtgtaatgccgcgatctcggctcactgcaacctccrcctcctgggttcaagtgattcttttgcctcagcctcccaartagctgggactacagtcacgagccaccatgccyggctaatttttgtatttttagtaaagatggggttttgccatggtggcyaggctggtctcaaactcctgacctcaagtgatccgcccaccttggcctcccaaagtgctagaattacaggcatgagccactgcgtccagcctgaacatgctgtgtttgaaatctctatttagctagccaygtggatgtgtcaggccrgtagttgcaaatataaacatagatgtctagagcacagggtgagaatgctgtatttggggagcatcaggatatagatggtaactaaagctgtgggactggatacacctccagacagatcagctagggaggaagagggaatggggacgaggaagggatctgaatctgagcctgggatactcctgcctgttgaaagaggagttgccagcaaacaagataagaaagaaaagcccccagggtgtgagagaaaccaggcagaatgctgtaagggaaggcaagagaaagagtttccagaagacagggctgcaagatgtgtctgctgctgctgagagctccaatcagatgcgggccaggagaaaaccactggggtcagcaacagtggatgttgtcagcgattttagcaagaggagcttgaggaatctgaacagggttaaagatcaaatggtactggttgagaaaagtttgtgaaatatggaaagagaagcagcaaataacatacttgttggagaagtttggcttaactgccaactaagagataggagctggtatctggaatggagcatggggtcaaaaagatggtttttacaatgtgtgtgttttcaggcaggatttactagaatataggctgaagaagatagtgcaagagagaaaaatagatcatgcaggagggaggagagtaagatggggaaaggaaatggaatctgtactagatggygagagggtaccctcaagaactagctggcagagagagcttctcaagaatttcctatgtaaataggaaagatccatgtaaacatgtaaaataaatacagacatctcaagttcccaccactgcctccccctgtgattgtaaaatgaattacacagactgtcaaatgaatagctttatgagctccgaagagggcaagatggtggccctgaaatgtgggatgaaggaagctggattaaaccggaccttgtggataaagaggattggggtcaggaggagaggagggcagggcagcgttaaaaaggtagggaagagaaccagcgtgacacagattggcaggtcctgttagacacaggttctcagtgctacgaataatcagataaratgtgtgcccctttgaagtgacattgtgaagcgtgctgtgaygtgaaatgtggaattgttcctggtaatcacatagggtaaagcccttggtgctgggaccactgccgtgcctctctaggcagagattccattcactgrgttttgaaaacttttggagaaaagctaaaccagtttaactttggccattcttcgtgttatctattttaaaataacctttcatggtattttatgatggctctatgctttggtttcttcatctggagaaaatcagattgttgtaagggttgagtgggttaatccactggggtggtgcctagcacacagtgtaggccattattatttttaaataccatatttttatttttaaaaagctaaaatgtacggataaaaagaagatataaaaatcatgtctaggccaggcatggtggctcatgcctataatcccagcactttgggaggctgaggcagaaaaatcacttagtccagaagttcaagaccagctggagcaacatagtgagacccccatctctataaaaaataaaaaaaatagccaggcatggtggtgcacacctgtagtcccagctacttggaaggctgaggtgggagggtcacttgagcccagcaggtcaaggcagaagtagctgggatggcaccaccgcactccagcttgggtgacagagtgagaccctgtctcaaaaaataaaaataaaaaagcatgtctaatcctagtgccttatgacagtcactcttaatatttttatctttccaattttttcctacatgtgagtacttaaattttgctgtatctactcttttgaacttttttttttaatttaacctattctgtcacagacatctacccatgtcattaaacgttctttaaaaccattctaattcctttgtagttgttcaacatttataaagttatgtgtcactgacattgcttcggttactctgatctgtaaatgattcttgctgtattggtaattatagcaactgatttaaaagagaggaaaagaagtaaataatagaaatgagagaaaggatgtatttattcctcaaatcttgaaaggcaaaatatgtrtaaaaggataaactccatgactcagttcagtaaagtcagttagagatttaaaacatatctatataatatatattatgtttattttatttttatatgtttatatattttacttatatgtattaattatatatatttaaaaaaaaattttttttttgaaragtctcgctctgtcgctctgttgcccaggatggagtgtggtggcgtgatctcggctcactgcaagctccacctcctgggttcacaccattctcctgcctcagcctcccaagtagctgggactaccatgcccatctaatttttttttttttgtagttttagtagagatggggtttcaccgtgttagccaggatggtctcgatctcctgaccttgtgatccgcccacctcggcctcccaaagtgctgggattacaggtgtgagccaccgcgcccagccagtaggtttttaaaatgaaaagggagcaccttttaaagtcaaggcaggagactcatttttgtgacatttccactggccaaagcctggagcaggatcgtcggcgtgtgattccttcactctgcgtgggargcagaataggaaaagttaaggtttaggcaggtaactgttaggtgaacagatgatagtaactacaagggctagaacatgtaactctttcagactggagcctacatccaaaactgaaagtgacggttaataaatatggagaaagacgttaacctgagactccgtagtgttgtttttttttttttctcctgaccagcaggtgcaaagcagatgactgaagtgggaacagagtgggagagggcgggagaatcgccctgaggggaaggcagggaactggctggcacagagagggagatttgatctgcccccgtctccaagagctgctctgacacctgagatgtaaggtgactttcagatttcacaagggttggacaggtgtgcaaaagctagcaaatgtgtgtttattcagggggccccagcctttttggcccctttttcctttgaaaatcagctggaaaaaagtagcaagaatggctttctaaagagaggtcatcagaaggaattttttgttttttaatgattgaaacattttgaatcaggtgaaaagtaactgttttctctccccaatttttcgctaccttgagagtgtgtgtgataacttccatatggtttttgccacccctccccttctcctaaatgcttttatgattccagtaaaatggtctcccgggtcacccccgaccttctgatcgccttcactggcttttcctcagggtttctcagctccctgcatctcctcatcacagagaaaacttctcctggcccataacttgtttttgatggtttgttgtttgccccgtttgtgtccctactccgccagttmatcctgcacactgacttttccagcccccactctcggtgcctacacgaccaggttcaaacaagtcagccccagcgtcccagtcctgcctgtgtttcgagatttgcctcccgttactgcccccagcctgctgctcctctctccttgcacgatctgcgcctcgtccccagacaagctttaccacttcccagttctctttcttcattccagcagaagcctggaaggtgtgtatgaggaaggcatgaagmtaggccctctgaggaactcacacgcgcgcacctcatgaaggccacctggaggtcacgtggtgtgggggcaaggtcacagaccacgaggctcaacaacaacagtgctttgcctgtcaccactgctttctagttatgtgaccttcaattacttcacctcttggttccttggtgtccttgtctataaattggrcataattcacttcttagtgaggttcattatgatgatgattaaatgaggtaaagtgcccagcagacgccgggcacataggacatatgcaaaaattggtagttccctttctaacccagcgtccatcctcagggaactcatcattttctagcaggcrtgatattctaggtgacgtgagtgctgtaaacaagaacgctgggagttcagagaaagagcacagaayagtgcctgggctgaccgtggaagatagcgtatcaagaaaagatggataggagtttcctaaggagtgaaaactatgactaaggtacaggcatggaaaacaagcagggagagagagtccccactttctctgtgtcctaggggaggcttccttgccaccatccttaaaattgcagccccccgggaagtcccatcacagcccgtgcccctcycctgcttgatgactttcctgcttcactcaccaccgtatcatgtacttatttctcttctgtgtcctcacaagatcagaggggtatgtgtgtgtgtgtgtgtggtgtacgtagtggatgtgggtatggtgtgtgggggggtatggtgtgcgtgtgtggtgtgtgtggtgtgtcgtgtgggtgtggcgtgtgtgtggtggtgtggtgaggtgtgtatgtgtggtgtgtgtatgtgcagtgggtgtggcagggtgtgtgtggtgtgtgtgtgggtgtgatgtgtgtggtgtgggtacggtgtgtgcgtggtgtgggtatgtgtagcatgggtatagtgtgtggtgtgtgtgtgtggtgtgggtgtgtgtaggtgcgtgtgtggtggggtgagtatggatgtgtttggggtgtttatggtgggtgtgtgtgtgtgtgtggtggggtgagtatggatgtggtgtgtggggggtgtgtgtgcatggtgtgtggtggggtgtgtgtgtggtggggtgagtatggatgtgtgtggggtgtgtgtgtgtggtgtgtgtggggtgtgtgtgtggtgtgtggtggggtgtgtgtggtggggtgagtatggatgtgtgtggggggtgtgtgtgtggtgtgcggtggggggtatatgtgtgtggtgggtgtgtggtggggtgagtatggatgtgtgtgggtgtgtgtgtgtgtgtggtgtgctgtggggtgtgtgcgtgtggtagggtatggatgtgtggggtgtgtgtgtggtggggtgagtatggacgtgtgtgggggggtgtggtgtgtggtggggtgtgtgtgtttgtgtgtggtggggtatgtatggatatggtgtgtggggagtgtgtggtggggtgtgtgtgtgtgtcctcttcactgcgtatcccccttacttatggagtgcacaccattagatgtgcaggtgaactcagctctctgacttaaggttacatgacttggaagtccaagaagttctggcagatagaggtagaaaatgaagttggaaatcatgagggccattaaatgacaaatttggggttttttattttactgagtagagattctaatcatctcatttttaacagggaaagtgtgctctaggaaaatctagccgacacagggagggcaacgatgaatttgagaaggaggagatgggaagacaagaatggattgtggtagtccaggccccaggcaaagaaagcctacactggatggtagacacagaaataaataggaagggacagcaaacattccagcagagttacctaaacatgactgttttcaatgtcaataaaagactggaaaacatatcacagtagagtcactggaaggaataccaggcagctatccaagagaatgcagtgaacgtatgtattctaaatctactgataggcaaaagtagccaaatgccaagtgaacatgccatgtgaatccatttgtataaatatgtacataaatgtaaatatgttgatatgctgtattaaacttatccaggccatgtgcggtggctcacgcctgtaatcccagcactttgggaggccgaggtgggcagatcacttgaggtcaggagttcgagaccagcctggccaacatggtgaaaccccatctctgctaaaaaaaaaaaaaaatacaaaaattagcagggcgaggtggcacatgcctgtaatcccagccactcagaaggcaggagaatcacttgaacccaggaggcagaggttgcagtgagccaagattgcgccactgcactccagcctgggtgacagagcaagattccgtctcaaaaaaaaaaaaaaaamaaaaaaaaaaacacttatctggaacaatacacatcagacttaatgtggtatttgggaatggcatttaggaaggtacccactgatctttactattaggctgcacaattctgtgctatatggttattttcctataagcatgtattattatataaaagaatataagtgacccaagttaaatgtatcttggaaacattaagaatatactttgaaccattgcaattttttaagtctgtcacctaaaatctcttgacatgaaatatgtaaacatcaaaatctgactgcagtttaccttttgactaaaaatctggtaagttgaccctttatttaagaacagtaataatgcaagtgaatttgggaaggcatgatccaaaatcaaaggccctcttattcaagaacagaaccactgtcatactcagttttacccaggagccagaaagcatcagtccttaccctgcaatctctggagaaggttacagtttaaaagcgtgggtattcttcacacaaacacacacacatctttatttcatagtttatagccatttaaaagtacggttgtgatgaccacagtgataaaaatgaaaytaataataaatctgtcattaaaagtatattgctttgaagaaagctatttatagtagtactttttaaaaatgagtttctgaagaaacagtacaaataaaaaattgtctgagcctgaatcactctattttattgtgtgtttyggtcaaaaagactttgtatgttattttatttaagggaaatataattctttgcaattattatagataacactgatatcttaactttaccattatctttaatactttcccaggtgccagttcaacagattctgacagtgaaagtttagctttcaaatcaagagctggagctatgccacagtaagtgcctacaattccatcgattatgtggaaacaaagaatggcaacagaatggttggggtatgaaaccatgtttgctgtgctttgaagaaaaaagtcaactgatgttaatcagagatcaaatactgaggttggaacacaatttttttttttttttttttttttgagacagggtctcactctgtcacccaggttgaagtacggtggtgcgacatggctcactgaagccttgacctcccaggctcaagtggtcctcctactttagcctcccaagtagctgggattataggcatacaccaccacacctggctaatctttttttattttttggtagagatggggtctcactgtgttgtccaggctcatctggaactcttggactcaagcgatcctcctgcctcagcttcccaaattgttgggagggattataggcatgagccaacatgtccagcccgaacacaatttttaacttgtaaatttgaactttgaagtctgcatttcatcattgatatgccagaattttaccatatgcaatgttagtttcaaagacagccatctaatttattataaatgtatggaaagagaagtcacattaagagaaaatcaattaaatcattactaaaatgtgaggaccaatttatttatgcaagttggaaaatatctaattaggccagaagtaggttctcctttggatacgatctatatttatttagatcttgtacccgaaattcacaaaacttagttattcctacaaagacataccaattattaaaatgttaatatcttaattatttggcaaaaataaaatctaccagaaattcctattatggaaaagtccataaatattgagtctgttctaataaatttmttttatctgctagtatgtacataaaaattatatccattcagcatcaaataatcagtgatgcttaaaggatcttctaaggttattttaccacccctggtttttataaggagctcaagtttagtgaagttacatggcttgcttcagatttcacagccagctacttgacaaagctgggcctagaaatcaactcttcttaatcttctctaaatatctcactaacttatatgcactaagaaaacacaaaaattccaagataccgacaacaaaattagaaaccagaaaaaagaacagctgttagacttaaaatagacaaccaaaactttgagttaaatataggaccctaaccctaaacatttcaaatctctgcttatcaataaagattggattttttccaaatattttctcttaggattttcaagtttaatacgttagcatcttcaacagcgtctcagttacatctagctacttttcttttactcatgttttgattttgcttaatgtctataaggtacattctataaggtacatgtatatactgaccacagctattctagctgtaggttatgcattcccattgtggaagcaattacagttgaagcggattgcgtatacaaaaagaaacccagcttttctgttgaaacgtttcaaggaattatttctgctaaaaaaaaaaamcaaaaaaacgaaamcaaaaaatattctgactaaacactcaccttcctattttccagagctcaaaagaaaacaacttctgtttccttgacaataggatcatcatctccaaagacaggggtgaccacagctgtgattcaaccactgtctgtccctgtgcaacaggtaagtatgctttgagccagagcccataaggggtcgaactcatcagcaaacttgtggattttaagaatatgactttgattctaactagtatactcccttgaaatattttctaagtggacacaaaattcagagcaaagaaaattgtaggtaatgtttctcctttcagttcactaaaaacaacctttaaccaaaaccacactgccaattagtcaacatttgcatttccattgggaacttctttctctaacagctaataatctgataaactggtgtctgttttagctgtaactatttgattattccctcacatgtgtatgctctttcatatagccaaatttattagctcattacaaattaaaagacaagtctgcataccarcaaaaagctttcccactcctaaaagctaaacaaataagaaaaaacaactcaaattccttgacttcaccatgctttttgatcttgcttttattttattgtaagactgctatagccatgaaagaacaataatataaactactggaaagtagttgtaatgaatttactttgcaaacacaaacaatatgaacttcttttaaaaaaaaaagtagaaaaccattacatctggatgtctctaaatcatggtttaatgaatatgttcaaagacaacactcacagaaaggttttcccccacagtctkgaaatgtaaactcattcctaagtaatgagtatgtcttataagtatcaccatgtcctccctcagcctttattacctattgaatgctcaggggtgtttcagccactatagaggccaataggtgctatcgatatgtggaaaatacaaacagtagagagaagacatttgggtccataaacttgaatcaacaagtatcagttactcagagatggcatatatagtacatatttcctttaaaccccttaatcagagtggaatttatagaaatatttgattaaatcagtgggcattttttggtatttgatgtttaaatattgataaatatttattgagtgcttagtacggtgctaggcatttcatgacaggaaaaaatgtcacccaccccattcccaaatggggtgaatgtgacagaatgtatttagatgtaagacagaagcctaggaaatagagagatacacacacatctagatatgtaaataccataataatgtaaagagtgaatttttaaatggattaaattctacaaagacatggaatggaaggtaatttacccyatgtttatagttgggagaatgaagcacccagagaaactccatcgctttattattgcaggcaatgtgacatcaagtaatgctctggaaccagactccctgggtttgaatcccagttctatcacttcctaacggagggaccttaagcaaataaaatgtaacccttcaagccgagtttcttcatctgtaaaatgaagatgataacactatgtatctcataagtttgtcctgaagatccagtgagttaatcttcatatgacacttggaacagtccctggcatagagtaaatattaatactataagagtgttcacatattcttgggacataaaaagacagtgaaaagtgraacccagacctcttgaatcacaggccagtaaagtcttccagggttaatgaataaactccattagcatcctagcatctctaccgctctgccamaattcttcatgatgtcctgtggcatatttagacacacgataccagatcaccatcatcttgggttaagaagctaacaaccacttacataagtgaataaatccagatcatttaaaaataagtgatmgtacacaaagaaatattttccattcactactctgaaatccttatatttctccagagatgaatgtcattsaataggtattttagcacgtttcttttttgcacgtcaataaaaaaaaattcttttctctcctttcccataatccctatatcaaaaaagagtacaagttaaataagataggtagatgtttgataatttaccctccagtgccaatagccaatggcttttatgcattgaatccaaactgtatttaaaaataaaatacattgtctacgagaactttaaaaaagacgcatrtggaagtcccacacacagaaatccatttggtaatarcatttaaaagctcgtggatccccaaggacccagggaacttttaccttgaatatccttttgaacagagaagagtaacagatgtgaaatgaggaagtggaacawtgtctgtactgtaagagcagacgagcaaaatgatgtatggtggtactttcattcactcatttccttcaagtgggtgatccccataatgaaaggtttcttcagcccatcttttaggcaatttatatatttagaatttgatccatatgtctctgcttttgcaggttcacagtccaacttcatatctctgccgacctgatggaaccactactgcctactttcctcctgtttttacaaaggtctgacatctggaagtctcattctctgtgtttgctttggtccttaaatttcatttacatgtggcttcgtgtagcaatctttaaaaattaaaaggaacagattagtaggctgattaccatggttacctttgggactaaatagrtatttgttgaacgactgccrtgtgactrtaatcttgtgatgggttctgagagatgtgagcaggaacytgatagagcctaaaatctagtgrgaaagccaagacagatagaaaaaaawawaaaaaaaaaaaaaacctgctgtgtaggaaattgcttaggagatctagcaagttttatagaaattcagaaaaactgactaattttccatttgtcctgagtccggaatttgcattgccaggctgaatgacatccatttcattggtcagcctctcaagtcagaaatgcttccatatagcatktcttctctttctttttccttttyccttccttttttttagagaaaattataaaactttattaaaagacattttaaaaggcccaaataaatggagacatatgmcatgcttgcagactaayagaccgtataaagccatgactccctgattaatctgtatttaatgtaatctggctaaaattcyagcagcttcctgggtttttttgttttggtttggtttgktttttttactttaaattctgggatacacgtgcagaatgtgctsgtttgttatgtaggtatacacgtgccatggtgrtttgctgcacctatcaacccgtcawctaggttttaagccctgcatgcattaggtatttgtcctaatgctatccctccccttgtcccccacctcccgacaggccccaggtgtgtgatgttcccctcccggtgtccatgtgttctcattgttcaactcccacttatragtaagaacattcagtgtttggttttctgttcctgtgttagtttgctgagaatgatggtttccagcttcatccatgtccctgcaaaggacatgaattcattcttttttatgcytgcatagtattccatagtgtatatgagccacatttaaaaatatggaacgcttcaygaatttgcatgtcatccttgtgcagaggycatgctaatcttctctgtatcatctcgatyttagtatatatgagctgccaaagcaagcacaggttcctggtttttaattgtttgtttgatatggaatttagcaacctgattcaaaaagttgtgtggaggaaaaaagtggctaagaatagccaggatacacctgaggaaggaaaataaggtagtgttaggaaggagtgggatttgtcctataagatagcaagacgttttaaaggtatagtaattaggacagtatggtrctggtacaaggctagagaaattgatgtgtaatcggagtagagcccacaaagtttctgaatacctacagaaacttgcaaattgctggagaaagaatgaattcttcagcagaggtgaaaaagtatccagttggactcctacctcatacttttcacgacaaacaattcctagtaaactaaagacaaatgtgaaagcaaatctataaaacttttgtgaggcagtaaagaaaagcatttttgtaatctccatagaaggagtgattttttttcccttcagctggttgaatccaagctttataaaatatcttttcataagcagttatagtatttccagttgggcacaggcaacaaatgataacaggtggtaacaacttggaaactaccctcctagctagactactaaaaaagaagttatgtaaaaccctgcctaaaaccatgtcaatctgataaccaatgaagtcttcctttgatgtttagaacagaaaatgtttacagaggggtggacactccacatttaggatgtagtttaagagttttgcacaagcagcttcccaaggtcatcaccagaaagggtgtgttgtccaatgtattggtatccaagacacagttgatttgggggtgccagggcccaacacgcctcttggtttaaacaaataaagtccatgctggtggcacaagggaaggaaaagaggaagcaaagatttgctttctttcactaccgggctttcctgcatgggtctggcatgtgtagatattatggaattcctcctgggcaccaagaggaactctcaaatactaagtacaaaatcctgtttcctcccttgcaatccagctcccgcaacatagactttctattagtggtctttcccccttccccaraagataaccatgaagcattctttgtgctaacagcacagctttaaagagaagtaaaccaaaactctgttctttatataggttgatttttaagarctctcaaactgtcaattcactggaagctcagagccactgaaagctcagagccwctagaagctcagagccactggaagctcagagccacttctccagccttccactttctgtgtctggaccatggaacatctctcttctgcagggctgttcccttccttgatgcatctgcttttccctttctcactttaggcagcttctgtctctgatttgcagggtccttcttaggcctggtctctggttttggaggggtaggtttagaaaataatcctgctgatctcctctgtaactcaaactagcctttactttgtcactcatagcaccttcactgggctttctcttaggcatgatgatgacagtgaatggcaggtgggctggctttcatagtccaagggttacctccatctgttttctcatgctactctggaagagattcctaggtctcacagctggtcagaggcagagccagtgctcctgcctgcaggccacctggcagactggtggaccacaggactgtgggtagcatggacgtacatgtgacatttcttcccaaatagacccctccaaagaatcacaatgtcaggtggacttgatggtatggccagaggggtccttgtawggatcctgaaacccccagggcccccagatcctacacaaagtagatgatccaggttgccaggtgcatcctgtaaaggttgactttcagtctcctttggggctccttgttatgttcccgaaggttctcctaatggcttactatgtttagccatggcttttgccaagataaaaatgttagctccaggaggatccaaatggcaatcctggaataactgtggagctttgactgattaagttacttggcatctacccatttcctacatctttgactttccgacactgaaaaaaaaaaatgcataatcttaggaataaatcaaagtctcttttggtgcctcaaasctgaagcatgaaaaatattttggtgccatttgtagtctatcctgaacagcttcctggacaagcctagagacatttaataggttaatccgtagaagctggaccccataagtgacacttaccctgttttgatctaataaattagctattctatggacccagtcacaaaggaagaaaaatatgatttaaaaccagagattttctccatttaaaaatacggaagaagaaagaacgcaatcagaaatagttgatcatctaaaccttgtcacttaaagacattctagttaactaccaaaatgtctrtcaaatgtcttctcagacttcacattagacttttatagttcttctgccaatgtcataggttttagaattccctcagggttttagcacacttactgcaggacattggttacagaattggttttttccaggacatcatttattgtcccatcagataatttaaacacacatgcatacaaacaaacaaaacaaytcacacttcctaatgaatgtgaatttgtttgcttttggtgtatatatggataaattatgtttgagttattttgagagtcctacaccttacattcgatccaatattcyttttttttttttttttttttttttttttttttgagatggagtcttgctctgtcacccaggctgaagtgcaatggtgtgatcttggctcactgcaacctctgcctcctgagttcaagtgattttcctgttccagcctcctcggtagctgggattacaggtgtytgccaccacgaccggstaatttttgtatttttagtaragacaggatttcgccatgttggtcaggctggtctcgaactgctgaccctaggcgacccacccaccttggcctcccaaagagctggaattacagatgtgagccaccacacctggcctagatccaatattctatagtcagaagtttaaatagtaagaaagtttaaaaggccctattgctagttaattctggagaaggagggtagagagaagatatatgtgagggaaatattaatgtcctgatatttaagaacaagtataaaagctttacttctttgtatctataaaaccaaattaatttctgatctgttggattgtaaagatttattggtctggagttggagtgcggtgagggacaacaaaggcaggagcaaagaaggaggaaatgaaggtcaataaggaagaagtacagcatgtttcattactttactcagaatctcaaaatgagaaaatgtagaaaccccttagcttaataaacttgacataggaaactagtcaggcagaggtggtacatgaaaaggctgaggcatgtgaaaacaaatgcatgtcttttttctcttcttgtctggttttcataagaatctacttttatttagagtgtggtcgtttcaagaaattcacattccacctgcttccttttaaatgtagataaagaaagttaacattggttaccatcaaattccataaatgcagagcagtcagtgcaaatttgcagacaggccagaaagctctacaggacttatggtacactttactcattttatgacttggagagggtgaaaagctgataatcggtgggtccaaaggtgtttatccttacctgagtcagtgctaattatttgatgatgcaagttttgcattttgtgtttgtatctgttttgtctgaggtttggaatttttattctgtgttgtgaaattgcttaaaaatgcaccaaagtctgatggggttttccttgaatttccttgaatttcaggaactgcaaaacacagccgtggcggaaggccaggtggtggttctggagtgccgggtccgtggggcaccccctctgcaggtccagtggtttcggcaagggagtgaaatccaagactctccagatttccgaattctacagaaaagtaaggagaagtgcccatgtccccaaatctgaccattttattctctccagcttcaagaaaaccaagaagggctaagtcattaagatgaattgatctctatgttcaaagagtggcaggatcagataatctacagtgtgttgaaatccagtaaatggaaactatgaccyccttgacactctaatgaaagtcatatattctttcgtcttaaaaaatgcatatatacatttgtactcaaatttgcatgaataattttaggaggtttaccaggctcctagagcccatctatgaactgcagttggaaaaatttcttagtgtaagttgatacaggaatttgagtttttatatttatagaaatataaaccgatctatcactttatatcttttgtatgatggagtttgactgtaacatttcttcagacatgtcctagacaaggtaatggaaaggaacaagtaggttttttttaattaaatggaaccccattctaatactttgttctaatttatttttttcatgtggcaaacagaacctagatctacagctgaacctggtaagaatatttttagggtttttttttttggtggtgggggagcagataatgtatcttttgggtctcaatagttctttctttctaycttaaagccgtaagcagaacaatgtttttgtggctccctggaaatgtgaaacccccttaaaaacaatatcttctttatcatggagtctgtacactgcatkttacatcaacgtctttattagcaaaacattaagttccattcagacaagaaggtcaagctcagtgacttcatgctttttaaaatacagtcttttaggctcagaaagcaaactaagctgatgatgaaaaaacatcctcctaaaattccagtagagaaggacaatctactgcctatttgtactgatcagaacccactaacaaccccagcttagaaatgtgtctcaaatgagagcagctcaaagaggtaagcaaaatggacccccaggtgtttctcatttgtgtgccctgagccataaacttttactattctgcaagcatgaagaaagtcatcttgcccccagatcactcttaattatcaggtcgtttgaccagatcacagtgctatgtgatccaggagcctcgggccyagctgttccctgcctcagacatattgcgtatttatggttcctcgtggagtgaaatagtgtttgtaaaggaaacaaatttttgtctaggtacttcatcgtatgtcctcctcaagactattttcttttgtatttttcccatcagcagggtcacaatttcacttatttctgaacaaagggtagaaaaacaagtcattttcctgtttctcctgtttgttcctctgcttcagtgtcaagcagatcttgccacatgtgtcttargagccatgaccttgctctgactcttcttgggggaactggaaagtcctctgtgggccactgcaggtcagattactgcagtcagtccctgaacttctcacatctgtgtactggatctttaaaagcagagtttgaccctattaggatccaacgtttaagggaggctgagtagcatccttagggaacaactggaattgatctgctgccctcctgtcatgaattataagcagagcaagtccccccacttaatgtgtcagtcatcacatcaaatactgtagtcactttccagactgtggaaatatacaactgcatattttgtctgtgaaatgtcattgaataaaattgcataatgctacttttctaakacatggattttctgagattaaatctgctgcatgagctaatatgggaatcctgtagggagttagggcacatcttgtgcatttgctattttaaacaactttagataggtagatataaaagtaggaaccaaatatcttttatctacaagaaatagctttttatgtgaaacaaacctataaagcaatttatgtcttttaatgctttgtgtataaataaggctaaaattttgagccaaaaattgtaaaaatgttactgctagcatgaaataaggcagcttttgacattgcgttttggattcggagtgaactcctgcaactctcttttcatcgtgttgttatacgttgtcatcatgcacataggtgatgatgatttatcaaatgtaggttggaaaatcacaaacagtcatctgcaaagtcaaaacattagttagaaactgcacagcttagttttcagtatgtgtatatttgaaaagggaaaacactcagaatatgctagctaaggaagaataaatttggatgaggagggaggaaggaaacatctcccccgcaccctgcgtcttcatcacttatcctacatacrctccttctgtttcagatctcccccgcgccctgcatcttcatcacttaccctacatacactccttctgtttcacatctaccctgcgccctgcgtcttcatcacttatcctacatacrctccttctgtttcagatctccccygcgccctgcatcttcatcacttaccctacatacactccttctgtttcacatctaccctgcgccctgtgtccttatcacttaccctatatacactccttctgtttcagttagtttgttgctttgcttctaaactatagttttgattgtgaattatttaataaaattagtcctaaacagcttcatggaatcacctgacctctagaacgtacttaaatgccatttgctttaatgtagcaaaatcatgcagaaaagagcaagatatggaaggccttccttttaaatcccttgtcctagcaatgcagaaaaatgtttcctctttgtgttcactgaattttcttatttacatagttagatctgaaagcgtttaagaaaacagattccttcattccaactacaataatagcattttctgaaaaatttctcctggcagagaaatatttctagcaaatctgtcaatacaccaaaaaatattatatagtcaggagctattaaaaactaacacaatgagttttcctgacctacgatgatttctccacaattgtttttaccatgacacgacgagactttcttctttcccttttacagcgttaaaatgctgtgcttcaggaaatcagccgttggcatgcagcattaaataaaatccatgatcatgttttttaaacaaaaaaaacccttaaacacatgaatgaccacgcaagtgactaattatatgagttgttgtgagtaagaacttcagaacaagcaaatgttacagtgtatttgtgcttaaacaatgttttgtcatgcctgtcaaaactaggtatgattcttttactagttgccaagtgttttccttacattgaccttgaagttgctatgtcagaggaaaaaacaaaaaataaatatgactgtttaccttctttaaatgacctgattgactgttatatctaatggacctctgagctattaaactatatagaagtatgtaggaaccggcttccctaaaaactgttttcttagccattgttaagtggaaggaagaaaaacagacgtgactacaatacatctgaggcaagagataaattttataggactaggtcagtgatattttccaaatgctaaaacataaatagcctttgaaattcaggaaaacatttaagcattctgtttttattactstctcttcctaccctcttcctttcctctgagagagtcactcttgctcgctctctccccctcctctctgtctctttctctcccctcacctccttcattccctgcctctcttcctctttctccatctcactccctcattctttttatttattttttctttactcttctctttactctcttctctttactctcttccttattcatgggcaagatgttttaaagctccagaaataaagttgaaattccctagtacctagatatagccccattaggaattagatatttagataaagaaggaaatagcaggttgtctccaaatggatctgtgcaactgaaacaggtttttcttgtcactgctgcgtcgtatctgtctgatgtgttttacactcccctctctgtctagacagaagtcagcttgcatcacaaatcttttcagactgttttgtgaattaatagctagtcagcttacttaagaccaacatccgtttgtcatagtaccttctctggccttctttgaaattctgactttgtactgatagactccttcaaagactagtctgggggtgggggacacagaagactcatttgacagctgttaatactcagtctcttactcactcagctgtctggaaacagccacaaactgtgttgagttacttctatagcactgtctaatagcgtgcaaaattaaaaacacaaaaacgcgtcttactggttgtggaattatacatataaaagtatattgcctcctgctttcaattttaatttctgctcaccagtgtgacccatgctagatcttgtacggtagagtctaggctttgattctctgattcaaaatataaagtaagttacacttagttaaatgtactaaggtgctgttgtaggagggcaatgatagggatgtttcttgagatcccagtagattgtatgcagtaaaaacttaatgcatgttctaggttaggacggtgggttgaacaaaagtaggccatatgaaacttatagttcaccaagagtgtgacaggatgccctggggtgccacaccacgctgacagggatgctgtaatatatttgaaatttttttatgcaaacacattcaaacttgacatttgacagatatgacacaatgactggcttgaactagttcagaatttcaacattagatcaccctccattcttttctatgacataatctctttgtgaaactgagtttttgatgagtgtgtgataaaaagtaagtacctcatgaaaatccatgtaaaacatgaaatgaggytggctcatccaatctgattccaagagaggtggtacagtgcccagcagatgcacacagccattagtaagaaatagtggttatttaagaataaaataatagtatttttctttcaatttatatgtatttttaaacactaaattgtttaggcataaacacttattaagttctttggaaataactacataacaaacataactattagttatgtcttttggcttaggagcaccatttaaaaagtattgagaaacttagagtcccatgaaccaagaaagtttgttttactctctagaggaggagtgtccaatcttttgaattccctgggccacactggaagaagaattacctggggtcacatataaaatacactaacactaatcatagcttttgagcttaaaaaaaaaatctcataatgttttaggaaagtttatgaatttatgttgggccacattcaaagctgtcctgggccacatgtggctcagaggccacgggttggacaagcttgctctagagggagagggggaagactcaagacacatttgagtacacagcaaaaagaaaattgagtgggttttgaaattcttaatgccaaatgtgcctatttccagtcctcttccaggactcacattccagcctgctggcctatgaactttacctctctcagcagagactgaaggactcttctctgggcaatttaaacatcccgagagaaaaaataaatccaaagataatgatttgggagtttctcttataaagatgccacttagattgtgctatagggaaggccaaagtggataagttcctctcttatactcagagcttaataaactcccatccctgtcagacaagcagagagaaaaggcatctggagaaaacctctagcatgaatgatatagaaaaaaacaagtgaccttcctaaaagggaactttgagaaaatgggtttgcaaagagaggaaaatgtaaaacaaaaacaaacaaacaaaatctctcttaaaggatccaaggaaatcattccacccaagaaataaaaatgaaaagctagaaaaaaaaaagagaggggaggacacttgtaaaacagagttcttgaaatgaaaagttcatagcagaaataaaacgagcagatgtcccacaaagtacagcaaaatgacgaagaagggatgtaagagagaaaaggcaacaaagttagagatgcatagctgaataactgggattccagaaggagagaagaaagaagcggcgagagacaggattatcaatgaaataatttttttaaagttccccaaactgaaagttatcaattgccagatggaaaaatccactgattgcacaacrtatggaataaacccagacccaggcacgtcatcatgaaattcagaatttccaggacaaggagatcatgttataagtgtcctgggagaaaacatcaggttatatatacaaactagcaagatgcaaatagcttaggccttctcagcagtcacactagacacaacgagacaatgaagcaagaacttcaaaattgtgaaaaaagttacctacaacttggaattctgcccctaggcaaaacttcacatggaaatctagcaaagatattttcagacttgtaagatcccccaaattttcctctggaaccygacagtgtgctccaccacagcaagagaattaatccagaaaggacaagatgtagaggtggggtacaggaagcaggagatcacatagaagcaagaggcaaagggcatccccaggagggtgacagctgtgcatcaggaatkaagggcaagttcagattgaagcctcgtgtctcgagggacaaatgcaatgaggctttcatcattaggaggttcattgcctctggtccagcccgtcttttatttggatgacagaatggcagggcggtaagcctgacccagaaatctcatgtctacttgggctgtcctgctctcccckccatggactgtcacctggatcagctgggaacactcatcttacccccacagaagcgttctgctttggtcagtcctgacatctagaagtcggccatgttgagtttaattaacccatctatgcctgaggttgcaattttttgaatttttgcaatcagaccttgacgatgaccttgagcagtaggatataagtaactcccaaatgcttagcrttccaataatggaacactaggcataaatgggtaaaaagcagaaaataccagcaatctcattgctggatatatacccaaaagaaaggaagtcagtatatcaaatagatatctgcactcccatgtttgttgcagcactattcacaatagttaagatttggaagcaacctaagtatccatcaacagatgcatggctaaaggaaatgtggtacatatactcgatggagtactattcagccataagaaggaatgagatcctatcatttgcaacaacatggatggaactggagctcattatgttaagtgaaataaggcagacacagaaagacaaacatcacatgttcttacttatttgtgtgatctaaaaatcgaaacagtagaaggatggctaccagaggctgggaggggtattgagaggctgtggggggagatgcagatggttaattggtacaaaaatatagttagaaagaaagaataagacctagtatttgatagcacracagggtgactgtagtcaataagaaattaattgtacattttaaaataactataasagtgtaattggattgtttaattggagtataattggattgaataactaaaagrataaatattataggggacagataccctgttctccatgatgtgattatttcacactgcatgcccttatcaaaacatgtcatgtacccagtaaatatatatacttcctatgtaaccacaattttttttaatttaaaraaacaaaatatggagataccatctccagcaacaactatattcctgctggatgcccacatgaggccccaccagactgctccaccgagtgagccttatatttcccagattcactcaagaccttacccactgagtgccccgtggggcttttggaaactttcaaggacgttgaatctagttgatggcccaagatggttcttgggatctttttcctaacagtgacaaggttactttttctttagtcagccaagatttgtgctcactacttaatttttttaaactaaagaatgcattttttaaggatacatacatatatggtaaacacataaagaaaatcgaaggaattattatctcaaaggagaaggaaaattaaattggggagagcctatgaggtatttctaaagcactgggaatgttttatttcatagacttgaggatagatacacaggggttcatttcactgttattcgttaaatggtacattttaaatatccttctttatatatgatattaaatacaattgacaatttaaaaaaatcctttgcaatttttttcttttctgagacagagtcttgatctgttgcccaggctgcagtgcagtggcatgatcttggttcactgcaacctctgccttccaggttcaagtgattctcctgccttagcctcccaagtagctggaattacaggcatccaccaccacgcccagctaatctttgtatttttagtagagatgggattttgccatgttggccaggctggtctcgagctgctgacctcaggtgatccaccagcctcagcctcccaaagtgctaggattacaggcgtgagttactgcacccagcctcctgtgcaaatattgatacaagcattacatttacccacactggatttcatcttgttgattttagctcagagttcttttttaccaactgtgttagccaaaccatgtggtgtgaaaggtaaaagctggatttcttttttagggacttgggacaaaaaaaaaaaaaacagttgcaaaggaagccatttatgaaaatgtccccttattacccagggaacccagtaatcttatccttgctgcctcatcattttatgagtttccacaaacaaaatggtttttatttgtatttaaccaagtgttaagtaggtccaggaacttgaatgcaattcaaggttgccttctgggagatattgctgtgattttgtaatttttaggtaactataaagaacagaatttatcaccagtaaaaacagtttctgatttagtaatttattaaatgccctcaaatcaaaaccttaggaaatccaaacatgggaaaattagattaaaatgcatcataattaaggttattaataactttaaatttttccatttatactggagacagtttctttagtacagataagtaagtctctaaatccctttatgtgacataagcagtcattttctgatttccattccttaccaaaatttattttacagatgtcttatacgtctttgttcragtgagatgccaccagatgaaaattcagtattacaacctggctcatctcatttcctcatggctttcttcatttttataatgtcagaaccatacaagctatgatgcttctttctctcaacaaaatgtgagcctcttgtcactgttggatgaacttttctttgagaagaaaagctgaggaacctgtgggacattgtattcaaattttatctagttaaaaaaaaattatctagcaaaaattgctgtgacatttcaatgcatgaggatcactaaaagaacatcctagtgtttattttttatttttctatttttgttctttaattctgtaatttttctaaatgttccacgtgaactatatacaggcatataccttatttatgcatggaagtattcctataaaatcatacacaatgaattctgctcaatcaactttgaaacacacaaaggaagcttgtaggaaaattggtcttactgagaattcctttagaaaatagtctttttacaaagcaagtgtttttttccttcatctaaatttcatgcatgcatttatttaaacataattatagggagcctaccatgtgtgagatgctaagaatatggccatgaacaaaaattgtttctgcactcagaggttrtatttcagcgaaccagaaactaacaaactaattacacaataaattatttagcagggtgaggtggcacatagtcccagctacccaggaggctgaggcaggaggattgcttgagcccaggagttcaaggctgcagtgagctatgatcatgccacttcactccagcctgggcaacagtgaaacccctgtttctaaaaaaaagattttaaaaataaaataaaacaaaattgcaccagctttatttgattttgtgattgtcttctactgtctgttaaaatctcccactagaggcctgggcaacagagcaagaccctacctttatgagtcaatagatagatagatattatttaattacagttgtgatgatattatttgtgatagatattatttcattacagttgtgatgtctccaaaaaagtttaccatcctaaaattgctttaaggtggtcaaactgattaagtttaataaaaaaagggattctctgagaaagtaatgtttgtggggaaacataagactgagtaggagagtgccaagtactccaggakgagccagggcttagaaacttaccagagcgtggcttcacaaggagctgccccagagcccatgtgcccagtgctcagaaggcaatgatgtgcgaggcacagaaggagcctgacaagaagcagggacctaattatgcagggcttcagagaccatgttaaaattttttattttatcctcaaagtcatggaaggatgggaggatgataaaatttcrttcttattaagagagccctctgatttagaaggggcaactgtatattcatcctcaggttttctgaaaaatggcrtgactaaaagaaccacaaagtcgtagaagcatcagaaggaattctttacaagtcatcaagatcatcgatctaaaaccactttatattatccctactgaataaaattgtatcctgtttttaaatgtaggtttcaaggcacagaattatgtctatgtttatagttgaagcatcctcaggcattgaactggcaaggacatttctctcagtgttcccagaacctctgtctttccaggtgtagatgattcaaggttgagagaagtgcttcccagagagcactaagccctgggaagatagtccagggacgtaagccctggttgtctaggcaggaagtgcccaggtgttactgaaagctgagaagccttcaccactcacagcagcatctgcgaagggagaaggaaagtgacttagcactgcctgaagcccactactccaaacctcgtaagaaggggctgttaagcatgtccacattacaagcttatatcctgttccaatgtgtcttatacctcagaggacatattgccctccccttgtgcagatgaataattctcatgaatcatttggataatgagaataattagttttttcagcatcgggaaactccatttcctgacttaaatctttcattaccttactttaygtaagatttcttgtgtcctgaactaggaaaaatgcagaactagagaggctagaaaaaaagaacatcagctctagaaaaaaagaacatcagctctagaaaaaaagaacatgtgctctagaaaaacagaccatcagctgggtgtagtggctcactcctgtaatcccagcactttgggaggctgaggcgggtggatcacctgaggtcaggagttcgagaccagcctgaccaacatggtgaaaccctgtctctactaaaaatacaaaaaaagttagctgggcatggtggtgtgcacctgtaattccagctacttgggaggctgaggcaggagaatcacttgaatctggaagrcggaggttgcagtgagccaagatagcaccattgcactccagcctgggcgacaagtgaaactccatctcaaaaagaaagaaaaaaagaacatgcgtgtcggagatgggacgccaaccttcagcattttggctctagcattaattagccaggaccctgagagaatcactttgaacacccaggattcattgatattgagcctgaagaaatgagggatttgacctaatcaatctcttacagtactgatcttgtatgtccccttctatggctaaccacacttttaactcattctgtaaccatatgcattcaatttaaaatttcccaatcccttgtaactttccagagacatctcactttccaaatgattaatcttttttttaactttgtttttattttatttatttatttattttatttatttatttatttattttttattattatactttaagttttagggtacatgtgcacattgtgcaggttagttacatatgtatacatgtgccatgctggtgcgctgcacccactaactcgtcatctagcattaggtatatctcccaatgctatccctcccccctccccccaccccacaacagtccccagagtgtgatattccccttcctgtgtccatgtaatctcattgttcagttcccacctatgagtgagaatatgcggtgtttggttttttgttcttgcgatagtttactgagaatgatgatttccaatttcatccatgtccctacaaaggacatgaactcatcattgtttatggctgcatagtattccatggtgtatatgtgccacattttcttaatccagtctatcattgttggacatttgggttggttccaagtctttgctattgtgaatagtgccgcaataaacatacgtgtgcatgtgtctttatagcagcatgatttatagtcctttgggtatatacccagtaatgggatggctgggtcaaatgatatttccagttctagatccctgaggaatcgccacactgacttccgcaatggttgaactagtttacagtcccaccaacagtgtaaaagtgttcctatttctccacatcctctccagcacctgttgtttcctgactttttaatgattgccattctaactggtgtgagatggtatctcattgtggttttgatttgcatttctctgatggccagtgatgatgagcattttttcatgtgtcttttggctgcataaatgtcttcttttgagaagtgtctgttcatatcctttgcccactttttgatggggttgtttgtttttttcttgtaaatttgtttgagttcattgtagattctggatattagccctttgtcagatgagtaggttgcgaacattttctcccattctgtaggttgcctgttcactctgatggtagtttcttttgccgtgcagaagctctttagtttaattagatcccatgtgtcaattttggcttttgttgccattgcttttggtgttttaagacatgaagtccttgcccatgcaggctacagtaaccaaaacagcatggtaytggtaccaaaacagatatatggatcaatggaacagaacagagccctcagaaataacgccacatatctacaactatctgatctttgacaaacctgagaaaaacargcaatggggaaaggattccctatttaataaatggtgctgggaaaactggctagccatatgtagaaagctgaaactggatcccttccttacaccttatacaaaaattaattcaagatggattaaagacttaaacattagacctaaaaccataaaaaccctagaagaaaacctaggcattaccattcatgacayaggcatggacaatttttaattatttaaaagatagagaaccatatacctgtttgtaccttaaaaaatttgtatgttgactggacgcggtggctcacgcctgtaatcccagcactttgggaggctgaggcgggtggatcacgaggtgaggagatccagaccatcctggctaacacagtgaaaccccgtctctactaaaaatacaaaaaaattagccgggcgggcgcctgtagtcccagctactgggcaggctgaggcaggagaatggcatgaacccgggaggcggagcttgcagtgagccgagattgcgccactgcacctccagcctgggcgacagcacgagactctgtctcaaaaaaaaaaaaaaaaaaaaaatgtgtatgttgtatttgtattacctattcaaaaaaataaaaatttttaaatggtagagataaatcttaagaataaagaaaaagaagacaattcaggaaactacatttggttctgtttttacagactcaataggaggggttgcaaagctatcaagacaagtgggagaaaaagaccaaaaagatcctgtctttgtgattataggatcattatagtagatcaaatatttggtcaattttttaaaatactgcataatgaactagaattttaatttcagaagtttgaaataaacttttaatttttaattgcctaaaaattttaattctatattatatttcctacttacatcttatatttcaaaaaatttttgccaaagaaagtttctggcaaacatttttgcttgcaggtgacttaactgcgtttttaagacagcacaattttgaaggaaagagagaaggagggcttaaaaaactataccattgtcatgtgggcattaagagtgtaagcttttggagttggaatagacctgatgattttctmattcaagtttaattcatgtaaaagatgtgtctcaaccccttgataagattacaggmaactcaaaggcaggaaccattaattatctccatatctgcagctataaaatattaagacagtgtactcttaaaaatgcttaacaagtgggtagatgactataaaagcttctaggagctgttcatggatggagattccagactttatctcaaaaaattttctcgacatcttaaaacctttccttaacaagtctttccattcatttaacccaccttctgctctcttgctgcaattaggaaccgtttgttcttattgttcttcaagaaagatgtagaatgtttgagcaacttcttcctgattttaatgtctttgcatttatgatacccatcacagtgttttacttaaattagcatttttggctttctttttttcttttgagacagagtttcacttttgttgcccaggctggagtgcagtggcccgatcttggctcactgcaacctctgcctcccgggttcaagcaattctcctgcctcagcctctcaartagctgggattacaggcacctgccaccatgcctggctaatttttttgtgtgtgtttttaggagagatggggtttcaccatgttgcccaggttggtcttgaactcctgacctcaagtgatccgcctgcctcggcctcccaaagtgctgggattacaggcatgagccactgcgcctggccttaaattaccataaatggatgaatacttaatatagatttcattgccctttactttttttattatggttaaagaaacatataacatgaaatctaccttcttaaatttttaagtatacactacagtattgttaactstatgcttaatgttgtgcagcagatgtctagaacgttttcatcttgcatgagtgaaactatgcccactgaacagcaactgccattcctccttgcccccaatgcttggcagccagcattcgaccttctgcttctaagagtatgactagtttagatacctcttaagtggaattttgcagtatttctcctactgtcattgccctttacttttacctcaactaaataatttagattcaatgtagaacacaaaattaataatagaacataaagaataaactaagtttttcacaccccattcaaacatcaaattgaataatatgctgaaagaataaggtgtgtgtttttacaactcttgcaattttaaacctgtattaatatatcttagaaatgagttgaccttgagctacactacaatgctaaactctcagaagcttataatcaccgtagtcctcagatctttcctaaggaacgtaacattttgacacagaagaatccttgcattttagcttttaacaaaatctcaagcagtctgttaaccagattaccatcagcatcatcagaaatggggaaaaggaaaggctttggtgggtggggcagggggttgataaaacctaagaatggagtgagaaatcgagtaaaactcaatgatgcctataggccatattacttggtaatacaaaaaaatagatatatatatttgacccaataacacgacatcaaaaactatatagtttgatartacttggacaaattttgaaatgatagatacatgaatttttttctagaatcaaatacaacaaactctgcatttgcctttgaagagtgagattattaaggggtattaggtatataaagggaattcgattataaagagaaacatttacactttattttatacttagtgtttaatttatttacttttgcacttattaatttgatgtataggtaaaaaattaaaatatttaaagctctcttcaatagacaaaaatgttttttttaaacatatcacttttacctacagttagtacttcttttgtttcagggtttaaaacataaaatgttttgaaacagatttgctgattttcattattgatggtctgaaacgtttgctcttagaaggatgttagtgaaggaggtttatcttatcaaattctatgagttagctactgcaatacagtagagcaccccaaaatttagttgcttaaagcagcaaccataattcggtgggtgaactatttggcttgacctcagctgggtggtttttgtggtctgtgccaggctaggctgaccacagctgggctgtctcagtgcggccatggtcagctgccaggatgacgaggaacgagtcagttagtctaggatggtctcttttggaagggcttatgtctgctccatatggtctcttcctcctacaggttagcacagccttgttcacytaagggttcatcagggttccaagagatggagcagaaacaggccaggcctctcaaggatttggctcagaattggccaacaacatcactttcaccacattctaggctaaagcaactcacagggccagcccaggttcaacggatggggaaatagactctgccactttatgaaggtgttgcagaggcacattaaaaagaggcatgtctacaaaggaaggaataattgcagccattattactaagaaatgtacaatacacggtcttatgctacccccaaaatttgtgaataaccaatagaatcactttgtgggaacccgaaatatatcacttttcttaacgtttgcccacataattatctttatactggtacaatataagcaattattcaactagtaaaactaattaatactctagatatagcttccttttaatgttaacagctaacactggctatgaagcatttgctctgtgccaggcaatgtcctaagcacagtatgtcatatcacaaaagtaggtggtggttagggtttggagtctggaccccagcttgctttgaatccctatgttagtatttattagctgtgtgaccttgggcaagtgaattaaccttattgtgcttccattttctacctataaaatgggctaataataaacttacataactcataagattgacatgatgattagatttaatctatgttaagtgctggtaacaatacctagtgtatagtaagggttatatagctgtcagctcttgttatcgtcatcatcatcatcatcatccccctcacaatwaccgtgtggtggttaattttgtgtgtcatgcatgactaatacaaactctgtgaggtagcttctattattgtctccattttacggagaagaacactgaagttcagggagactgaccaaagtcacaaaggcaagatgtggcaggaccctcattcaagccctggcagctgtttcgagtctgggcttttcatgccctacaacactgccatgccacttaacagtaccttccagaatagttgtctacaggtcaaacatatacaggtcatgttcttttttcccccgtggttaacatttcagaagagctttattttccccactgcttggtttgcagctgagcagatataagaggtagctgtatgtacagaaagaactctgacatgcaatcagcttaactcctacatgcaaaatayagagctgcacacttgcagacatctcgttttatcttcacagataacccattgggtatgtattatccccattttatagatgaggacaccgagactgctcttgtccaacatcacaaagaatgggtctacctccaaagctttttctgctaggcagaattgctaaattaaatgtaaagagattctattgtaaacacttttgtaaagtgaatctgtaataatcataacctaatttgtttgttgtggaaaggtggagggtctcacttcttaaaagtgacttcatggttcaactctgatgaatgattctgttctcttcacttccagaggagatttgcaccctagttatcgctgagactttccctgaagatgcagggatctttacatgttcagcaagaaatgattatggatcagcaaccagcactgcccagctggttgtcacctcaggtatgtgaggagtaaaaaaaatgactgggttctgttccccagcaccagtgtggatggccacagcagaaaggcaccgtcctggccaggtgcagtggctcacacctgtaatcccagcactttgggaggccgaggcaggcagatcacttgaggtgaagagttcgagaccagcctggttaacatggtgaaaccctgtctctaccaaaaatacaaaaattagctgagtgtggtggtgcgtgcctgtaatcccagctactctggaggctgaggcaggagaatcacttgaacccagaaggtggatgtggccgtgagccaagatcatcccactgcactccagcctgggtgacagagtcagactccatcaaggaaggaaggaaggaaggaaggaaggaaggaaggaagggagggagggagggagggagggagggagggagggcagtcagtcagtcagtcagtcaatctatctatctatctaactaaataaattaataaatgaatgaatgaatgaaggaatgaaggaaggctggcaggcagacagacagtcagccagtcagtcacccaccaaaccaacaactctaccgccccccattcctgcgggtgggcgaccgggcgtaccaccaccctccttagctacatatcaacgcatcgtcgcaagctaccagcgtggcaaccttcgtagggagatatgctgttttgtttcgttgcgccaattgactagtgggagtggaggtctggacattgtatggcggcgccggcgagctattcggggcgtggcctctgcgaacgaacgaggtgagcgagcgactcgtccgatcggcgataggcgcggatggctagagaaaatgagataaagaagagacggccagccatgcggggcgagaagggaggcaagtacagacaacataatgtggagaaagtccggaannnnnnnnnnnnnnnnnnnnatttctctgtgttgctatatatttagcttttttttttattattttatctgagttgtttgagattgttggtatgttattattttataaatttgtgaatgtattgtggcgtattatggttctggggtggtaggcatgtgtctttgatatccttttagttttgtcttggacaggtttgttttttctatttggatatttatgttgtttttttttttgttcgtgtttccttgctgcgatattttgtatttcgctgtcttgttttctatcttttttgctttattattgtaatttttccattttagttattgatgattgattattgtgcttgttttttttgctgggttgttgttagattgggtggcttggtgagtgattgtttgattaattcatttatttcgtatgtagttttgttagtggctttttgatttcttattttgcttttatggtttgtctgcagtcgtttctgaatattcgccagataatagttgtgtactgtgacctagtctgagtaggagggatggtgagaaggaaggaaggaagtaagtaaggaaggaaggaaggaaggaagggacaaagcgactgtcccaggaagagagctcagctcagccttcaggaatctggccactccaggagtcaccctaacaatctaagttcatcgtgaaacaaaggctttaggggaggggagaagaaggagtgaagtggagatgacaaacaaaaagataatgatcgtgtagcaactgaacacacagggggctttctttaaaatcgtgcagtcttggtcttggaaacgatggagctggtttcctaacatcctcccgctaacctagaatcatattcacattggaaagccacctctgcatcagaggtgcagtcactttctcagcagtgccaacacatgagatctggagatacttgtacaaataagccattgtctgatccactgttgaaacttctgaaaaggtaatacaagataagccttcttgtataaaatgtaatacaagataaaactcagagaagctgtaaaggccttcaaactcaaatttcaytgatagtctgtatcaatgatagtatataactaatatgaaaaagaaagcaatgtattgtattattgaagtcaattttcaaaaatatatggatattttctaaactcaaaaacttaccactagggaaggcaatatgaaacagctttttttctttttcttttctttttatttgtctgttttctagttactaatgagcattagcttactttaattgcctcatctctgccattcatcttaaagatatttttaaaatatgtttttgaccaagcctggaacataatgtacatagtagggaatcaataaatgggtcatttgttaaatgatacggacttggagagaacaactgaattgtacttggattccttcagaagagcaagaacttggtgctaggtggcagcagagacacaaccaaaacttatttagggaccttagagtggcaactgtaaatgctttttcatcttcattaagaaaagaaatgggagggtcatcttaagtgggaaatggtttctgtgaatgactactgtaagtgctgaaagaaacctaagtgtcaggatcagagttacagagcaaagaggaccccagcgttttgattccgagttggcttcaacactgtcccatcaaatggccatagcaggagtgcagtgtttaaacaatatggccaaaaccctgggctctataagtctgagtggcaaaaatttgtgtgtaatattttccatttgtttctgcagtaaatctgctataggtcaaacataatcaacaaatattttatttctgagctttttgtttacctcaataagcatttttgagtgcatgccaggagctctgctgggctgtgtgggcaaggtgcagaatctaaaaaagacgtgatctcaagatgctttcagcctattgagggcaacaaataaaaatctctttcgtactgagttatagttggagcaatcacctaatatggaaaaaaatatttttatgagattatgaaattttacttggactccaaggtttaccttccctagctttagatgaatatccacataaaacctttacagcttgagccaatttgagtagtgacagctaggatgttcagtcggacccatggaccaaaacgtgagaggacaaagcattgttggttgatactgtttgtgttgtcactttttttgccaagttctatctttagctcttgtttggaatttttatgattcggtagctgggttccccaaatgtgagctcagtcaggaaatgaaacggtagcactcgttcaaaacaagcttgaaagaaccaggccctccagctggcagtgcttctgcgtcagatgagagcagcacaatcacctcttctttaacaacttcacacaacacagggattctcagaagactctgacagtgtgaaatcacttgttgaactagtggcatcttcttatgtttttcctctctttccccttccttagccaacactgaaaactgtagttacgagtcaatgggagaatccaacaatgaccacttccaacactttccacctccccctccaatcttggagacaagttccttggagttggcttcaaagaaaccatctgagatccagcaggtgaacaaccctgagttaggcctgagcagggcagcccttcaaatgcaattcaatgctgctgagagggaaacgaacggagtccatcccagccgtggagtaaatggactgattaacggcaaagctaacagtaataaatctcttccaacaccagctgtcctgctttcacccactaaggagccaccacctctgcttgccaaaccaaaactgtgagtatttctgcatggttttataataatttccatacccctgttacatttcctgtctggtgagaaaaaaacttttgcctgtattcaactatgtggcaagttggccttgactcatgggaccttgctgccaagtggtgtctttcaacaatataaaagacacctaaaaataaagaagggaaatgaaaagcttggtgaaatctgccctttgctgaaagctataactggttatggytgtgaaaatatctgtgcccagtgtgggcttccaacatacagctaaggatgtagccactccctggaggccatggaaaagggggatctactttcagccctttattaaaagcatttcaaaaagtgagtataagtactttgcatttgttactttaaatattaagtatcagtaagaagatctgatatagacaagcggggaaagactaaaaactgaggctggaaattcagggtgcagatcctggcagggcaatgaaactggagggaagcaggcttgtgggcaagaagagcgcccttcacaacacaggctacttggcttggaattccatggagctgcatatttccatgaataccatcttcacagttgatgtccattattttcttaggatgataaaccttgcatgagctgtttccattggcaccgcacagcagagagttgttatgaatggagccattacaatgtcagagagaggcagaaataaattagctcaaagggttctaccatagcgcaagagaccctgaattactgccctgccagaggttagtggaaatgtaagagtcatagtgaatgtgtatgtattctatgaggtcacattcccatgagaatgtatttgccagaacctaggaaagccccttctatttacccatatctgatgtttttgatttggggcaggaagggcttctttaggggttattctttatttccctagcattgactagcctactcttttctctctgtgatcagttcatttgttagaaatgttagaatttaaaagatatttgaattagaataacaccttacctttgtacatcactttattgtttactgagtgatttcatgaacaacattagactaatcaaataacaaaagcagtcaaaagaataccttaagttaagaaatgggctaacaattatataaaaccagacttctggacaatcttgggttgcagtttcaaaaatcgatatattgctaccctctacttaattttgcattgtgttctggctctcttttaagacagtagggctactcactaagcttgtacacaatagtgtgaaaggtgctggtgaacatttaatacctatgcgccatctccattcagaggctgaacaggtataatgagctaaaaaatggtgkccttaaaagagatttatgctcttgtagcagcaacccataaaattaattgccactgctgacttctttcatctttgcattttgaatatgtatttgcagtgcttttaatgaaacaagggacctgctctccagggagagaaagggcaaatgtgttgaatgactaggacttgactgtggtcttgattaagtaaagtctatctactctaatgggtatcataaattggaygtaaatcacaggagagcaaatacgaggagctgttaagaggcatctacagcccgtcttatctcaggagtttcaacagctctgcagcttttagctctgctttgcagccaggttaatgtatatggcaagggggtaatatctacagaatgtagacaaaacaacttcgcgttcattaagaggatgacagcttaagcacaagtttaaagaacatcaggatttgcttgtgagtkagataaaatatgaatatatataaatayataaatataaatataagataaaatataaaataagatgcagaaaaaatggacttaaatgtatgaggcccaaataaataggttactctcccttcatgaggaaatttaagggaaaaagcagaacacctaaccacaaaacccaacagcttagaaacaacatttacttgtactaggttttcccattgtttttttttttttttttttttttttcaaatcttcgtatgtttaaacatattcttagggaatcacttgatttttgttttttcgtgttgcatatttacctgccatttaactaggtaraaaataatatgtgatgatactttttaaatatatatttttaaatttycttatgatttagaatatgttattggattttgttttattacaaaatcagtggatgcttgatgtgacaattcaaacaacacagaggctattaaagtttatactctctgcttcccttcttccaacccagccctctgaaagttgtggtatggtgtattatcagagccttttctaaaaaaggtttttgcagtgttttcaaagttttctttcagtgtttgttcagttttcaaagtgctctttgcttccccatttccacccctctcaaaggtgtgatattctgtattatcacaaccttttctaaaaaatggtttgttcagtgttctcaaagttgtattattgatagagaaatactattgaatgacatctacaaataatgtagaacagcatctgagttattgataatgaatgactataggtaactgccaagtgaaattcttacacattcatttttttcttttcatacattgtgggaaaatatgagattttatttgcctcgtgtggtcagcaatgaaaaactatggtttgctcaaatcttcttttcatcggtttatgatttgattttctttcacaaaaggaaaggcttatatttggtggcgttatggcagtttgtgcatctccatcatttgtaaacaaactaataggaaacaattcggagggcgcaagtaataggaactaaaatatttactctcacaatgaattaatctgaaaatggtgtctgatgtgtcagatgtctgggggaaagaagatcattttcaaaaaaaaaaagaaaactgcattttttttctctcttgaatagctccaatactgattgcgggaaaagaaaaaaaaaattcaagaatgaaacaaaaacctggaagggccatgagctcttttctctaactaggcccagcccccaccctgtactgtccaacagaagtcgtcacctatagactcacagccatcccagacctccagccgagtcygtggtaccgctcataaagtaggggttcctggtccagtctatgatacctctcataaagtaggggttcctggctcagtctgtggtacctctcataaagtgagggttcctggcccagtctgtggtacctctcataaagtgggggttcctggcttagtatcgtggacgcatccacttcagctcctacatctccctttgtttctaacactctccctcaagtgtaagcagaagatagttaaatgtaggccatttggtgagtcccagatgwccygcacacaggatttgtgcaacgccttaccacccgctgtgggactgcgaagtgtgcttaaacgctgcacaagaaaaaattaatagcattatttctgcaactcagtggctgacactcacaatcttcaatcacatcatgaaagaagcaacacaatgcttaagtcataatcttaacaggaggaaaaaggagggaatgagcgtaaacctaacttatacactattcttttccttggttccttgctgccctctcattacaaatgatatttgaagatcaaaataaaggtagggctcactgtgaaaaatctctgcttctctttattcctaccaaaaaaacggtccttcagccagggcgcggtggctcacccctgtaatcccagtactttggaaggccaaggtgggcrgatcacgaggtcaggagatcgagaccatcctggctaacacagtgaaaccccatctcttctaaagatacaaaaaattagccgggcgtggtggcaggtgcctgtagtcccagctactcgggaggctgaggcaggagaatggcgtgaacccggagggcggagcctgcagtgagccgagatagcgccactgccctccaccctgggtgacagagcgacactccatctcaaaaaaaaaaaagtcaaaaccatagacatgcatggaatccccctaggaataagctctgaagggaaacctgtgaatggcaaaatgtggtaggcgatttgccaagcatatagaaaggcatggtcatgtttttccactgagctcacctcctacggcagatccaacaatatataaataacaatatgctgttttcaaatcccctttgttacttccttttttatcttcttcctttgtcttgtgggagaaaggtaggactctaagcctgtagacgagcaaaatgagaactccaaagggaggttactgaagggtgatgcgatgggcaagttcttaccctgggacagatcagcagataaaatgatgcttatttgttactctagtgccaaaaatatgtgcattaccgtgaaagtctgtgtccttttgcctgggaaaataataatgaaatgattgttaagtgtttacatgctaaatcaacagctccccttgctcctactcttactacttgctcttaccccagtctctaaagaagaaacagtattatgattttctatcttaaaagagtaaaacgatttcaggctgaatcaaccttttcaaaattactgcattttacaacctttgcttttctcttcctttctctcactcccaccctttgataccctattgttctgcaaatcctgtctccagagaaagacatagcctataaaatcattcatattgagctgttagggattgttagcatcacctcagtccagttctaggctaacaaagtaaagtacatcttaataagcaataataagcactgcacaaaatcaggaaaatatcatttcatgagatgatgtgtttgagagatagaagagaaggaaatagcagcctttatcattctctttattagtgaggttttccatatttggaaattcctgatgggtttcctccacactcctagacacaaattgaagtacaagttgttcccttgcctggaatgttccactccccagaatgttctgcctcttatggctggctcttacttgtctttcaaatctcagcttaatgtcaccacttccctgaccacccagtctaaagcagccacccagccatgttccaataactcatcctcattaattatcgcataccacataattatttccgacagttacttgctttttgttttttttaattgctccctgcctccaatattataatgtagcttcctgagaatgggaaccctgactgtcttatttcattgctctttcactaggaccctagaacagggcctgacaaatagtagatgctcaacgatgttttttgaatgaatgaagcaaaagcagaacaaaaaagaggaaaagaaagatctcccacctttagagcaacccccatttgatctgcctaacgttctttttttgtttttttgtttttttttgagatgaagttttgctttgtcacctaggctggagagcaatggagcaatgatgtgatcttggctcactgcaacctccacatcctgggtgcaagtcattctcctgcctcagcctcccgagtagctgggattacaggcacgtgccaccacccctggctaatttttgtacttttagtagagaccgggtttcaccatattggccaggctggtctcgaactcctgacctcaggtgatgcacccacctcggcctcccaaagtgctgggatatcaggtgtgagccaccatgcctggctgatctgcctttcacctagatataccataggacttctattttcaaaccccatcaactccagagttttcccacattacagtacttttccaactgacatcatttatcttgtaaaccaaatgagtatgaagaattaaataagaatctcatgggatagaattacattagaaaagtttgtccaagttacttaatttgggaacactttcaactccttcctcatttcttctgtgttctcatttgattagcatcttaatttaaaacattatgaaaaatgagacattcggaaggactaggaggacattttcactctctagtacatacttgcaatgtyagttggccacagtgcaatcacactgctatttcaaggtgtgtgtacttgacatgttaacaccccatcagatgccagacttgtggtgaagggccaagagcttctgtgctactcccttcctgtcctgtttatgttggactgcagcttcaactccaacgtgtggctttggcaatagaacttacaaagttgaacattatcccrtccttcaacctctactagttagggttcaagatctcactatattactgtttgacattagtatacaaatggtttcttaggttctgttcttgtataaaccttacctggttgattgaaaagcaaagcaaaataaaaacaaaaaggacaaagacaaggtaagcaaaaacaagttgggacaaaataactaacaaagggtcaaggaaatgtaatcattgaatgtacataaaagtattttaaaatctagcacacttttttttcttaaccaatatttctaattttttacatgtctgcaacctgtagacttaaatcatccgtaatttccatggaatttcatgtatgttcagttagctagccattactttcatttcttttcaacttaaatttgttttttctaggtaatacaatcacacagttaaaagtataaagaaatatatgcactgaaaagtctgcctctcggactcagtaaccagttgtcactgtcttgtgtatcctgccagagattgtttacatgcctatcaagcaaatatatacgtatatataaaatgtgtattttttcttttatttttagacaagtgcctacccaccacatatactgttctgcaccwtgccttttctatttagcagtagattttagagatgtttcatgtgagtaattaaaaagtcttatttttaagtgattgtatatatttattgtagaaatgattgataattcctttctctattgttgccaatctaattttttttttttttttttgagacrgagtctcgctctgttgcccaggctggagtgcagtggcatgacctcagttctctgcaacctccgcctcctgggttcaagtaattytcctgcctcagcctcctgagtagctggaattatggacgtgtaccacaacacctggctaatttttgtatttttagtagagacggggtttcaccatgttggtcaggctsgtctcaaactcccgacctcgtgacccacccgtcttgtcctcccaaagtgctgggattacaggcgtgagccactgctcccagccaccagtctaagtttcaatgacctaagtaattatcaaaagtaatcttctttttttttttttttttttttttgagaaaaattctcgctctgtcacccaggctggagtgcaatgacacaatctcggctcactgcaacctccgcctcctgggttcaagtgattctcctgcctcagcctcccaagtagctggaattacaggcacccgccaccttgcctggctaatttttttgtacttttagtagagacgaggtttcaccatgttggccaggctggtcttgaactcctcacctcaggtgatctgcccgccttggcctcctcaagtgctaggattacaggtgtgagccaccatgcccagccaaaagtattatttaaaaaagtttttcttacttgtattttaggttcrgggatacatgtgtacrttagttatatatttgcctgtcacaggggtttggtgtacagataattttgtcacctgggyaataagcatagtacccaatagataatttttctgatcctctccctcctcccgctctccaccctcaagcaggccttggtgtctgctgttcccctcctagtttccatgtgttcttgttgttaagctgtcacttctgagtaagaatatgtggtatttgtttttctgttcctgtgttagtttgcttaggatcatggcctccaactttgtccatgttgctgggaaagacatgatcttgttcctttatatggctgcatagtattccattgtgtatatgtaccacattttctttatccagtctaccattgatgggcattaggttgattccatgtctgtgctgttctgaatagtagaacaccattcatcccctcactgttagttgaacatctgcaaaatgctgggtaatgtggggtgctgaaaacacaaagatgaaagagacaagagcagtacctttgaataatctataacctggttatctctacgatgattttggcaagaacgtgcagatgcatacacatatacacaaaatgctgcacatctttcagcatcatacaaattttgtagaagaatggccaatccctaaattagattcagtgcaayccaaatgccttctcttcccactttaatgtttgaaagatacatcattcagtttttgattctgaagatttaatatgcaccagcttytgtttctggttaagtgattttcattatcctcgaaggctagtcaaataacaaagcaatttagtaatggcaaaagcataaagtgtggaccagaggggtcttcaaaatattagggaagatagagcagaaaaccatttttttcagtttgttgtkataaaattatacacacactctgagtcaccaaacacattggaggttgataaggaacataggagtagtcacgggtcctaattctgcagtacgtggctatgcgggtatgaactcttcataaatacaatgtgatgatgactttgcatttgcatttctcttcctcctttctctcactcccagtcttagatacccgattgttccataaatcttgtcttaagagaaaggcmtatcctataaactcattcatgtgaaggtatttgcattagcagtgttggtcttggatcactttgcaaacaacccttccctgaaaatgagaagtccaatcaaggagcttcctgaagtataaaacttttttaactaagtaataacatttaggtgcattcatcctcatgattttttaatgtaaatactggctctgacacagtgccacattcttagatattaggctaattgtgctttgctgtgccagtctcttggtgaatgtaatgtttaattacatttccagaagaaagctgagttctatttttatgattaggagttttatttgatgtctgaaatataattggaaatacttgcagataccctatctgtgtttgaagtggcactcaatcatccataagaaataccatatgtccatttcaaatattaggtgttttacatgaaggaatacatgatgataacaatatttcttcaacatatcttcattttacctaagtgcgtaggagagctcttttagtaattacaaagtaaggtgaaaatagtcatccctactgggtagagaccttttattttaaaagggggagtggctaagctcagagataagatggagccacatatgaacaatatgctcatagataaagctatgaatttgatggaaaatatgaacaatatagtgttaagtgaaaatagacaaaatgatatatgtaacttaatgtcaattttatgaaaaaataaaaaataatacactttaaccaactaaaatgtatattatatattagaagaaaatacaccaaagtgtaaccagtggttctttgagtgctggaaatttgggcagattatatcttctcattaactattcctgattttccaactttttgacataatgcttttataattacaaagtattattttaaaataaataggtacttttgatcctttctcttccrtcctccttcctccattaaacttcagttcatttgactgttcatcatggatgcttcttgttaaataatagttgcttgctaagtaagcttaattttgagcacattcagaagtggaatgctctggcactgaatgttctcacctcccgtgtgggatctccttctagaaaccaatgaccttcaggattccatctggatttttagaactcttcctaggaatccttccccagaaaatgtcctatattccaaaataactttactcytccacaaacactgttttccaacaacacctgcccccaccaaacaaaactcttatccctttaattgtacatctcaggtgtttaaatgaatrtgatatgaataagctatttatgtatatatgtatgtatgtattttcaagccagggtctcactctgccacccaggctggagtgcagtggtctgtcacagctcattgcaaccttgacctccctgggctcaggtgatcctcctgcctcagcctcccaagtagctgggactacaagtgcacaacaccacacccagctattttttttattttttgtagagatggagttttgccattgttgcccagccaggtctcaagcaatctgcctgccttggcctctcaaagtgttgagattatgagacgtgagccaccacacctggccaattttaaagttaaaagtaaaccaaatactttaaagaccaacatttacagtataatccatacaaggccttccacagaaagtaggatgaaaactttaccctcagagacaatggtgaaggagaaaagatgcaatgaaggcaagactaagattccaattcaaataacaataatgtcaggaaagtatgygatgaaggcatctgctgaaagaggaaagacagttgtggtaactgtgggtaatattacaaagcacgaaaagggtggagaactaagagagagaaagaataccaaaaaaggaatgtgtatatttcctggcaatcaagagaacccatttgaatttcaagagtgtaaacccacattcaattcagtgagcatggtttcatgactttatttcagcaataatgagcactgtgaaggtagaaacaggacatatgtctttggcagtactggcacagtgggatgttatggtatttaattagatgatccttgagaaacattactgagattatcagccaagccgtgtgtaggttcagaaaaggaaacagattcaacaagattaaggcttgaggggaaaagagaaaggaatcaagaaaatggaagttataccaagaatgaaaatggggagtgtcagatgagaaaatatggagagggagcagtggttgtgatcaaagagaggattctgaaagtttaaaaaacttaaactctttccaagtgataaaagaatgtaagatgcatctgttcgagtggatagtttaagtggaagttaaggtcgcaggagcagaggaagtggtcagggaaccatgaagccaggatgttagaaggaacattaacatggatggtggccaacagtgatggcagaaaaccaaatgctaaatagtaaagtcactgagaaaagtgaggaaatgaccaaggttgttggtgacaagcagggaagacagaatgactgtaggtggagtgcaccaacttcaaaagaggaacagatatttcgtagtgatggcaaaactcttctgagagttgccttgggaaacaaggaccctgcagaaccctccttgctcagaaggatactgaggaggctggagacatcatcagggacagccagacttcagttaagacaaagcatttcyaaggaaaaggtttgaggaagcagagkttggttagaaacagccaaggaatcccataggcaatagaagagatctagaaaagggattcaagggagaattggagaaggaagatgaggaggaagaaagctatagtgcagagttttgcactacgaacctctggatgctagagcagatacagaaattytgtgtcagcattcctactgtgttgtgctagagcacactactctgtaccatctgatgctgrgaagcaaaagcatcgtcctgaggatcacttgctgctatttcatgaagagtgactaagattacttgcagttggaaggaaatagagccatttccaatataattactacttactttttagcctcctatttattttagttacgtggtagcaccatgatccattttgtggttactaacctctaagtacgactttgagttgggcttttttttttttttttttttctggtggagtctcactctgttgccaggctggagtgcagtggtgtgatgtcagctcactgcaacctctgcctgcgaggttcaagcaattctcctgcctcagcctcccgaatagctgggattacaggcacgtgccaccgtgcccagctaatttttttgtatttctagtagagacagggtttcaccacgttgaccaggatggtcttgatctcttgacctcgtgttgaattgggtttttattgaacaagcccaattcctcatttgtgtattttaaaatgattgttctcaactaatgactctctaattcatatttgcttaatttcattttatgtttacaacttttactactagagaatttatttttgtctactacaggctgaaatacattaggttgacaatttttttaccattgatttattttttctgcaaatgtgtgagtttttcattcatactaatamatcacctaatagtgagaacattagttacagggaggtttattttaattggtttctattacaagtatgaaaccagagagttcattttctcaacaaatctgagagtgattgtttccttacctgactaaagtgatgattacacaaaccttgtggatgacagtggagtcaatgtggtttttaaaaaaccttttccatatgtgacaaggaattagatagtatgtcatttgattttaagaatgatgaacatattaaattgattctgtcaaatgtagatttttctaaaataagttggctggataaatcacgtcaatttgaacacacacatctttgcttcattattcaaagagaaaccataattacgatcagaacctcagattttgctctaggagcataccaggttcatgccttccaacctctgtatgtgaaggtttcctggtaggatgatactggctcctcttgcccaaggctgtcatgaggatgcacactcactgcaagggttttttatggtgctgagaggaaaggccttcataaatatgtacatttacttaatttctgtatctacattcccactgtgttttcctagagctcactrctgtacaccatctcgactctgaagccctgggaatgtctgctctatgctctgctccatttcacaatgttctttaggtctgttttgttatttaaatgtaatgatgtatgtatccacaataggtagcatttgagasactccagctgtgagcctctggatgtgaagctagtgaaacaattgaatgactaacagttgaatgcctagccaaatattttcacttcactttatatgtcagcaatggaaaagagtaggtgtagccatcgactcttcttttcgctcagagaagtttataaataggtcaaaaatgggtaattatatgcctcagctacaatttcaaacttctgctttcctagtaattgccattaaatgagtaagttgtaaaagatttctggaaagaccacaaatattttcttttccttgtttctttgttaaaatagttcatataccatctggtttcggggatgtatcattatgctcaatgtttgaaacaaaaaaaccctaaaagacataaaaggtggcttgagtacaatgcagtgaaaaagaacaatatattttattctctttaatttcttttttttttttttttttttttgagatggagtcttgctctgttgcccaggctggagtgcagtggtgcgatctctgctcactgcaagctccgcctcccgggttcacgccattctcctgcctcagcctcccgagtagctgggactacaggcacctgccaccacgcccggctaattttttgtatttttagtacagacggggtttcaccatgttggccargatggtctcgatttcctgacctcatgatccgcccgcctcggcctcccaaagtgctgggattacaggcgtgagccaccacacccagcctgttctctttaatttctaaaataaagttttagaaaaaactaaaactctaaaaagagtagcttagtcttccaaacagtgctagttacaggggcaaattcttgctccaggtgactgtttttatgtgccttcccttccctcatagccactgctttcttcaaagggcatcctctaactcaaatgtgaaatattcatgtgtatttttattctatcacaaaacaattttacacagataggattactcatgatgaagcattctagaacaacagcaagagtttcacttcatgtttgttgtaattattctatctttgaaaagcagaaatatatgtggttattatcataattaagacttcctgatactgaacagctgccttactggagagaaatgttaggaattttttatttttactaaaaactgtcagaagtttctaaaaggaattagatgaatcctgaaggtcctgtaacttgaaaagttgatttacgctgaggaccccattttcatcaaggtatcaactagagagaaacttgtatttttcttattttgcattacaataatgcatcttgcttttcttttttatgaagtgttcactttatttttattactccaggtacccaggatcattcatgctctcttctttamggtgttgtacaccttgtgttcagtagacatttttaatttttttcttctctgagacaaggtctcactctgttgtccatgcctggctaatttttttcttttttgtagagacagggtcttgctttgttgcccaggctggtttcaaactcctggcttcaagcgatcctctagccttagccttccaaagtgttgagattataggcatgagccaccacactcagcccagggttcagcagacactttgagaggtcagatagagttcatccttcaggcagatgagatgctgtccctttaaaaaaaaaaaatcaacttctattttagatataggggatacatgtgcaggtttgctacatgggtatattatacccatgtagtgaatgtagtatccaataggtagtttttcaacccacagcctcctccctttcttctccttctggtagttagcagtgtctgtcatttctacgtttatgtccatgtgtgctcaatgtttagctctcacttgtgagaacatgcagtatttggttttccatccctgcattaatttgcttaggattatggcctccagctccatccacattactgcaaagtacatgatttcattcttttatatggctgcatagtattacatgatgtatatgtaccacattgtctttatccagttgaccactgatgggcacctaggttgactctatgtctttgctactatgaatagtgctacagtgaacatactagtgcatgtgtcttcttggtataatgatctattttcctttgggtatatacccagtagtgggattgctgggttgaatggtagctctattttaagttctttgagaaatctccaagctgcttttcacaggggctgaactaatttacattcctaccaacagtatgtaagcattcccttttttccatagcctgaccagcatctgttgttttttgactttttaatagtagctgatgtgacatggtatctcatcatggttttgatttgcatttctctgatgattagtgataagcattttttcatatgtttgttggctgcttgtatgttttctttggagaagtgtctgttcatgtcctttgctcattttttaaatgggattcttttttatctgttgatttaagttccttataggttctggacatgagacctttgtttggtacatagtttgctaatattttctcccattctgtaggttgtctgtttacactgttgatagtttcttttgctgtacagaagttctttagtttaattagatcccacttgtcaatttttggttttgttgcaattgcttttggaaacttcaccaaaaatgatttgccaaagctgaggtcaagaaggttatttcctaggttttcttctaggattgttatagtttgaggtcttatatttaaatctttaatctatcttgagctaatttttgtatatggtgaaaggtaagggtctagttttattcttttgcatagggctagccagctatcccagcaccatttattgaatagggagtccttttccccattgcttgtttttgtcagccttgtcaaagatcaaatggttgtttgtggctttatttctgagctttctattgtgttccattggtttatgtatttgtttttgtaccagtaccatgctgttttggttactgtagcctagcagtatagcttgaagtcaagtaatgtgatacctccaactttgttctttttgtttgggattgctttggctatttgggttcttttttggttccatatgaattttagaatagttttttctaattctgtgaagaatgacattggtactttgacaggaatagcattgaatctgtaagttgctttgggtggtatgggtattttaacaatattgatctttccaatccattagcatggatgttttttcatttattcatgttgtctctgatttctttcagtagggttttatagttcttgtagagacctttcacctccttggttagctgtattcctaggtattttattttctttgtgaatattgtaaattggattgtgttcttgatttgactttcagtgtggacattactggtgtatagaaatgctgctgatttttgtacattgattttgtatcctgaaacctttctaaaattgtttatcaattctagtagccttttggtggagtctttaggaattttctagatatcgaatcatattatcagtgaaaagagataatttgaattccttttttccttttggatgccttttatttcgttttaattgtttttttattttcccataagttattgtggtacaggtggtatctaattacatgagtaagctctttagtggtaattcgtgagatcttggtgcacccatcacctgagcagtatacactacaccatatttgtagtattttatccctcgccctcctcccactcttccccccaaggccccaaggtccactgtatcattcttatgcctttgtggatgccttttatttctttctcttgcctgattgctctggctaggacatctgtgtcttgcctttctaagatgaagttctgttttaactcttggtgatagtagtaaatgacctaaataaattaggtccaactaatttagtaagcgacctaaataaattgtgttccaactaaaatgggaagtgaaatggataaaaagaaggtacacgttttaaattttgtccaatttcttggtctttttagtcagaacaaaggaggaagacaccagctgaattcagttctagggttttgctrggtactacatcatgggcaactactgtgcttttgctttggatctcaacctcaaactcctgggctcaagggatcctccaacctcagcctcctgagtagctgggactataggcatgcaccaccatmcctggctaattttttttttttttagagacggggtcttgctatgttgcccaggctggtcttgaactcctgggctcaagcagtcttcctgccttggcatcccaaggtgctaggattacagatgtaagccactgtgcctggcctgggcatcttcttaaacattgtttttctcatgacattttcctgctccaaaagtagtgcctcttaaaggcaggaaaactccctcccggaattccccatcattcattccacccttgactactgctccctaggatcaatgcacagttgttctcctaggacttcccttcaacatcattctcgtgtacttttaccctcttcttctcctggctcccttggttcctaagtgccatatatttcactttttattttatcgtctcatttaccagaagcacattctccagtagcttccaaagaaagggtacagaccacattaagcttctagaccctgcttgtctgaaaagtgtctttattctagcctcacactaaactgactgtttggctaggtttaagagtatgggtttttcctaagaacgttgaaggaattgcttcatattctagttcctagagttactgtagcaaaattcagtgccaatctggtttctaatcctgtatatgactgactttcattgtaaaactatctcttcacccctagtactttgaaatgttgtgatgatatgtaatatttttcagaaattatagaaaatagtgggccctttcaatctgaaaacactcatgtatwtacattctgaaaattttcttatttttaaatttcttctccattttccctgttctctctttgtgaaacttgtattattacawtaataaaactcctaattgatgttctcacttttttcttttgttgcctatttttattgtactttctttagacctcttcacctttgtcttccagaccttctgctgaatctgttatttytgctattgtatttttaatttccaagagttctttctcattctctatattctttcatggcattctgttctgtctcatggatgcaatcgtgtcctttgcctcatattaatcattggattttggaggagggaatcctattgttattgtcattttgttttgttttgtttttcccctgttccctgcattgtctctatttcttaaaattccttttttttgttgttgtttttctgtgtgtgcatttggactaaatttcatgttcgaggctttccataaacatggaaagcgtgatctttggcaccagcaagttgattggaaactatatgcttagctagaatgtgtcaatgggcaggctttaccctaggattgggcaagacccccaagtgccaatatcttcaggtcttgggttaatcagtttctctagaaagacagatattcagccaccttccttgggatggtgggggtggttgtgggggcaggtaacatgcttggcagacagcatttggagsctgagtaagggaagggggttggcttttatcatttagtagacatatgcatccatctaattccttacccccatttttcaccctcttctcttacctgttcattctgctgtgccagatgtttccgagtttgaaacccttttggctctccatctccataaagtgagctttctgtattctagagtagtagaggaggaatggttgactacctacaagaaatgggggaagggattcagctgccttcctacaaactttcagccagtcttcttgtactaagctccattcctcttccccaccttcagaggaatctagtgatcaaggtttctgctgctcacgttagcatccctcatgtttgattcactctctgtaggcacttgggttttcctctcctgataagtcagtgacaactcatccttttacttttaattccagtgaacttacagtttcacaatccgttgctctcagttttttcacgatgaagcaaggaacaaaaataaacacatccattcaatctgccatctttaagtggatgtcaatttatgagacttcacagcttgtttttgaagatgattctttccagctaaagaaagcagtataggacagacagaatctcccctattcccaagctagatgaccttagataagctactcagtgccccatttcagttccctcttcattaagagggaatcgtgacagtacctacttcacaggagtgtggtcacgtgaaataatgtgctagcacagggcatgccaaagggcagatagtccaattgatattatctgtctttgtttttgttattattaagacaatgttcacaatgaatcctttgttatttgacgcacatatagaaagtttcagaaataagcaatttgcaaaacttgcaaaaaactgtaagtgaattattcctctgctatgctgagttttcttcctccaccttcaagaagtggcaaggaaaaaaagatagaaaaatcactgaccaattagaagtttttgtttcaattcaraccaccctaaagttcctggaaattgcatatatgaactctagtaagctgaataccaaaaatgagagggaagtagctgataccaggctacagattgtgggctacaaaagattgataaacaagtggttcttttgtgcaaatttagayatgaaatcatgcagaaaacacttaacagaccactagacagaggattttatgagacatgttacacatggatggtgaaaggctgaaaattaatacttaacttgtcatgctttctgctttgaaatgctggagccctccaggaattttgttttaacaaccaatggagatatcattagggagatacttctgaattcgctgcatctcattctgtgacaaagtgctgcacaaagtaaaatgtacctaccactttcatccgagtttgtagcgttggacaaatccctattccacaatatcatgtgtacaaagagtttccgaagaacttgtggcatatttcttgtcagttctcttgaagttctcatttccccttttcctctcctacgggcaggtgattgattgacttagagtcagtgctgagtagtaaataacttaaaaaacaaatctagagatgatctggagaaggctcgaagaaatgtgatatgtattatctgggataggcctagaataacctgaatttacaatgaaggagcccagtagccttttctagaaagccgcttgctcttccactcttgtttcctcttaggcaagagaatatcactagaagctcagaaaattcaggattgattggaaatgtttaaaaagtgaaaataaacacaaatatctataaggctaggaacataaccagaaaactcagaaaaacataggggcttaaggatgttccaaaggtaaaaatgacctcaaagtgaatttctttcttttctaatctcgacgtaattcagttcttattcaagctgagactacccaaagacaaaaatgttgcactgatttaaaatatgactcatcagaacattaaaatacttatgatacagatttttatacaatccgatagtctattcctcacaactcattatttgctccctttaaaatatttcacaaagaaagtcttaaccagaacatgatcatgtaactaagagctccacattcagtagtaggataggtcagaagacttacagggatgttcctcatgcttacaaaaagaaatttgatattgtgtgataatacacgtaagctagaaacttgtggttaaaagaaatgtttaggactcatgtaagcataggttcttggtatctttttttaactgatatatcatagttgtcattttggggggtacatgtgatattttaatacatatataatgtgtaactattaagtcagggtaattgagatatctgtcacctcaaacatttatcttatgttgggaacattaaaattctcttcttttagctattttgaataatttattgttaactataatttccttactcttctatcaaatcctagaactttgtatttttgtacccattaaccaacttcttaatttaacctttaaataaaaatattttcattcctaaccctgaaattctacaaatttactgcttagggatgactcctgcatgttttctcttccttttaagtagacaagttctaaatcttagctgactttcattagccatttgactaatcccattttttaaaagtgtttgagatgggttgaaaaatatgaccaatgtgatgagtacaacttgatcataattgtaaaatattagtgtgctttaggtgttagcaattaagaaaatgtgaaatgttttatttcttttctttccttcccttttttttgaggggcgggggtgggtgggtagagacagggttttgctttgttgcccaggctggttttgaacttctggcttcaagcgatcctcccaccttagcctcctgaagggctgggattacagaaatgttttttgttgttgttgttggttttgttttatttttttgagacggagtctcgctcttttgcccwggccggactgcagtgggtgctatctyggctcactgcaagctccgcctcccaggttcatgccattctcctgcctcagcctcctgagtagctgggactacaggcgccygccaccgcacctggctaatttttttgtatttttagtagagacggggtttcaccatgttagccaggatgrtctcgatctcctgacctcgtgatctgcccgccttggcctcccaaagtgctgggattacaggcgttgagccaccacgcccggccacagaaatgttttaagtagtaacatgattgttaaaatctcaaatcctgagtatctgagatatcggtttgatacttagaaaatcatgagctctggaatcatttttcaaatgcctatctaggatttgaattggcatcttaattagtaacatcagtgttaactatggcaactcatttgtttcccaaaaaaatttactattttaaggttaaatataaaataacggtataagtcctgggtttgatttttttttttttaagtgtaaaaagttatctgtgttcagtaggtggagaagccavctacatcctgctgacacaaagctaatcagtggcttgacaactctagtcaaacatccacatagaatgtcttggccataatctatgtgtctcctgtattgtttttgttttaaaagatttgagaggaggggatgtggtggaggaatggtgcagctcgaaattgcacgtagttgccaattttcttttttctagtttgaacatatttctgctttgagcttctttcagctcaagtgagccattttcacctattatttcatctgtcttgctctgtcttcaatcttcattagccgttactatggataagctgctgtaaacgtttttaaaaatcaccctcaaggagtacaatattctattaaaaaatgacctttccaggaaactaactaatagcattagaaaattaacactattcctttaagcactaaaactgaaaaggagagaaggaggaggaggagccaggcatggtggcacacgcctgtagtcccagctacttgagaggctgagacaggaagatcacttgagcccaggagttcaaggttgcagtgagctatgatggcaccactgcactctagcatgggccacagagcaagaccccatctcttagagagagagagagagagaggagaaagaggagggagagggtgatgctagtagtrgtagtgtagtaaggatggcaatgttctgaaatgtctacttttctatgtaataactgaaatttttcttggaggctgagtcattctcatgaatatcaaagattgagcctgttattcattgaagagctcttgcaatataatatttgattctgtttgccccctaaacaatgtcttactcctatacaatcagcacggccactgagttcaaaagttatgtgctgtccccattggcagacaggcatccgcaccacagactagactgcctgtcccctgccctcactgctctcgccccactggccttttctcgaggtcccggccctcacttcatcagttccattcagtatatcccccaaacagcatttccactcagcctgccaaggagaaggaaagagagtatttagratacgtccttcactttcctgagagaacagctttaagaaaagaaaacgtcactcctactcatgttaaccacctattgccatataatagaacacattcttakgctctctgagcctgtctcttttcttcrtctcactgtttcttgacggttatgttgcaacctgaggcagagtgycagaaagagatgagagggatggcaaaaacccattcatactttgagactccttttctctaatttttaaagctttttctctccttccattagatactgttgtttctgcgtgcttctagtatacatagtcaacaatcatgttggtgaaaactccctcagggcctttttttcttttttcttgttctttctcttttcttcctggctgggggcagtatttcagctttgggttttcgtctttgatgattgctgaaagtctgtcttctgaacaagcgaggattagttgtatccgttttgactctgactttctctttccctgttcctctacctcccacatttgcaaattactttcattgccactctgtgaaaagcagaattactcctattaatagctgggcacktgactaacattccacaggttaacccaagctttgccaaaaggaaacagcatagaaagacccagaaactctccagtgatgtggtatcagtggaataagctctgccactggagctcattcagtggctcaatgagtggcagagcttgggcagcaatgcaaagtctkcctgtgaccacatctttaatttgagtctattcgttgccgcaattttgcttttgtttttcctttctcaaaaatggcctcattttgtgaaaacaaagtgtttgcactgataattaataattactacacttttattctggtatgtatacatacttagaaagcatcacacatgcatgtgtgcacacatacacacacacagtgtgtrtgtattggtagcttaggcctgggtcagtagctcagaaacatcagaatgcatttgaaggctttagcctttccttcatgattagaagatagctgtagctgctcaaataccaagtsctgtcaccatctccagagcaggaaggatggggcagaagcaatacattttgtgaggctctgcttattttattccgaagtcctttctgggagacttcttaagtgccattgaacacaacggtgtctcgggtcaatttttagttgcaagaaaggctgggaaataatgatccagcaaaggcgaatggaatcctcatggagaccaggtataactcattcctggacttgcagaaggccctaggtgcaaaggatctccatccaccatctgaacatcaggattccgcctgggtggagatggctgtgagggagctaacaagcggaacagcatctcccacaacatgttttaaaacattcacaacactgaccctcaagtttgtgcttccaattgctagtgacctcagtgtcaaaaatgtgctgacaactgtgatgaagagacaaggagagaaaaacagaccctcaggagaaacagtgggaggggraggggagtggttattaacgtgaagtttaaaatattcaaagataggaaacgagaagcttaacgtgattgtctacagtggtgtaaagaagatttatatgtgtgtgttcttcttttcaaaaggcagatttaggtaccttttggagcacaattggaatatgcaaattgctgaccacaattgctatartgtattacattctatgcatgcaaaaaagaataccagggtttgttctctcctcttttaaacacccagatttaatctgacctacaaarcaaatagggctaaaacactgggcacgtttatcaagtcttcaaaagaatggaatagaggctaatgaacaaaatgctcacatcccttaagataactcaaagattcttgctatagcacatttggggcctcttttttttcttttttataagtcaaatgatatgcaagtaacaatatttttgagtgccagatggagaagacatctgtagagtaagaaactaaagaaaacacacttccaagattaaggcacattagaagaaaattgttggctatgtgagtaatgaggagtttggaaagggttttctctatgtacaacatgctcacttactgggtgacacaaatggaagatgccaatttgtttttttggttttttttttgaaaacagttttctttactaaaaaggggctttgcagtcaaacaaaagcacactactttgctttctttcctcatcttttctgcattcctcagtgacattctgattgtttccatgaaggtgtggcagttttgtcaatctcccaatatatgcttagcctttcaaagaacctatctttgttccttgtgtctatggtgaccgtctgttagtgacgaacagatcaaggtcaagtaagaaagagaagaaataattcggcccatacctctaacccttccaaagggcgtagcttagtagtttagtagtttcgcttcaaacactgaggacagggtgattgctgagatgctgtggcagtggtttcgggctgagcaaaacacgcatagcatgctgaccagagacagcagcagctgtgaggctcatctgtttcccaacacattttctaractgtgaagtccccttggaggaggactgtccatgaattccaarcatggaaggaatctgaccattctttttcattttaaaaccacattacctttgtcctagccttcagctttcaaggccatttcacttggcatttttcattgatttgtggccagaaactgatgtgaaaaaggagaacttaaaacctgttattagtcagggtttggaatcaattatgcttcaagagtcattttctataaccaagatttcattcgcagaagacatacacttagaacaatggcttgatcatggattgggtgggggtggaggacaagaatgaaagaggactgagatggctgaaggagcctctatggaagacacagagcatacacgagacttgtatstagcaagcgttaagaagagtccacaatgttcgataatttttattttgttttaatatgtgttctatctacttttcattttttatttttattyttttgagatgtaatctcactctgtcacccaggctggagtgcagtggtgagatcttgactcactgcaacctccgtctcccaggttcaagcaattctcctgcctccgcctcccaaatagctgggattataggcgtgtactaccatgcccggctaagttttgtatttttagtagagayggggtttcaccatgttggccaggctggcctcgawctcctgacctcaggtgatccrcccrcctcggcctcccaaartgctgggrttacaggygtgagccaccgygcccarccagtgttctctctacttttcttttcttactgctaccaccctgttgtaggcctggacatctcacttctaagtgctccacaacatctaaactgatctttctcccttcagtgtctccccatgttaatccttcttaaactcttttttttttttttttttttgttttttttgagacggagtctcgctctgtcacccaggctggagtgcagtggcgcgatctcggctcactgcaagctccgcctcccgggttcccgccattctcctgcctcagcctccggagtagctgggactacaggcgcccgccaccgcgcccgtctaattttttttgtatttttagtagagatggggtttcaccatgttagccaggatggtctcgatctcctgacctcgtgatccgcccgcctcggcctcccaaagtgctggggttacaggcgtgagccaccgcgcccggccagtccttcttaaactcttattcacacccagcccaactacagcaaatcaattcctccagttttcattatcttactctttttttatattaatacctagcatatcaaaaattacagatggcaacattaatgagtactgtataatatttcttgaaaaaaatagttaattataaagctttcttagaaataaaaggaaaagactttcaagcatagagtccaggcaggtatctatcattctgctttcttccttcatggaatcaacatttttagttcccrtgtatgagtggaacatgcaatatttgtttttctttgtctggattatttcactttacacaatgatctcccattccattcatgttgctgcagatgacagcctttcgttatttttttattgccaaattgtattccattgtgtatatataccacatttctttatctattggtccattgatgagcatttaggttaattccatatcttggctacagtgctgcagtaaacatggaggcgcaagtatctctttgatatactgattcattttcctttggatcagtacccggtggtaggattgctggatggtatggtagttcggtttttagttttttgagaaatctccatactgttttccatagtggctatactaacttacattcccaccaacaatatataagttcccttttcttagaggctgggaagggtttttggaggaagataaagagagcttggtcaataggtgaaaacatcagttagaaaaaataagttctaatgttcgttagcagaatagggtgaccatagttaacagaaagttgttgtatrtttcagaatagctagtagacaggatttgaaatgttcccaacacagaaatgataaatacttgagctgatgaatactctaaatacccagacttgatccttacacattctatgcatgtgacaaaatatcacatatcccccattaatatgtacaaacacttgcatcaactttttaaaagtccagacaagaaaaaagcccatgttgttgataatatagaagttgcagtcctctccatcacacacgtcataaaggcagcaccagaaacaagccattgcccaagataagggtacctatttactgcgtgaatttttgtttcagrtttactttattgctgctctaattagaattcttgtccctttgtttcacactcgtagcatgtatttatgtcatctcttctctgatttgaaagataccattgtttcagcttaaaacagcccctggtttgaaagttgcacgggatgcttatataaacaacaggcagcatgataattcattgcttcctcttaattcccatgttagttgaaactggaaaaaaaatgacacatgccatttttaataggtagttgagcttcctgtataaaaaaaaaacttgtaaattttgtaatgcttcttgggacatatgtcagtaatcatcacatggtttcaagcactgggaaacatcttaaaagatgctttaaaggatgagttacaaaagaagaaaagtagtcacaagattctctataatccctgtttggtcactctacattttccttctgaatgcactttttgagaaagtaaacttacttcttctcttcagtgtcatctgaaattttgatactttaaagagacctttgcagttttgaattttgaatataatattcctcaatgtatgaaaaactacattaaaaatctaactgtggatgcctatacttgaattaacaaggagtttcatctcccaaaatttcctcatgctgtggttttttttctgagctggaattgacagatactaagtttcttagtcaatcttgcaggcgctttcagaataattaagcctgagactaccagaaagaaccattaaaaattagaatcagagttggtggtatggaaagttcttttgaaagatggaaagttcttttgaaagatggaaaacattaatttaaaagagttcaagagtttaagccaaaagagccagtcaggttatggagcaaaaaaactctkcaagattaccacaactgtacttctctttgaatagattttctactgccagttatatgaaatggatataaatcctcccattccaacaactcaggaacttacttaagtgcagggtacgatagcaactgcaaacgagtctaagaaaataggctgaatgtcattaaaatcctttgaaaatgttctgtgacatctgttttccattttgctatgctgtttaattaacttcagtcttgcagaattgcagaaatcttatttgttcaaaatagtatcttgaaggaagagaagtttatttaatagagaagactgttaagtgtaatacgggcttgattaacttcatctcaagttttaaatgtttcccattggcttcatgatctatccctatatatggctcatttccataaaactaaatcaaactctggatggcggatcactcttatccagttggtactgctgtcatgtttcaaggacaccaaaaatggaagaaattacagagaatagtgacaattcagaaactattcttatttgtcttcatcgctataatatgaggtcactggctcctgagctagtgaggaaatccaagttctaaaaaacattccttccttatatttgttttttktgtgtgtgtgtgtgtgtgtgatctttttgataagaatagttgtcaaggctgggcgtggtggctcacgcctataatcccagcacttttgggaggcagaggtaggaggattgcctgaggccaaggagtttgagaccagcctgagcagcatagcaagacgtcaagaccatggctctttaaaaaaaaataaaagtagccggcatggtggctcatgcctgtagtcccagctactcgggacagtgaggtggaggatcacttgagtccaggaattcaaggctgcagtgagctatgattgtgtcactgcgctccagcctagacgacagagtacaatcctatctcaaaaacaaaaaacaaacaaaaaagaatggttggagagagagagagagaaagaggaaaataaaaagagcaattcatcctgcaaagacctagaacakgagtgcctcttctgatgaggctcagtggtcctggaaagctcctattggacaaatcttggagaataaacagaaacattttggagaggtgggagagcgaaggaaccagtcttcattgacagctgactttatttttcgatttgtcagagcacgccaaagcccagtgccctgtgaccaggacaaaaggggaagtggctgcatttygacatgtcccagcttcactagagaaagcccactkgtttctgactttccagtgcgggcaaaagctggcagatccaccacctgtgctcttgctgcccagcatctagggagctttgctattctgagtgtttctgaggaagccatatggatggtgctcaactggatttttctacttagagggctttatggattttaatgtagaggtcgtggcttctctgcatcactggcaagtgttgtccatctctccrtccttcttgagttccatacccagtgcatcatgaacaaatccatcttttttatctgacctatgctgtgtctactctctcagctcctgcttttgcttatccctcaaaggggaggtgttcttagctctctgacctctgggttgatacagaggccaaatttatcccagggaaggaataagtacatttgaaataagtcactgagaggagaagactgtgtgttttaaagccaggtttgtttaaagkgttatgatagtattaagatgttctttcattttcatagaagtacttcatttggctagaaggtcaaatgcctggtgctttgaggacctgaacagtttctgttccatgaacataccggactcaggagttcttttgctccagatactaagttaktagaacagtgtttcccaactatggtgaaagaaaatcaataatcagaattttttagtagttttcagtatttcaaaagatctagttcgtttcacagttcaactgaaatgatgggtgtatttgcatctagtggcaatcatattcactatgttaaccctacatatgttaatcataagctctgattgacagttgtatattttctgtttagcactaaataaggaaagaattctagtaatttattgaatgtagttggatttccttcagactacaaagaatgccttgacaatctcactccctccttttgattttcagtgattcaggtcatctggattcctggccttcctcctgctattctcttctgtaatctccatttgcccgaccacctcctaccatcttttagtttaaacgccattctctgccttccaggagctatagactagaatagattgccttctgtgtcctccccagcagtagaaatttctactgcgtgataactctcacgcaattactctctcagggttctctgacaccagagattgtgttatatcttattctttaccttgccccagcccctgccctggtgtttggcacataatctacactcaataaatatttctttgtttaatgggtggattgaattcattgtcacactgagtgacatccatctggatgcttgattacaccacgcggctatcatattctgaaggaacatgatatctatgaagatctcaatcatggtttaatccccagcaactagcacagtgtctaagacagaaacttaatatggttcaattactttcgagattttttttttaatggggacactacagatttggataaaagacattaatgatgatgtttcctgtcctatcactaggcagttctatgaaaaggcactccttttttcaaaattccarcttataatgtaagatttgatgggtttgttcaattcctactaagtgagcagtaccatgattttaggtctgtaagtagcttaaagttaaacttagaactttggttggcgatgctcaccctggtctctgttatggataacagtttgaatgaggttgatgactgggtcttttaacttgatgtccttgtttattttctgcttgctttgtttggtcaggtctggcatggagccgaaaaataagagcttgcttgcagtttgactttcactgtgattcagttttgcaatcttttaaaaacatccttcaggagacygccatgtatctatctgtggacatctcccagattttccaaaacaagcacaagataaataagggggatttggaaatttccaaattttaacagatgggaatttgcttccactgtctgagaaatctttgctatagatagaggggaatcccagaaaaaaatctaagtctgaaagctccacagagttctctgcctttgccttccctggaaaaggggtcgggggagagcaaacagatgcyagaagccagtaaagtcctgtcctcmtgaaagctctcagcccagaggacaacactctggggcagtcacttcagtcataggatatttccytctccaaataaccgaggagagagcctaacctctggggtgagtgtggtgtataaagtgtgagaatcgtgcgtgtccaggaagagagtgctgctaacagatgactccttgggggccccctttgttctctgcttctgtttgtattgagtcagcttgcttaggaatatagatcagtgagactaaagtatctctgttgggccagttctttcttctctgtaccatggtcaatctacagggtgcctgcacatcctccacagcctcgaggtcacagacttactctctgtgtctctaggctatagagcagaacaaaacagagccaagacaaggtgtctggaaaaacagaactcatggtcttccaacagggcatcaaagggtttctaaaatttaaagccaaagggaacctcaggggtcacctggtccaacccctctgttattttaggaggacaagaggcattaagtgattcagaagacacagtctagtggtggcaaagaggacaattcagacagttcccaatttacaatgattcaacttatgaagtttcaactttatgatggagtgaaagtgatacgtatttagtagaaactgtatttcaagtataaccattctgtttgtcatgttcagtacaggatttaataaattacatgagatattcaacactttattataaagtatgctttgtgttggatgagtttgtccaactgtaggctaatagaagtgttcagagcacattaaaggtaggctgagctatgatgttcggtaggttaggcgtattaaatgcattctcaacttatgatattttcaacttacgatgagtttattgggccataaccccactctaagtcaaggagcatctgtwwaggctttggggtcaggcatcagctggaatcctgactctacctctttagttcagctatgaccttgaataagtcacttagactctttaagctttagctttattgataaaacaaaagtaataatagcaccataggactgttaagaggattacattagagaaaattcatgtaaggcacatagcctaatgcatggcactcagtaagtacctaaaaattagtagcaactattcatcttcgtcatcattatcatgatcatcaaagctggagcctaggacccaagcctcctagctcagcattcctcttacaacagccctttgaatcaccttcatatgtcgttaatacttcattgggtaccccaatctatattagtttaagtacagactgtggtgacatcattagttagagtctgtgagatgggggggggggcaaataatgattcattctcttaaaaaggggatgtaacactttttttttkccttcttcaactggaatagttagggatgtaacactttaaaagagcatgttgtacatcaaggtaatataggtaacttaaatttattttggattttgtttatgtatggttgcaatcccattagagtttaatggtattttcattttacaacacattctagtgtgttaggaagtatgtgttaagagttctcttctatttattattttcattactttcccattccagtatagacayagtaaactcctaaaattaagtatattcttcttaaagaattctaagtgaccattttggtggaaaaactacctgcgctagtttgcatgtgatctaaatgatccaaactaatgggtgagctttgggtgcttgaggactatatgcaggagaaaagaggagggatggataaaacttttccaaytttaaaataaaaattattttctgamtgtgctttaaatgcatctgctacatgtactcaaraatgttgagtctgacccctcaaatttattcattaagttttgctacatcagactacacaaaggtcgggaaatcatgkgtccaaaataaaatcagatttgagctccaccttattctggcctatacaatgtccctgttcttaccaccttttctcgtctttcacaaccttgaatcagaatctctagttcaacatcatttccttttttccctcccccacttaaacataaaatatagatatgtgaattctataaagcctgcttggataatcagcttaccctaattcagctcttttcctcatcaagaggagggacttgacagctactcaggaggctgaggcaggagaatggcgtgaacccgggaggcggagctggcactgagctgagattgcgccactgcactccagcctgggcgacagagcgagaacccgtctcaaaaaaaaaaaaaaaaaaaaaaaaaaaaaagaggagggacttcaaaccttagtgctggtagtaacacctgagacagaaaacccgtgtgacacagaatatgagtccttaagcawaaggactgtcgtattcatccctgtgtctctggagctagcacagtccttagtgcattgtacatttgaacaaatgtttgagtgaataacaagcccgttctccattctggttaacttacgagtaytgtaccaattttcttccctgggcggaaaaaattatgaaccatggttcttgtgaaagttattatttttaaatgcctagacattcattcccagaactagaaacataagaaacaagttgatacatcaagggaccaagagatataaatgataataacttggaaatatttaaagttgtaaagatcctgcttagaagagggaagttatcaaaaggggttgagacaatagttgaatgactgagaagacattaatgaaaatcacataggagtatgatctaagaaaaggtacttgacatttttccaagtgagaaaactgcatgatcagataaccatgcataggttggagatgtgtccagagaaatttattcctgaaagacagcgataaagtaccagagctaaaatagtccatctgatagagacattggagctgagatctgaaatgatgcctgtttcttattaagttggattctatttactacacattttttagtgtatagatagaaaagggtacacaataggtacctaaaagcagatagctgtaattactactatttatcttttgtgctctgaggtttctcatactgtgttggtgccacactctaatcagctgcataaawgggtagatcacttgccaccacagaggcatgtgggagaagacagcatgtctaggacattacgctgaggctgaggcagtaggcaaggaagtccaacctgcaggctaagagtcagttttcactcctgtgggaaaagcatgcccagctctcagcaaaagcatagaaatcaagagagaacagtaaaggcaaacaggatatgtagcctagttccagttgaaggtattattcctaacaatgaaaaatgtcaatataactatttccagagttaaaacttcagacacatgctatgacaatgagacagtatgtttgaaactacagatgtccaaggaaattcaggctatatgctcaccatatgtagagaaggcagggaaatttaattgtttgtagagaaagagacccaagacttcgtaaagccatgggatatggagttgggggacctgccagtcrccttgtcagttcacttcattttataaagaaaatttctagtctcagggaagccaagcaactttcccaaccaaaacgttagctttgcgttaagagaattttagagatagattattaacatcttgcggctgagatactgtaaatatcttcaagaattccaacattttgagcaattgtaactcccagaataattatttttgctataaatattttgcccattttatggtagtattccagggtctttactcccaagtcaaactcaaatattgggaaaagtcggatcctttttcttatcaattcccacttcacattccccgttgtgatcagctttctgaatttatttgtaattatttcttcagaagagagaaatatggataatggacggaggaacaggagaaaatgttagcatattgacacaaaggtttcagtattctaaataatcaaatatttgaaaaatatatattttgtccttttgccctagagatataaattgacacaaaaatatttacaaaacacattagtagacatcaatgggtctaaaamtgtggtcctccaaaccagcaacatcagcatcagctaggaatttgtggaaaatgcarattttcwgtctcacyccaaatcagttgaaccagaaactctggggtgggacctggcaatctgtatgtatttaaacaagtccaccaggtgtttctaaccactggtacagacaaatcagacaagcataaccagattattggatgtcagttctaagtaatatagggggtgaatatatcaaatcctttgggagaataaaagcttagttgacttctatggtgtattcgtttcctattctgtataacarattaccatgaatttagtggcttaaaacaccccacatttaataagcttcgtaagttcctgtggatcaggaatccaagcataggttagctgggtcctctgctttgagtctcacaaggctgcaatcaaggtgtcactcaggctgtattttcatctggaggctcaactggggaagaatgggcttccaagctcctttaggttattagcagagtgcatttccttgtggttatatgacygggccttggtctcttaytggccatttaatggaggctgccctcagttcctagaggccactccagttatctgccatgtggccctctccagaggcagttcacagtgtggcaatttgctgcttcttcaaggctttcaaggccagcaggagtctctctctagtctgctaagatggtgtcatatatgtcatataacataatcatgggagtgaccttccatcacctttaccctgtgacagagtttrgatatatgtccctgccaaatctcatgttgaaatgtaatccccagtgttggaggtggggcctggtgagaggtgcttggggcaggagggcagatcccttatggcttagtgctgtcctggcaatagtcagtgagttctcgttaaaagtgtgtggcacttccctgccactctctctctsttgctcctgctctcaccatgtgacctgcctgctcctgcttcaccttccaccttgagtaaaagcttcctgaggtctcctcagaagctgagcagatgctggtgccatgcctgtacatcctgcagaaacatgagatgaataaacctgttttctttataaattacccagtctcaggtagtcctttatagaaacacaagaacggcctaacacactacataatgtaactarttgagtgagtgacttcctatcacctttaaaaaaaaaaaaaaaattggtcaagagcagtggctcaygcctgtaatctcaacactttgggaggccgaggcagttggatcacctaaggccagaagttcgagactagcctggccaacatggcaaaaccccatctctactaaaactrcaaaaattagctgggcatcatgggcacctgtaatcccagatactcagaaggctaaggcaggagaatcacttgaacccgagaggcagaggttgcagtgagccgagatcatgccatttcactccagcctgggcaacaagactgaaactccatctcaataacagtaataatgataatttcaacctttattttaggttcaggaggtacacgtgcagatttgttacatgggggtattgtatgatgctgaggtttggggtacaaatgattctgtcacccaggtagtaagcatagtaccccaataggtagtttttcagcccctccctccctcccctctcctctcatagaccccagcatctgttgttgtcatttttatgtccatgtgtacccagtgcttagtttccacttttttttttttcaagttggagtctcgctctgtcacccaggctggagtgcagtggcaatatctctgctcactgcaacytccaccttcgaggttcaagcaattctccctgcctcaacctcctgagtagctgggattacaggcacctgccaccacacccagctaatttctgtatttttgtagagacggcgtttcaccatgttggccaggctggtctcaaactcctgacctcaagtgattcacccacctcaccctcccaaagtgctgggattacaggcgtgaaccaaygcgcctggccagtttccacttataagcgagaacatgtggtacttagttttctgtgcctgtattaatttgcttaggataatggcctccagccayatccatgttgctgcaaaggataaaattttgttcttttttatggctgcatagtatctcatggtgtgtatgtaccacattttcctatcacctttatattctgctggttaaaaacaagtcacaggttctgtctacactgaaggccaggggattctacaaaggtttgacttgtggtttaggatatgttcaccatgttgcagaaattatatatatattttttaacaaaattggccactatttagtatgcttttttctttgtacatgaagcacttttgaaaaaaagtcactgactacagtcttagttaccaagttgaaatcaaagatagatttttcttccaactgcaagaaaaattcagtgagtttagaagaaaaaagttattctactcagctgggtttgacagaaacactatttctgtggcctcctgtccccatcccctagttatgccttaaggcccttctcaaatatcttctccagaaagactttcctaatacttctaactggaattgttctccattttagtgcccatttattattgtacttccggtttactttaccattatttggatagatgatttgtctctctgtctggttggtaactgaaggtaacagaaactcagcaaacagatgttacattcatgagatcacatattttatatatgtgtgtgtgtgtgtgtgtgtctgcgtgtgtatttttttttttttgagatggagttttgctattgttgcccaggctggagtgtaatggcacaatcttggctcaccgtaacctccacttcccaggttcaagcgattctcctgcctcagcctcccgagtrgctgggattataggcatgtgccaccatgcctggctaattttgtatttttagtagagacagggtttctccatgttggtcaggctggtctcaaacgcccaacctcaggtgatctgcccrcctcagcctcccaaagtgctgggattacaggtgtaagccaccgtgcccagtccacatattatatttttgaagcctctcmggcagtataatatatgctaacataaggtttgatgaattataaaagcaattaattttaggtattgggacacactaaaatctatccagtgtagatttccacactgggagagcaatagcctgtcatagcagctttgcaatcagrtagccctgagatccatgcctgacatctccaattaatggctgtgtgacctggagcaagaaacttaatgtcgctaaatctcactttccttaatagagtcattactgaataaatatcaagctattcttaatatcaacttggaagtattaacatttcttaacacagttcacaccagggcacggactccacagtttaacctcatctccaggaggttagcatgcacacgtatcatgttcattcggtaggacagtaacctgctagcaaatgtagactaaataaacactggatcattcctgtagttatttataaatagtctccatctttggttgtgattttagtggttagaatactagaaaaagagtgggtagagggacaggacataaggaattccatgttaatcagtagcatgggaaggctggtcattttcacaaaaccaagggagatgaaataagattgtcctaaacactgttctgagaattacacagaacatgaaaggctgcttggagtgagtcagagctgggatgttataacagatccgggctctgtcgaacactcagtcccccttgccaaatgtaggaattcacaagatcaggctcaaacttaaaagtcaatttcttgtargctgggtgctcacggctgtaatcccagcacttygggaggccgaggcgggtggattgcttgagcacaggaattcaagaccagcctgagcaacatggtgcaactctgtctctacaaaaaagtccaaaaattagctgggcttggcggcatgcgcctgtagtcccagctactcaggaggctgaggtgggaggatcacttgagcccaggaggctgaggttgcagtgagcagagatcacgccactgcagtccagcctgagggagaccccgcctaaaaaacaaaacaaaccaaaaagtctatttcttaaataccatgctagagttatgttcattccttgcagtcatctaatcagttcccataactttcttgataaaaggcagatgttgcttttccatagaatagagatggttatcttggccaaggtgtttatgcargagtgcgggtactaagatgattctagatttgtacctttttaaaagtctgttgtacagttctgtgttctgagattaggtggcattgtgtttcctttttacgttttttattctgtttccacagagaacatttacacactttcaaatgatcctgrtaactattccatacatatgatatcattggcatctatatactttgaaaatatggtagtaatttttttttgccatttatatctactggtgacccccataacttgaagctactttttagtgaccacaaaacttacttaaattcccaatgtatattattattatttccagtacctaaaatcttttaaaacttatagtataaataattacaaaataactttgaggagaaatttagagagtgaaaagagtaagagagaagagaaacaagaggaggagaagaaagaggaggcagcctagacttgtgaccaaagcttttacatggggkgaaaaaaagctaaactatattaagagtacatttatgagacaatggcaaagcgaacaagcaagagaaaggattttgacatatctcagttgacattatgaaaactctcattgcttatccttggaggaaatatagcaaccacctgactactcacaagcagcaaatgctagagaagactctcccctcttaatatcaataaactaatccccaccttacatgccatttaagtacaaggagaaagtagggaggtatataggcttttagttcttttaacatttgagaacccattttggccccaagtttagatacctcaacatttctgtcactaaccttcttccctccctccttcccctgcttcctgaccccccaaacccacccctttgtctctctctctcccccgaccctctcctcctcttcccttgcttctgagttgggrgggatttgagaagaatgaacccataccaacyccgccctagccagcattcaagatggccccatgaatcttgtctcctggtattcatgctttttctgtagtctcctcccatatggactcagagttggtctgtgtaactcacagggtgtagtgggggtgacagtgtgtcacttccaaggctgggttaaaaaaatgcacagtggcttcctacgtgcaccctctctgtcaacttccattttgataggatgctcactcatcacgtgtagaggcccatgcagataggaactggggcctcccagtgacgaccagcaccaacttgccagccgtgtgaccgaaccaccttggcaatggatccttcagccatagtcaggcctttagctgactgcggccttggtcaacatcctgactgcaaactcacgagagacacagagccagaccccccagctagaccactgccaaattcttgcctcagagaaaccataagagacagttaatgcttattgttgttctaagccaataaattttgaggtaataggttatgcaacaagtacatactatgtaataggtatgcaatagtatacaataatacaaatactttaaaagaaaagtcagaaatctaaggataacaaattcagagctttttaaaataagaatgttatctcccttgagtatttagagcctctagtaattgtccttgtagaatttgaagaaggttgcaaactttccttctttgttatttagagaaaatgtgtaacaaaacctataagaaatcactgctaatctatacctcaggagcctcatctcctgataactttttttggcaaaatatcagtgctcttccattgtgtgtgttcaaagttttagtcatccttacttagttaagatgattatatatgagtataccttttagttaacttccttttgatacatggtttatttcatgcctagggtaatgattgatgtttattcaaatgagctgatgtggatgcaagttcctcagtgctatacagtaaaattgctgttgacatcttccagaacaaaactgagataagatcctaattgtggattcccaaatattacttttcaaatactgttacattatgctgactattattttccattctggtgcttcttaagctcattacatggtgatgatttgtatatgggaacagtctgaagaaaaacaattgtgtgattttagataaaaacaggattcaaccgagatatggagtatctcaaagtaaaatgtgctattcccatctttctattctgtgtttggctccaagtccttaaacattcattcaatayacactatacagatgttcaaagaatgcctagtgtgcattgcttagtgctcaactgtgctaagcattattccacacatggggatggaacaatgaacaagacaaacaaaggttctgccctcatgaagtttacattttagtctgggagrcagttaataggaaaacaagtataaaacaatataatgtgggatattgttaagtactaaaaagaaaagggtggccgggcscagtggctcacgtctgtaatcccagcacttcgggaggctgaggtgggcggatcatgaggtcaggagatcgagaccatcctggctaacacggtgaaaccccgtctctactaaaaatacaaaaaaattagccaggcgtggtggygggcgcctgtagtcycagctacttgggaggctgaggcaggagaatggcatgagcctgggaggcggagcttgcggtgagccgagattgcaccactgcactccagcctgggcgagagagcaagactccgtctcaraaaaaaaaaaaaaaaaagggcagggtagagggatagacaatggctgcaaagttgagggatctaatttagatggaggatcaggggagtaaaatatgggcagggacttgaattatatagaaagagcaaaccatgcagaaatctgggggaagaacatttctaacggggaaagatcacgtttttaagccgtgagtgaacagaagcttggcatgtgggagcttaagagtaagagatgagagaggctgtcagagtacatagggcatgatggggaagggggatacagtagaagatgasattggagaaataaacaggaaacttgcaagcccgggtaaggacttcggtgtctattcaatgcatgatgagaagccacaagaaaattccaagcaaggaagttatgtgatctaatttaattttttaaatagcacactttgcagctgcatgawgaatagtctggaggtagcgagaaagccagcaagaccccttgaagggttactgtagttcaggccagaaaccatggtggcttgtggggtggaagtagttagtggaggcaataagaagtgatgggagctgcatctgctgcaagaatgaaggctgttctcagtaatcagactgtccacattccagaaaatgtcgacatcactctgaaggggcacagttcttgtgaaaggccctagaggaccctgcagagggacttcagtcacgtcagtatagaactcgggctccttggaaagaaaaagcagaggctccagattgacaaatgctgagaagatgggaattggctgccatgcgtgctatctgtagtcatgcacagaagatgatcaagggcgttatactgggcttctgtgacaagatgaggtctctgtgttctcacttccccatcaatgtcattatgcaggagaatagctctaytgtagaagtcagaactttcttgagcgaaaaatatatctgcagggttcgggtgagcccaggtgttgcttgttcaatatcccaagcccagaaagatgagttcrtccttaaaggaaatgacattgaacttgtttcaaattcagctgctttgactcagcaaaccacaacagctaaaaaccaggatatcagaacattttrgatggtatctatgtctctgaaaaagggacagttcagcaggctgatgagtaaaatctaagagttgtacagctacagaaacaagatgtcagataattcctaagacctatttgtgatattttaataatgyaataaaagacagctattgaaaaataaagtagtgatgaggtttcaagacatgaatgatgggatttgctgatggctagcactcaggatgtaagggaaagagaaggattgaggctaactattgagttttggtctaagaactgcatgaaaggtggtatttatggacgtggtgaagagtaagggagagcaatttgggaggtggaagagaaccgagagatctgtggccaggttaagtttgaggtgtgtttatacatttccatatgggaatgtcaagtaggcagctcgaaatacaaatcgcaaagatgttggactcaagctataaacttgagagtcaccacaggagaaattgtgtttaaggccatgagactatttgctgtctcttaaggcagtgaatgtaaatagagagaagttctaagaaccggccttgaagcactctagcattagaggccgaaggtgaaaaggggtacccagtaagatggaaagcccagaagagtttccagatgaggacgatgtttcaggaagaaaagaaatgagtgatccattttatccatgctacagagtgtccaaaacaaatgaggaccgagaataatcttttgaattggacaagacgaggtcctggttgacattccaggaaggggcggagacagagcctgagtgaagtgtgttgaaagaatgaaaggtaggaaagtagacaccatgaaatacaaacagatgtttcaaggaattagctgtgaggacaaacagaaaactgatacagtacccagctggaaatgttgatttcctcagatttcttatctacaaggtgaaaaattttagataacttctaaatcccaatgtattacattgccaagtcaaaaaaacatcctagggtgagtgcctgaaaggctaaattgtgaaaaagagtcattactcgggttgttgatgtcctaaatatgatggtgtcattactgactagggagggtgctagcatcatttgtatccaatgcccatgtaatgatttgagatgacaatggaaacgttaagaaataatttaaatctattatgagaacaactctcatttattagtttacttgtagccatttctgtgattcaaatgagcattatgattattttctgacagaaagaacgaaatctcaggacagttccatgtccatctgtaattagacctcatggccagagggccacaacagtgaggtatgtgacacatcacctctgggctgctgtagctgggcggcatgatgactaagtgaaaatgacaacggcaatagtaacaggtgtcactataccactttagaatttacaaagccttttcataaaaattaacatatttaggctgggtggggtggctcacgcctataatcccagcactttgggaggccgaggtgggaggatcacccgaggtcaggagttcgagaccagcctgaccaacatggcgaaacctgtctctgctaaaaatacaaaaattagctgggtgtggtggcgcatgcctgtgatcccagctatctgggaggctgaggcaggagagtcgcctgaacctgggagctggaggttgcagcaagctgagatcacgcaactacactccagcctgggcgacagagcgagactccatctcaaaaaataataataacatatttaatcatagggaccatttaaaatgctctttcatttgtattaaattagttctccaactctgacagtttgagcatggttggcccagctatcctgatggctccttcctgctattttttttttaatgtttaaaactcatcttttcaagctcaagagctgttgctttgaagaggatttgaataagcatctgaaactgttggctcagacattgatccaactcaaatttccaaagctgctaccagaatgcttttcccatacagatccaaaatgaatgtgaaatgctgcctgtcctctttctcctgtcttcctttcagtgactccactttctccacagtggccctccacgtcaggcagcccttctaaagaatccactgcttgggtgtgtgtgttccccacgttgcattcagaaggcacatccatgcatctcaggcgtgtaggttcttcagcatgaatcatgcaaacttggtgaaccataaacctctccctgtggatatgagtttgttggtattttagtctgcttggaaacagtctgagaaacattaaacccagcttttttgaggttagtccaaattatttttttagactagagaaaaaaaaatattatgtctcctaaggaaacttgtaaccacgaacagtaaattttaaatgttttagaatggttttctttttccccctcccacatcccccacttgtgcatagttgaaatccctagtttctctcaccaagaaatactacatgctagactcacagatccatgggctgggcctgtgcaaatggatttcttagattaaaagtataaaaacaaggctgggcatggtggctcatgcctgtaatcccagcactttgggaggccaaggcggatggatcacctgaggtcaggagttcaagaccagcctggccaacatggtgaaaccccgtctctactaaaaatacaaaaaaaaattagccaggcgtgatagcaggtacctgtaatcccagctactcaggaggctgaggcaggaggatcacttgaacccgggaggcggaggttgcagtgagccgagatcgtgccattgcactccagcctgggtgacaagagtgagactccatctcaaaaaaaaaaaaaaaaaaaaaaaaaaaatatatatatatatatattatagaaacaatatatgctccattatactgaccccaccaatcttaccctttctccacttttccagttcaatcatcccctaagtattcgtgtatagtaggattttaaaatgcacagtaccattcatgtgcagaaaagcacctttatttataaaatatgaattcaacttgctctacttggcaggaaggtacctagacctcactcacctrttcaaggaaactgagtcacttccwgtttcaaaccacagtttttccaggttaactcaatctctgtagcatttaccatatccagcctcaaaggaccccacccatccatcctttctttgttcctttggggaaagaggaacctgtgagaagaagaaaaccacagggaaataagactttgagtttggagaagaataagagagcattataaagtgataaaacctaaacatggttcattaggaaaaagtgactgaaattctaatcctgtgcaggtccaggattatgagggaagcmaaaagaatgccactgacactagaatagagtatttcctgctgggcatggtggctaatgcctgtaatcccagcactttgggaggtggaggcagtggatcgcttgaacccaggagttcgagatcagcctggccaacatggtgaaaccccatctttactaaaaatacaaaaattagccaggggtggtggctcacgcctgtaatcccagctgctggggaggctgaagcatgagaattgctggaacccagggggcagaggttgcagtgagctgagatggcaccactgcactccagcctgggcgacagagactgtctcaaaaaaaaaaaaaaaatttatgtgctgtcacaactgcaaggcatgaggcctctctccctccctggcgtttccacatggcacttccccttgtgtttgacgtgtcagcctctgtcctcattgcaaatctcctctgccttccagcctcagtctctgtacagactctgccctcctcatcttggctgcagggttgtcaggttctttggccttctcatctcacagccacaggagcgtttgtgaacttgtgatycyccctagttcccggctctggcagtgkgtgcggggaggcctcaacacagccagccccttggttactctactgtgactacctccttttggctccgggctcggtgacctacttccaaataccaaattgcagcatgggacttttctgattttcatttgccccctcaaatctatgaggtttctatgatctctttcatctcttctctttctcgtgagttacaagggagtaggggcgtaccgggtgcctcagaaggaacccaagtagcaatttcaccatagtctcatccctccaaatttctcctaaaaaatattccctcaatccaggatttttactacttccctctgtggagagaaaccccatgtctaacatctgtctcacccaagagcatgctggaaaattctttggcttcaaagtccaaagattgattctggatattgaatgtccagctaagggaaaccaagaaaagacttttctgttttctccttcaggtacctggtccttgaaattgaaacctagacacttatgcctattgtttttcttgtaactttcaaaatctattttgatgtcaaaatggaacaatggtttttttgttatccatcgagttctgcccttctcaagaagtatggatggctcaacctcagcagatggaaagctacagggaaataggaagtaccatctcaaggaaaagaaatgtgcctcattagaaatgtccgatgcattttttgttctcagtcgttcttgcaacccaaggactgagttgcaagtcaaagtgtttatcaatgttaagtttgaaccaaagacaaaaatctctgttgttctttccttcttagtagttcttaaactacttatatattagaacgctgctgtggaggaagaaatatttttagtttttcatacggaaaagttttaagacacacatttccatggagtatatttttcccacagtgttttccaaagcctctgtctttggctcagcatttctccaactggaagtttcaccaatgagtcccctgtgttcctgtggtccgctgtagggctactctggagtctctggcttattagcatgtaaaactcggagattctttccctccagttaaagtcatatccacaggatttacatgaaatatattatatayggcacctttctttgtaaggtagctagaaagtggctttgggaattttttttctgagacgagtctctctccgtcacccaggctggagtgccatggtgcagtctcagctcactacaacctccgcctcccgggctcaagcgattctcctgcctcagcctcctgagtagtggggactacacgcacacaccaccacgcccagctatttttgttgttgttgtttgtttkttttttttttttttgtagttgtttgttttggtagagacggggtttcaccatgtttccgcggctgatctcaaactcctgggctcaagtgatccactgcctccgcctcccaaagtgctgggattacaggcgtgagccaccgtgcccggcaggaaatattctattctagtgtcagtggcattctttttgcttccctcataatcctggacctgcacaggattagaatttcagtcattctttcctaatgaaccatgtktaagttttatcactttgtaatrctctcttattcttctccaaactcagtcttatttccctgtggttttcatttataagggaagaaaagaaaggacgacaagtctatttttagggatccattaaaaattcattttttaatagtccataaacattgcgaagtaacttgggactcatacatacaaattctgattattttaaattgcttcatgtgataattgcaagcatttattgagcatttacacattactgaacttaaaacacataaaaatgccattctcggctgggcgcagtggctcacacttgtaatctcagcactttgggagccaatccaggcaaatggcttgagtccaggagtttgagaccagcctggccatcataatggaaccccatctctaytaaaaatacaaaaatgagccaggtatggtggcatgtgcctgtcatcccagctcctggggaggctgaggtaggaggattgcctgagcctgggaggttgaggttacagtgagccaagattgtgcctgtgcacttcagcctgggcgactggagtgagaccctatcccaaaaaaaaagaaaaagccattctctggcgatcattaaaaagtcaggaaacaacagatgctggagaggatgtggagaaataggaatgcttttacactgttggtgggattgtaaattagttcaaccattgtggaagacagtgtggtgatccctcaaggatctagaaccagaaataccatttgacccagcgatcccattactgggtatatgctcattggattataaatcattttactataaagacacacgcacacgtatgtttattgcagcactgttcacaatagcaaagacttggaaccaacccaaatgcccatcaatgatagactacataaagaaaatgtggcacatatacatgatggaatactatgcagccataagaaaggatgaattcatgtcctttgcagggatatggatgaagctggaaaccattattctcagcaaactaacacaggaacagaaaaccaaacaccacatgttctcactcataagtgggagttgaacaatgagaacacatggacacagggaggggaacatcacacactggggcctgttggggtagggggcaaagggagggaagcattaggagaaatacctaatgtagataacaggttgatgggtgcagcaaaccaccatggcacatgtatacctatgtaacaaacgtggacattctgcacgtgtatcccagaaggtaaagtataactttaaaaatgccattctctacagaatttgataaatttttaatctcagagcttgaaatcagttacaacactgttttaatctatgaaattatttcagtgtctttctatgaaatttagacccaatcttcagataccatagagtacctactatgtgccgggtgctctaattagaatcttccatttcattgtcatttaattctcacaagaaccctgctaagcaggtggcattatctcctttccacctgtgaggaaacaggttcacagccgttccacagccccaagcctcacatggagtaagaggttgagtaagatctgaagacacatggcacttttaggccacacagtgtccaaggtatttaaatgaagtagatgactgagtgttttttaagccacacacttacagaaaagacactaggagatgagcagaaggtgtttccctggagatgctgccctggtaccacagcagcaggaggtgggacaagctgacttctactctgagtgagttaagaacctcagggctgctctgggatagagacagcatgaacaccagtgcatggagccattgtaccctggccatggtttttgttttagatcagcatcaggttcagaaatccagaaccaaaaagaaatgaatgcaactcccattccatcaggtcaggagtgaccaggcctcccacagacctttgcctgtttcctccccaagcgagcctcagagccttagaagccctctcccacatggtcttgtattaaatcatgttcttctaggtcaaataacaagggtccgttattcatgcctctgtttatttattcatatgtgtattcattttattcacctataaatatttactgcagtaatattaaccagcgtccttgtggatatcagagtgccacggatataaatatgggaagaaaaagaaaccactttaaagaaaaaaattcttttagagagtatacttactatatgtcttcttatagatatgggactttgtcaatggtgagtgctcagtaaatattcagagacgaataaaatgaataaacgtatgaatgaacagaggagtgaataatggacccttgttacttgacctgagagaacataatttaatacaggaccaatttctatcattttcctataagtaatgtatttctatattacatatgatattttgatataaattatattttataagtaaatcacctctaggctggaaaactcaccctatgttggcccctaggaacatttaaaaaaatttttttagaaacaggatctttctatgttgtccaggctggagcacaatagctattcacaggtgcagtcatagcacactacggcctcaaattcctgggctcaagagattctctyacctcaacctccagagtagctccgactacagatgtgtgccactgtgcccaacttttagagattttttttttctggctcagaaaaaatccctctcagtatgtttattccaaaccctttctaacaggtgtccaygcgttaggcaaaaagccttacagcttctcagattcttctcagattcaaagattcatctgtattcatcatttgagattcatctcaaagacttgcttagagatgaccgtaccatctctaagcaagttttcctttctctctaacctgctcctttggttcccgcacctctcttggctccaggtgtcaataaacaacacctttgtcagctctttccattgcctcctcctggtcagagcatgctgagtgagcttcacttaaagcctcacttttgcatcggataactttttctcatttgaatcgagggtttatacactgcccaatataccatatccaatataaacaggaaagaacatgatttctttgtagtaggtagcctcccttctaggtcttcttttacagtgtgatggttatcaggcttaggaatcagaaaaagttagtctgaatctaatctctagtccttagctttaacctgggcaagttattgccatcatctgaaaaatgaagataaaaagaatgatgaacaaatgagatcacatatgcaaaacatacagcacaatatttgaaaatagagaaggtttagtaaatggaagcgatgatgctgaaggagggagaaggaaaaacagagtagaagaagaagaggagaaaattgctaaataatgagtagccatcttgagagacagagagcgtggcccagaggacatgagagattaggaactgctgcgttttatagggaaagggaacacaagggtaggaatgtactggaaattccatccaaagaggactcaaggtaatgcaagtcagaatgggtacttgggagcatgggatgacctcagagccaaggtgatattacatcccactgtcacccacttcacactgtggtcttaatttagctacacgttcatggacaagaagttcagagccagctcacactgcagaactgggttccggttttataagctaacttactgtttgccacagattgtaacctctttcccaaagaacagacataccaggagccagaaagtagcttttaattaatgaatttgtcatctgctgctcagtggtaatgagggaaatcctgtgccatacattcttttaagtgtagattcaggatctggatatgtactagtgaggtcagcaattcagccctttacctctgattgtgggccaaataaatggctgaattactcatgggggtgtggattttgttaagtgtggtgggtaggggttgggaggaagagaagagggtgtgtctttcttggcataggccaaaatgaatgaaaatgctttgaatgttattataatctattctgtgaccatgtccaggtggctttctgccatggctctgggcacacccatatggacttagtccctttctgtagggatttcacagtttctggttggcagagtaaggacccaagcaggaagattttcttccccacccaacacacccctgaatcctgccaaatgtgaggtgtgggagtgataatatcaacgcaataataccaatagtaaccacaatasgttcttaagaaactggaaaagggtactgagaagttttttccaccttttttgtatgcctagtttgctacattgctcctaagttcctagacttctgggcagctctgcctatggaatagccattcttttactcctttactttcttaataaacttgctttcacttaaaaaataataagttcctagacttctctttagtgaatactagagctctacctgaaagaacccacattttcaggtcaattcccaaaactcaaatggtagtgtcatggacttgaaagcagtcttagggactgtccattccaacattctgcccatcacagacattccctgggagcacccaaggcaggcggttgtccagcctgtgaatggacacatgcagagacggagagcctgkttcctgagaaggccaagccatgatgggcatctgtagtggctgcaagacagcataatgcgggggaaagagtataggattgggaggcatgggaattggttcagtgcttgttcttccactgaccagctgaacgaccttcgggagaagtcactgcgccttagaatgagtcacttatcaactatgaagctgttggatatgatctcagtcattctagcaataacatggtcatttaaagttgtttttctacgtctagccaaaactggcctcctgtaactgcmagctattggtgttagttctaattttgagaaatgtagaggatgggtcttatctcattggtgtggcagcwmatcaagtatttaaagatggctgcaatgaccctgtaagttatctcttctttagtataaacatctcaagatactgtaaatcttccttttatgacttggctttcagaaatcttcctcctcctgacagtcctcttccagacagactcaactctttaaattatggtccctagaattggatgcaacatttcacaaccggccaaataagagcccaggaagtactgggactgtaacaacccaaccctccacaactatctctgcctttcatctagaccctgtgctgcttttcacttaagtttgcctttgcgttagttatttcagcctccatcgtcatctcatgccacagactgtgcctgtggttgggtacagccaccaggcccttacacatgacctgctctccagccacttctcccctgttctggacaaacacatagaatgatttcccccttttcactatacaattaatatatatgcatagtaatgtagaaagctgaacaatagctgcccaaattgcagtatccagagataacattgttaacttaggctaataccagtaaattatttttaataacaatgtcagcattcatggttttccttacatactgaggtttatttactccctgtctctgattttttttttttttttttttccgagacagagtttcgctcttgttgcccaggctggcctgcagtggcgcgatctcagctcaccacaacctccgcctcccgggttcaagcgattctcctgcctcagcctcccaagtagctgggattacggggatgtaccaccacacctggctaattttgtatttttagtagagatggggtttctctatgttggttaggctggtctcaaactcccaacctcaggtaatccacctgcctcggcckcccaaagtgctgggattacaggcatgagccaccgtgcccagcctctgatcttatatcattcctcttaccctcagtggaagacctcagtccaagcctggctttcacccctacaccagcccatctttccagccttgtctccaccattgcccagctgttatccatacccaccatggttcagacttccatactccctgtaagctcctagaatcttccctcatctccctcatttgaccttttggaaaacctcctgttcatccttcaagacgtagttcaaatgttacctcttccgtgaaktttacccgacttcctctcccatccgcattccactggaatccccggttcttttatctatatttctgttgatctttgatactactcttttataacacatgagattgtaattaattggatgcacctgaccacaatcaagtcctaccctgggagccacaatatcattgggcaaactttagtctattgtccaaactgtagcatataaaagccgtgtcaaaaaaggaaaagctaaaacatccgctctacctgtgagtgctcttctttgaatgttcacattaattaccctgaacctggaacactttgttttaagacatggatgatcagacggtggaataaaggtcaagatgaaggatagagggaagaaacaaagatatgttctatttagtaggttcagggcaattcgtttcagaaaagtttcttacatttatatactacatgcatgactatatgcatatgatctatttattaaaattgtttttattcagcatgtgtcacatagacccaatttatttttggagagcatagactaacataaaaaataaataaatctggccatggcagctaatttgaatggtatgttttttcttttgtttttttgagatggagtcttgctctgtcaccaggctggagtgcagtgatgccatctcggctcactgcaacctccgcctcctgggttcaagcaattcccatgccacagcctcctgagtagctggggctacaggcacacaccaccatgcccagctaattttttgcattttagtagagatgggatttcaccatttggctggcagtgatgccatctcagctcactgcaacctccgcctcctgggttcaagcaattcgcatgccacagcctcctgagtagctggggctacaggcacacaccaccatgcccagctaattttttgtattttagtagagacgggatttcaccatttggctgggatggtctccatctgacctcgtgatccgcccccgtcggcctcccaaagtactgggattacaggcatgagccaccacccagccggtatgtgttttatttgagtgtgtatagatgacttttccagtgaagaacattcaktgtatcccagtcaaatattaaaaataagctgttctcctggcttctataaatcagatttccacgcacacaatcctggaagagtatatctgtgcacatgcctgccctggagctatccrttagaactgtcctcacagtgacgtggaaaactttgcctcatctgtataaggtctcgtctttagagagaggagaaaggattgggaatttcaggcttgaatctctgaaggtgcaaagcttgaaaggttgagatggagagcagagtctgggaactctgtgtctctgccttggtctgtgacagatggggccgggctggtctcaaagccgttgcctagaactcaaccgtgggctggcgttacccttttgaactccccctgcctgctacaattcttctctgctctatcatgggtcccaggacagtttctgctccagactgtctgaggagcttagggaactctgaaaggaaaccttttaagtctgcttttcttgagaaygctaamcctgcaaaacttggccagacatcacattgggtctccctctgtggtgactcagaaatctcaaggagagcaggaaaatctagaggaacactcataatgttgaaagggccagagggcaggagggatgaaatttgtgtttccattgagtgggtgatatttttcatttcaaagcctgatgtaaaatcttgctggtttttagttatctacagattgagaatataaacactgctattaaaatatttcatctctcccaaatgaggccatgcacaaatttccttctatgtgcagagccttcagcaacatccataccaagcacaggcagacatccaaatctactctttttacttgaagggaaacagtgctatctctgtaggagacagaggctgagggaaaggaagagaggggtcttggaaggtcaaggctgagttgggggagagggcaacattcataggtcaggaaaggcaaaccaattataatgatttctttctatcactagcaacatctactctggaaacggttgtctaaggttatgccctttctggtaatattcagacttggagtacttaagcttagttaaaagaatttgctagcactttaaatgttggattgctggcgagaatagaaaagcctgtctcccttcaggcaaggtcctgccctgtgcttttgtgtgtacccctctgccctgagaatagctgggctattggaggttcacacagtcaataaccactgaactgcacccgtgggtagctctccagtgctgcctgctcatttaacaggtccttatggagatgggcctgatacacaagtgctggcgatcttcaggacaaacccaataaaatgagagaacctaagcttggcttctaaccttcctgggaaaaggaagtgtctgtggttttcatagagcattcagatcttttttgtacttctgtctttttccattgaagatggaattgttctaccctctccaaagtcagccctgaaccaaggggttttccatgactttctgtgaccatcaacattcaactgatgcctgtttcctatacacttcagagagagccagagcttcacaagccwwttracacattcctaagaatcaaaacttagtttctgggctgggcgccatggctcacccctgtaatcccagcactttgggaggctgaggcgggtggatcacttaaggccaggagttcaagaccagcctggccaacatggcaaaaccccgtttctactaaaaatacaaraacttagctgggcatgggagcgggcasttgtagtcccaactacttgagaggctgaggctggtgaatcacttgaagccaggaggcagaggttgcagtggccaagattgcaccactgcattccaacctgggtgggcaacagagcaagactccatctcaaaaaaaaaaaaacaaaaaaaaaaccttagtttctgaaacccataatgcaaatacatrttcctccaaaggtctcaatgttcttatctcaaaatacacattttattgcttttgaaatacatgattatcayatccctttggcatgaatttgtatgaatccttagatttaagtatgtaaaatataataaaaacaaaagtgtgtgaataccccctactgcagagttatgcaagcctaatattcaaagcatgacatattaaatattataccttaaagacagaattagaacatgaacacatgtataatgtctttgcctcaacttcaaaaatgcacagttgttgagagcctggaagagacattcaggaacgggctgcaacaagccttgctctggtgtggtcctgcttatccaattgttgmtcaataatgtcccttcccggaggcatagaaggcaggcacccatacattcacacccacaaaaatgtcacctcattccccagagattgccagtctgggcattgaccttcacttaagcagggcatcagtgtgatgtggtccccctgctggaagtggaattgtttctaactctgggtgcccacaccrtagagggcttgtctacacttggtctcagccatcaccccccaaacacacccagctctttaycacctgattccctcaaggcgastctccttccctctgccagcaccccttggttgtagctttggggaccctggatgtttgaaagtttcatttgtccacaatccaggtataagtcccccttccctggattctagggagggcagcagcggcatgtcgttgtcactcagcttgctaatcaagagagaaccccagaaagagtatttaggagataagaggggtagtatatatttttgtaaatagaaacttgttttctattaataattaaccatttttctgatagcaaaaacatcagcacaggtatactctatccatttatggttggttaacacacagaaccttttctactgagtagggttaataatacttagtatgtgcctagcattcaacactcacaacagccttgcgaaataggactatttttattcccattttacaggtaaggaaacagagaccagaggtgcaataactttcttaaaaygactagagkgagcaagtgacagctaggacttgaacacaggctgttggccttcaggatctaggctcctaacacaatgcaccaaagccaagtcagtgccaaagttattccatacaaayggcacttgttctytcaccctttcaatgttcatgttatctctgctcttattttcatcttcattgtacacctccccttacatgtatttgcaagtctctcactttgcaaaatggaactgataagtactaaacctcctcaaaaaaagcacaaacagccccagagtgatgatgcccaaaacttaaatgaccacagcaaccagtgccatgccagtgagttttggagctgagctttggtcttgtccatagaagcttttaagttgaaagcttataaatagagggtttctatattctgtgaatgatagaggtacacagttccaattgtattctgtattacgtgtatgtgccctctttgcataaatgtgcctgacactgtagtggaggccagcttcttgaaagcaaaaaaacacgcatcccattcatctctgtatttccagggctcagcactagtgggtgctcaataaatatactgaatgaatgaataaaagtattactgcaaagatcagtaagtcccatgccaaaaaaagaaaggaagaaaaaagaaagggaaggaaggagtgagcgaggaatgaaaagagaaagagggaaagagggaaggatggtgagcctcttcagaaagacggcygctcatgcttgctctcttgggcatggagtgggtcactggctggacgtttaatgggtttacattattccttaacagtcattgtttcaaaatgaggcatctctgatggctccatgctggcttgtctctttcygcctatgacattctctcaagagtttagagtaggagaggattttagaacatgatagtaacaagtaaaattagtattttttggactccaggtacctgtttgaaattatattgtttagaatataacaataacagtgaaattaaattgttgtcttaaagtgaataactgtaaagccatgtgtgatctgaacccccgagcctgcccttatctatcaaaatcctggtgtctgaagaagtccaaaatggaaacacactctgaacagatttccggcaggagcttccaccaggttttcttcgtggcaagccctagaaatagtctggactacaagcaggtctttttaaaaccatgctcctttatttaatcatgaagatttaaagtttataagtttagaaattcagggataaaaataacccactgagtgtcaggcctgattgctaagtgctgttcaggtgtgatctcacagctctctcagcattttcrtcactgccaccacttcacaggtgagaaaagtgaggcagacaacagacaagttactggtctaagtggtagaataaaaatataaccccagctccagagcctctgcactcagccatcatcgtgtactgccccgckgtgaatttcatctaggatatgccaagacctgctgatttttcgtcacttgccttttcttattaatgtctgttccttggcgacaatggcatctgctgagccccacccggcctccccacccacctcgccgcctgttctctccctcaaatccgaaaggtcacgggtacacacccaacttcagatagcatttagttwgcttcccctccaacactgaggaaatgttcattaaatgctccagccatttaacaagtctatttaacttcattttcaatttaaccatgtattatttcagtttccttttcctccgtattgtatagccctgggaataagagttggaaatgtgcctatcataagctgagtcacattttatgtgtcccctcctctcaagccactgttttctctctctttttttttttttgcgattaaaaaawatatatatatcctgtgtaaaataaaacagattcagaaaactgcgtaaaacaattcattatataatttgtatatataatgaatgaaagaaatagaactttctccttgtacttgcctcagaagccatgtgacccaagccagtcacagcccctgccaccttcaaagtcagcattgtattaacttatagtacttacatccttgtggatttttttcattgcagataatttttaacatttttgaggtataattgctatatataagaaagagcacatatttaacrtatgcaatgtaataagttttgacatatgtacatgcccttggaagcattatcacaattaagatagcaaatactggctgagtgcggtggctcatgcgtgtaatcccagcactttgggaggccaaggcaggcggatcactggaggtcaggagtttgagaccagcctggccaacatggtgaaaccctgtctctaccgaaaatacaaaaattagccgagtgtggcggtgcacacctgtagtcccagctacttgaggcactaaggcatgagaattgcgtgaacctgggaggtggaggttgcagtgagccgagatcatgccactgcactccagcctgggaaacagagcaagactgcatctcaaaaaaaaaaaaaaaaaaagatagcaaatacatccatcatcctcaaaaatttcttcctaccccattataatcccytcctcytgccacctgctccctcctggtaaccgctgatctgttttctgtcactatatatttgtcttcattttctaaggttttatataaatggaatctttccgtatatactctttttgtttgatttcttccactcagcagaattactttaaaattcatccatgtcttgttatatgtataatacctcattcctttttattgctaaagagtattttttgtacataaatatgatatctatgcttatagagcatatatatcacaatttattcattcattcagttgttgatatttacatcattttcaattttttactattgggcttttttccaaaatggttatatcgttttacctttccaccatgattgtatgagagttccagtttctccacatcctagtctgcacatggtatcattagtttttcttaattttagccactttaacaggtgtgtagtagaatttcatcgtggttttaatttgcacttccctaatgactgatgatttgagcatcttttcatgtgtttatttgccatctgtatatctaccttggtgaagtgtttgcttaaatctgttgcccattgtttaattggattgcttgttttcttattatcaagtttcttattatagtatttatatattctagatacaagttctttatcagacatgtgctttgcaaatattttctcctactctgtggattttttaaaaatttccttcatagtgatggagcagtttttaattttgatgaagtcaaatttatcaacttctatgtatcatgctttgatrtcttattaaagaaattcttgcctaatccaagctcacaaagattttctgctatgttttcttccaggcacacatattatagtttatgttatatgtttagacctatgatctattttaagtcaattttttatatgatatgaggtatgaattgaagctcttttttatttgtttgcatatgcatttgattgttccagcaccatttgttgaaaagactgtcttttcctccactagattgcctttgtaactttgtcaaaattggttgtccatgtatgtgtgagtctgtttctggactctattctgttcaattagtctgtttgtctttatgccagcactgtactgttttgagtactgtagctttacagtacatcttaaaatcagatgatgttagcctctcacctttgttcaatctaaatagaaagttgttttggctactcttggtcctttgcatttctctatagatttttgaatcagcttgtcaatttttaccaaaaagcttgctgggaatttgaatcaaggttattttgaacttatagatcaatttgaggaacgttgacatctcaaaaacattgcatctcatgtctcatgaacaaagtatatctctccatttacttaggtcttcttgaatttctcccagctatgagttttcagtgtaacaggtcttgtacatcttttgttagatttattcctattttatgttcttatgctcttgtgagttcttaaatttcatttctgattatttattcctagtatgtagaaatacagttgacttctatattattgattctataatctgcaaccttaccaaacttattctagtagcatttttatagattccattggatttctacataatagtrttgtttgcaaatamagacagctttgcttcctcctttccaaactagatgcctgctatttatttttcttgccatattgcaatggccaaagccttcagtaaaatgttgaatcaagtggtgagagcagatccttgccttgttccttatattagggagaaagcatgcacccttttactattaagtatgatgttagctgtggttcttcagagatgccctttattagattaaggcagtttccttctattcctagttcacttagaattttttatcaggatgttggatttttgttaaatgcttttctgcctctattgagatgatcatacagttttccaaaattatatctgttgattttcaaatgttaaaccacctctacagtcttgagataagccccatttcatcatgatgtaattacctttattgttgtatttgatttactgaaatcatatttagtttttttatgtgttaaatattcccagtacacttgataatttgggatcccaatctggcttgttatatttagtctctgcactaagctctagctacggtagctacagtttacttaatgaccaaataacaaccttttcttccattttaaattktgtatgactttggctgagggtcattgaaaaatcaaggatgggaatacacacacacagaggcacacacayatacacacacacacacacgccccacagtcttacatggtgaggtcctgactgaagtttattaggaaaactaggagagacaggccacaggacttttcaaccttcctgagtagagctaacakgagactaagcctactcagtgagtctcagtgaaaactgggaaagagggatacggaggagaagcagtaagcactgctgcagttatggcttggaagaatgctgttaatactgctttatcccatcattgctccattgtccagtcttgacacaggacttcctgccgccttagactgaaatagaatcactgccccaagataaatgtgatgggggagacggggtttaggaagtgattatcagacacctgcatgataagagaaaatggaaagcaaaaacaaggagataagaaggaaacaagcccagcatgttcccatgggttttacacatagactcagaatatcagtagcagcagggactgtggcaacccaaggccacaatacccaactaacagataagaacaccaaggctagactagagaggctgttcatctgagagcatactggtttgttttgttttgkttttccctcttcctgatatatccagaaaatacttcctcctcccagcccmgtttagcagtaacttacttccttggagaacaatgcctcaacccatattcaggccttaggttggtacagacaatggcactttacatgcgtgggactctccccacccccttcattcaatgctgcctaatgagcactcacttcttgggtctcatcaccagtcctgcactgtaattcagggagccagctgcctctgccaacagtgtaagtaatctcaggctattttataatcagtcctgaagaacccagagggggcaccagactcacctcaacctcagattatgttttggatccacttttcttcgtcttggatgaactttgtgaactttgtgtttgtgggagagcacagtgaaggatgaacaaggaaaaggaaaaaaggggtaggagaaccaaaggcaggacagcttttccttcctcttttctttcctgaatttttttttctagagaagtcttcaaatattccagcctcaacttttgaaaaagaaaaagcagaatgtttttagtaggatctttttgtttctagcttactgggagacagtgggaggatggacacttttgagcagatatgcatcacccaatcaatcatctccagaagaacatctgaatctctaaggaattgatccaaattgttaataatacttgtggtttaagacagatagatgaaacaccttgtataatcactatattcaatgtatttgactcatgtatgggacttagaatataaattttaataaagtagaggcttaagcttgcatctttgcttgtgtgtcgtactatggcgcgtaactgtgatttccttgctgaatccctttagggcaaagctggctttggtcatgatcagatttagggtgtctagcacatagtagatacttaataaatatttacataacaaacctttacatggtactgattatgtaccaagcaccgtgctaaatacctcaaaaatttaagctcatttatgccttacttgcgtaaggaaactgtcattactatctatattttacaaagaaaactgaatccagagagactgagcaccttgtccaaggtcacacaactagtaaagggaagagccagcatttgaacccaagcagtcttgctctttttatttgtttatttaatttttgtacaggcagagtctcactatgtcacccaggctggtctcaaactcctggcctcaagcagtcctcttgctgtagccttccagtgcttygggattataggcatgagccacygtcctccgccaaagaggtcctgctctaaacacttgctaagaatacattgacattgaatttttcagtcattaatgttatgatgcttatgaaatcgtgacatgattctgcatgaaaaatggggattatatgatgatttcattgatctaagacagttaactagacatcagaatatatcttcacttcctaagttacccactggttattgattctatgttggttgatctataaggaggcatacatttgttaatgtactccttactcaacattactaattacatttttactttaaaaagcatcagtgcttcttctcttactatatggaaattaaagattctttttgcaattttgtttcttattctttctacattctgtartgtattagaaacatgaaattactcctttgttcttcaggaactgttcatttgaaactctccaacataaggatgctggggagaaaacattcctatgttttattttgataatgaaatattgtgtagttttaaagcttagacatataaacttcatgtgracatcatatatatataaaaaatcatatatatataaaatatcatatatatacacacacacatgtgcacacccttgcatctaatttataaattctaagatagtcatgaacatacatttttagattctgtgacttatttggcttttaatgcaccacaaggtaaaactctttatactctgtcatatttttgtattttctacccacttaggggagactacaattatataaaagttgctataacatttttaattaattacttgactccaaataattccctgtaacattctaaatttaatcatttgactctgagtagattcgttcctcatttaatatctttgtcactttcccttcaaattcyttctactgttctttactttgggcttacttttgctgtgcctctttttcttcatttctaatctactatacattctttttttttttttctttttgagagaaggtctcrctctgttgcactgcagtggcgtgatctcagctcactgcaacctccaccaccggggttcaagmgattctcytgcctcagcctcccgagtagctgggattacaggtgtgygccaccatgcccgactaattttggtatttttggtagagatggggtttcaccatgttagccaggctggtctcgaactcctgacctcaagtgattcgcccaccttggcctcccaaagtgctgggattataggcgtgggccaccgcacctggtctcactacgttacattcttaatatggttttgttagcactctctgtgccaaaatcctattttcccctcttttcccttaggcagggcatgcacagagcagatctatttcctaccaaccttttttcccatggcacacacagctgccccttggcaataagatgcagtccctgactaatgcagcattgctctctgaagattttaatccagctttcttagtctcacctagctttawgaaaaatgagaggctagatattttgctgtttcttactaagatttgcattgctcatactataggtgccctgtgtaattgctctaacattttctcttcacacaagattatccagtattctctcttatcctgcctcatccttttccttttctgtagccagttgttatgaaaggggtggccatggcagacactgttgcagtgtaatgtcaaatattatatatttaatgtgcatgtgcccgcatgtgtagttttggtttttttgttgttgttgtttgtttttggagacagagtctcactctgtcacccaggctggagtgcagtggcacaatctcggctcactgcagcctctgcctcccaggttctagcgattctcctgcctcagcctcccgagtagctgggactgcaggcacctgccaccacacctggctaatttttgtaattttagtagagacggggtttcgctatgttggccaggctggtcttgaactcttgaccttaggtratctgcccacttcagcctcccaaagtgctggaattacaggcatgagccactgcacccggccatgtgtagttttcaaaagagccatagataggagtcgacatttgaaaccattcaaaatgaacatttttttaaatgccaacagaatacttccctgraaaaaagagccacagatacttgttggctttctttctttcaatttttgtgatgacaaagctgttggatttgacttttgagtagtaagtttatcctcagggcctttaataacaccagcatggaatcaaaattaggaraattactggactttggctatgtatacaccaggttygtgactgttgaacaggatgatgtttgagaagatttactgaggttttgggggtatcttccttccctgcattttggccagtttcaagtcagaagtgggcagagcctagttrattgcaatggaaaagggcaaaccaggagccagcagctggagaaccaccttgagcactggcacatagagcacagttgctcagcatggctggtgtggtggaggggataactatgacatggtgtatggccaggggcagaggccgggaagcctgtcgcagcacagcatgttgcagtgacatgatgacaggaagcctcggagcaaatgctgtttggagatttgagggaggtgaacaggctgtcagcattgaggaaaactgtcagcagaccacagtgatgcaggcgctgggctgtaggtcagaactcttaaggattattaagatcataccactttagtagggctggttacaaggtaggataccaggagaggaatatagaaatgagggacaagacaggcaattcagaacacagctcacagaagcccggaacaagactggaccaaacaagttcaagtacargctaaaagtcatgccatcattatattgaaaagatgtgatgaaaaagtaatgtacccactgactgattttgccttattgcttgggcatagtgagaaggccctctcttcctatcattgttttgataaaagaaaaaaaaaacaaactaccctggcacccatcagagctaaatgctgtctctacctgccttccccaaccagrttcatgcctggtttgcttagggattatctgatgttactagccatgtctcttcttgcctccactggcatggaaaatctgggtaaccacaagcaaacttgaccagactgctaccaatgcctgaaactgaatattatagtacaaccgtgtgacacattcaaagatgctgactgctgtggaacactgaggcgcaacagaacttcacgaaaagaaacttttcagtgcaccctctgttagccaactctttttgagtgtgcttgcaactgtgctgttgatgtagagcgaattatatgtttaattttgatcccaaaccataggtagatgcttaatttttaaaataggcagatagtgtctagaaaattagtagagaaaagtaagtttaagctaaatataaaaacaatgaacagaatgtttcctatttacatgttttgtttactttttgtctaaaccagagatgagcaaatttttctaaaaacaaaaaaccaaataaatattttaggcttagaaggccatatggactctataataggtattttacatagtccttgttgtgtgaagcagcaatagacaatgcatacaagaatggtcatggctttgtgccaataaaactttatttacaggccggtcacggtggctcatgactgtaatcccagcacttgggaggccaaggcaggtggatcacttgaggtcaggagttcgagaccagcgtagccaacatggtgaaatcctgtctttactaaaaaaaaaaataaaaaaattagcttggcatgatgatgtatgcctgtaatcctagtgctttgggaggctgaggcatgagaatcgcttgaacctgggaggtggaggttgcagtgagccgagatcgcaccactgcactccagcctgggcgacagagtgagactctgccttaaaataaaaaacaacaaaaaaaaactttttttacaaaagcaagcagtgggccagatttggactatggaccatagtttgccaacccctagtctaaagaaaacagcatttctactcacaaattttatatatatrtgtgtgtgtgtgtgtgtgtgtgtgtgtgtgtgtgtgtgtatagtactgtttctgttgaacagataaaaccatatattcatggtagctgcagaaagcaaaagatacctttaagtgacttcctcctttttaatggataatggcaatatttattattttgatttagttaaatatttattgctgagtaccagttatgttcttattactcagtattaaaggaagattttaaaactcctggcagcctctgatctccaggagctcatagtataagagagctaagcaataatattgcaaagcagtaaaataagcataatacagagagacccatgtgcactgggacagtttggtcttcaggaggaggggtggatctagatgagtcctgagggccagcgcatatttctaaagacgggagagacaggagagcatctaggggagaggtgatgagaccaggaggagcatgaacaaagattatacaatcagagaaaacgaatagttaaaagaaagcaggtaactaggctagccagggcaagatgatcatgctggctgtgcctcttcaccttcatccataagatacggagagtaacagtagcttcctcgtagggctgtcatgaaaatttagaaagttaatatttgtaaaattcctggagttgttcctgacaaagaatatataagtatttgtcaaacaaataaatgctggaggtagaggtggggattggttgataagatatggtaagatggagtcaggttgaggacaagaataattttccaaaaacactttgatgatgtagctgtatagtgagggacctgtagtgtccactaccttcaggacaatagccaaactcccaactaggctttcataattgtcccctgatcccaaatgagtgatcagtaagtgaggaatgtaaaaggtaactcctgaggccaggcactgtggttcacgtctataatcctagcactctgagaggccaaggcaggaggataacttgaggccaggagttcgagaccagcctggccaacaataatgagaccccatctctacagaatattaaaaaaaattttggtctgagagctaggagcaagagcttagggaaaggaggaataaraggaggtagttggctaccaacagacatctgaattcttaaccaatgaagagaaaaaatgtaaaagtggtcccagcygcttgggagaatgaggcaggaggattgcttgagcccaggaattcaaggctgcagtaagctgtgattgtgccactgcacttcagcctgggaaacagagcaagaccctgaaaaaaaaaagagagagagagagaaagaaaagaaargaaaagagaaaggtaactccagttccagcacacagtgccactgcaggagtgaggaagccacgtgggagaattattttgtgggaaaagctgaggaatgcttttgcacatgttgtattggaggtactggtgcccaagtggagacagcctgaaggcagagggcggcttgagttggggctagagatggacacttgggaaccatgagcacagaagagaccacaaacatgttgagacaagggaagcgggcgggagaaagagcagggcattgagtcttgaacattgctcacaccttcattgatttggaagagacaaactgctgctgtcaacccaagtttggggtaggcggaaaagtggatacagagattctctacctcctcttacttgggaatgtaagtcaaatgtgagtttcatagcaggaagagcgtgaagttgttaagtgcacagtagtccatgagaacagattttcccatcttgagcagactctgcagagccacaaacaatgccgccttatgagctctggtcagtctggtcatgggatacctgtggggatttctttcctgtcggagcagtggcttccgtgagacttggcaaagaggctggtctgaggaatgcttctggttgtgggtacattccagcccagggtggtgtcccagacattttccttttaatgaagccccagcttttttctcccttttgctttttttttttttttttttttttttttttgtaatgaaagggttgttacaagggaaatacaatggggccctggctgtgtttcattaacttttaatttaagctgttagtatggaattagttagcagacttgtgaatcaattagctagccagtgggattccattttaacaaggggagcactgtgcgctctcggatgctagctatgtgtgtgaatgcggagtttaaggagcttcgctgtttgttcgacatccgaaagtgaatcacagtccttgttcctgcctcctctactggttccaagttcactcggctagaacatgctgtgcatcacccaacccttatcttctctacaaatacaaatttggattactgaataaatccagtggaaattcatttttcatgctgatgaactcaaagactttcagagttaaaccaaaacaatgcactcggaactatagtgaaacatttgaacatttaccctttgatccagagtttccccatattctgggaagcagtaactcctgggcaattctgcagtcttctgaaagttctatataagcttaattgtccttcctcatttgcaaaccccaccttgggtttgggaagatctgacagctgctgtctgggtttggcgtacttaccccgttactggttgagaggagacccagttaacaatttcagcctcaaatttaaagtccagtcatctcaaaggaagacagtgacataacagggaggcctagctggctttaaaataaagggagaggggacagagtcagttctaataaactgtagagatatatatatatatatatatatatatatatagcattttaarcccaacttgaaraaagttgctgaattagcatcagaaagccacagaaaaatgcatagagggagagagataggcttgtgattcacattaatattttgggcaatggaatacagtgtgaccaataaaaatgattcaaatagtatgrtagaagtatactactgtcggccgggcgcagtggctcatgcctgtaatcccaacactttgagaggccgaggagggcggatcatgtggtcaagagattgagaccagcctggccaacatggtgaaaccccgtctctactaaaaatacaaaaattagctgggcgtggtggtgtgtgcctgtagtcccaggtatttgggaggctaaggcaggagaatcgcttgaacccgggaggtagaagttgcagtgagccgagatcgcaccactgcactccagcctggcaacagagtgagactccgtctcaaagaaaaaaaagaagtatactattttcatagaagtatacttattggcatagaaatatgtttacctgtcaggtatggtagcccatacctgtaatcctagcactttgagaggcctaggccagaagatcgcttgagcccaggagtttgagaccagcctggacaacacaggaaaaccctgtctctacaaaataactttttaaaaaaattatccaggcatggtggttcacacctgtggtcaggaggctgaggtgggaggatagtttgagtgcaggaggtygaggctgcagtgagccatgattgagccactgcattctagcttgggcaacagagcgagaccctgtctcaaaaaatacatatatgtttatgaatattggaacatttaaaaagcagtaaatatactatgaagtacaattgaattttaatttcagaatattatatgcacacacatatactgtcagcaacaaagaaaaaaactggatagaaaattataacactgttattaattaaaattgttatacaaaatttgagaacaacttgggggttataagaacatgaaaagctgtggtttgcaaccttcatagggtcccaaagcaagatggaaacatcccaatgggaggttaacacttgacaatcttataacaaggtctatatatcaaacttattatctatccatctagctagctagctagctaacttaccttctatccatctgtccagctattatgtatattcatgaaactcatttttaaaacatgggagataatggctctaaatttcaaagaaatgtttacaccttgccaggaaggttttcttttcccaagtcagggagtgaaagatgtctgctaattcattcgtgaacttatttacctattttttccacaagtatttattaagaacctgcccatcagccaggtaatcaggaatcctaagattaaattattagagtatttttcattgttcaagttttctcttttcagtcayattatgtgtgtgcctcctctgagcacaagagatcaagggaaactacttacaatcttgatttataataagtgcggtttatctggaagtagtattgaagttttcttacaattgagcattttttctagaagggtgatggtactgcattggtaagactatctaaacctgtgctgtcagcayagtagccactaaccacatgtggctatttaaatttaagtaaaaattcagtttctctataactgtagccacacttcaattgctgaatacccagatgtggccagtggctgtcatactgaacagtagagatataggacatttatgtcatcacagaaagttctcttggacaatgctggtctaaacctaattgctgagaacacttgtgtataaaaaggcacttttcacattttttctcttcattgcttaagaattcagaagtttgctgatagtcaactactttcttttattcctcctttccctaagctcttgctcctagctctcgaagcaataagcttttcagaatttcattatttgtcagcaccggctcgagagagcaggcatcaaagggccaacattacacacttatgtatgtttatataaatttggttaaatattaatttgaaatggttgtaaatgagatttcaggtttgcaacagcaggaaaaaagtctgtataacttcgctgtaaacatggtcattggcgttaagttgttaaactgtaactaatctggcatctttgttacgtagtcaagttccactgggttttgctgtgtagcatgcgattccaaaaatctcagtgatttttaacaagaaatattgctcactcccatagatagaaggtgaaatgatctcattcctaatttgcatttgagtagcaacctaagtactaaatcacaacccaggaattttccaaagttccttacaagtactttgaactggatctttccttagaaaaatgtgtagaaaaggaaaatacataatgactggttattattctactttctttgtgtttagaggcagcattaattttcaagtagaaattatatatatatttttaatgtgaagccaatctggaaaagctgcatgctgtataattctaaccatatgacattctggaaaaggcaaaactatagagtcagtaaaaggatcagtggttgccaggagttgaggggagcaggagatgaatagggagagcacagaggatttttagggcagtgaaatcgttctgtgtggtactgtgatgggggatccctgtcacgatccattcgtcaatatccatacaatgtacaacaccaagagtgaacgctggtgtaaactgtggactttgggtgataatcatgtgtcatgagggtcatcagttctagccagcgtaccactctggtgagagatgttggtaatgggggatgctgggcatgggtagggacggggaatacatggggaatctctgtacctttagctcatattgctgtgaacctaaaactcttcttaaaactaaaattttaaaattaatgacaataaatgaatttaaaaataaatgaattaaaaaatctattttaaaattaatggcaataaatgaatgagtaaagcatgattaatacatatactaccacccagatcaaaagaatagaaccttgccaccccaacttcatatacttcttcctttttgcaactctccgcaccttgagaggtaaaccagaatcctgactttcgtgataaaatttcttttctttataattgtatgatctatgtgtacatttctaaagcaatataatttagttttcctggtttggaactttatataagaggaatcatgacatacatactctttcgtatcttgattcttttgttaaaatttcatttttgacactctcattcatgtcttttagtgttggtgagcatttctgtaaattttggctctaactagaacattataccatctttaagaggagagctcagatcaatgcatgctactgtgcaatgggaagagttggggcaggaggaaaaatatgaagaaaatgttaaccagtgtatttgatttgttttaaaatacatttattacttctgtaatttttgcaagtgtataattttcctaggttctaatgcagtatatagaaaagacatttagggccgggtgcagtggctcacgcctgtaatcccagcactttgggaggccgaggcaggcggatcacaaggtcaagagattgagaccatcctggccaagatggtgaaaccccatctttactaaaaatacaaaaattagctgggcgtggtggcatgtgcctgtagtcccagctacttgggaggctgaggcaggagaatcgcttgaaccaggaggcagaggttgcagtgagccgagatcgtgccactgcattccagcctggcaacagagcgagactccgtctcaaaaaaaaaaaaaamaaagtaggaagtaatgctgataacttgaacacaaacactttcgtattttcatttcaggtttaaagtattcatatatcataatttaactcaytagcagagtgtacttaccctgcagtcagacaatttcctctctctttaaggaaaaagtataatctaatctggtaggggatttttcttttatttttaacttaacaccgtgaaaaatcaaaacactgtccttgagaaggcataatttttgaaatatgcaaatttaaacggtatcttccttttaagttgtgtaaaaacaagacttttgcctaagtgtaagaccagaattttgcaaaattctggacctgcctctctggcctgcctctctcmggttttgtgtagggcagcaggaggcctggcaacgtgaatgtctccaaatcctacttctgctctaaactgagattttgtggtttcttttttttttttttttttcttgaggcagagtcttgctctgtcacccaggctggaatgcaatggcgtaatctcagctcactgcaaccaccacctcccgggttcaagccattctcctgcctcagcctccccagtacctgggactacaggcatgtgccaccatgcctggctaatttttgtacctttagtagagatgggatttcaccatattgtccaggctggtttcaaactcctgacctcatgatctgcccacctcagtctcccaaagtgctgggattacaggcctgagccaccatgcctggcatctttttttttttaatgttagaatttaaaccatctggaatttatattgtcatctaacatgaggtacagattgaaatttatttttccctgcagttcattgaccaatctatgctttctcactgatttgaaatggcacctttatcattctcgaaattattcatgcttatggctctttctgatgttctgttctatgctgttgtcctctatgtcttcactttagccagtgtcatgctgttttaattattgtacctttaaaatctgtcagcatctgctagcagagatactagcatgcatacacacacactgagtattcctctcttttattactgtttattatcagataaacttttgcatatatatgttaatttcagaaaagtattccattgtgattttgagattgatttaaaattaaaatttgattttgtggagatttgacatctttagatcactgactcttaccacccatgaaaatgactctctctccattaattctaaccccttcaataaagttttgccatagtcttcatatagactttgtatattcttattccatatccctatgttataacaggcatcagacctatcatttgacaccaacagmtggcatccaagmccacaggaatgatgcccaaagcagtctacacccactccccactagggcccaggaggaagtgtgtttgcagccctgacctaaatccacttgtacctttctctcctctgcacagtgacctctgcctggccaaagccccatggaatgccctaatcacatgtccctctgcagaatagtcctttctccaaaatgatccctcttttattccaccaccaccataagtcaatctctagtttcccctctgggaccctgtattactctgttttcacactgctataaagaactgcccaggactgggtaatttataaaggaaagaggtttaattgactcagtactgcatggctggggaggcctcaggaaacttacaatcatggtggaaggcaaaggggaagcaagtaccttcttcacaaggcagcaggagggagaaaaaagcgcaggaggaactaccacacacttataaagccatcagatctggtgagaactcactatcacaagaacagcatgggggaaacgggccccatgattcaattacctccacctggtctctcccttgacacgtaaggattatggggattacaattcaagatgcgattttgggtggcgacacagccaaaccatatcagatcctgatagattttaagcttggtgttgattatctgattgaaataattctgaagattgttttaagctcctagacaacaaactatgaacaaagctgccttctagagaacaggatcaggaggttgggggaaggatactttagatatttccttactgttttgtgtcactttatgtctccaaataagtacttcttttataacataaaatcttctaaaaaaaagcaaacaaacaaaaaaaactgctttccccctcccaagataagttgttttaaaggaggaactattcaaatgaatacttagtactgaacagtcattcctatcttttgggaccaaggaactcttcaaaaatttgatgaaaatggtagacactttcctctgaagaatgcacatatgtacatagctacaattttgtgtaggatttcagaaaataaaaggctgctgccctcagcagagattcgtacctctgtataattggtttctggtgaggtacacatcactggatcaagattcctgtgggggcttctggagtccccagcttccttgtcacacctcatgtcgcatcacggagcagaggctgactcccaaaagttactcagcccctttttagaataagaatagcctcagaacagggttcctttaaaaaaaaataggagagtaattttacatgacacctaatgagttgaggaaaacagaactaacctagggaatattgccaagtaaaagaagtttgtctttactccgyagcctcccgtgtcccccactctgagtctctctatgactcttctacttcctctcgcctacccaaaatcttggcatccttaaggtgcacctgagtcctctccactccaagaagctttccttcgttcctcaactcaagcctcccactcgtcaaactttcccacaaaagtaacccaaacagaagagagaggtgagcctgtatagcctgggaactctagggacaaagttcaaagtagtcttcgcaatcaaggaattccactccaaaacacatctgtgtgggaggatgctgggtgtgtgaatccagcagataaattctatttaatcttattctttttttttctttttttgttttttttttgagatggagtctcactctgtcacccaggctagagtgcagtggtgcgatcttggctcagggcaacctctgcctcccgggttcaagcgattcttctacctcagcctcccaagtagctgagattacaggcgcaggccaccacgcctggctaatttttgtatttttagtagagacagggtctcaccatgttggccaagctggtctcaaactcctgacctcaaatgatccacacacctcggcctcccaaagtgctgggattacaggagtggggcgtatttttaaatgtgcgtaatacatgtatgtaatttacaagtaaatatacctacatattttatatatgtgtgtgcatatatatacatatatatgtgtgcatatatatacatatatatgtgtgcatatatatacatatatatgtgtgcatatatatacatatatatgtgtgcatatatatayatatatatgtgtgcatatatatacatatatatgtgtgcatatatatacatatatatgtgtgcatatatatacatatatatgtgtgcatatatatacatatatatgtgtgcatatatatacatatatatgtgtgcatatatatacatatatatgtgtgcatatatatacatatatatgtgtgcatatatatacatatatatgtgtgcatatatatacatatatatgtgtgcatatatatacatatatatgtgtgcatatatatacatatatatgtgtgcatatatatacatatatrtgtgcatatatatcrcatatatatacacacacatacatatcacagtaaaaatatagaatggagaccagtgctttacctgaatactagttaaattacttaactctgctttcctgctccctcccacctcaccccaaatcacattgcctcagaaagaagggtagagagtatttaagtgagaccaactgagtttgaatcctggctctgcgactcactagcatgagatgacttaacccttctttaagcatcggtttccccatctgtaaaaagtgggtgacaaagtggggttgctggaaggatgtaatgggtaaagtgatcaatcaacattggacatgtcgaacatcataaagatacgcacaggaagagcacagcccatctttccctcccacagtcgttatctcctaccctgtggttctttctctgcactgggtgaaatcccaagagacctcatagctttctagtagctttcagatagaagtcttcccatcagaaacagatcattctcagtatagtaattaaaatcttgtctggttcagtcatctaaacttgggtctaggcctaggtgaaacctctccccaccctcacactattccaggaaggccacgttctgcctagggtatccaccggggaggcacagggttggcctcctctctggctgtccccagctttctaggggctgtttctcctctaggtgcagtggcacggctcctcccgtcctcagcctcgacggaaccccttttccaggggttctccaggcccgctcctccagctgccctctcagttaggttccctccccctgcaggatggtcctgtggatggagttcctgtgatagtgacccggtaggctccttccaggcccacctggcctgaggcgaaactcctgcatgccctatggcctgtcctcgggcagtgagagtgtcaccctctcccacctgcctgaaattccaagggacttactcaggccctctaaggggtcctcttgaggccctcccacttcactgaaggtgaggggaaagcaatcctctcctcccccagggtggaagacacaacacacatgcgcacacgcatgcgcgcgcacacacatagacatacgcrcagcgcacagacgtacgtgcacacgcacacacacatgcacgcacacacacacgcacacacacacacacacacacacacacacacmcccctctggctgcctcaacccctctttcactagctagaggggttatcagtggccaggctagcagaactgatttctggctctgtggacataacctacacgtccgtcttttagcctctcggtatggtggcttagccctttccttcagtgggtagagtgttcagcatctgtcttactgctcacagcctgtggggaatcagccaaaagtgaggctgaaagaattgccatgtaatatctttaaccctgtgcttagtaaatagtaaatgctcaatgaatattagcgatcattagtagtagtggtagtcatagtagtgtgttttcttatggtyttactctgtttgggctgctgaaaccagccattatagactgggtggcttataagtaatagaaatgtatttctgctagttctggaggctgggaagtcccagatctaagcaccagcagattcagtgtttggtgagggttggcttcctgcttcatagaaggctggcctctcactgtgtgctcatgcggtggaagggaccgggagctctggggctaaaactctcatccatgagagttccacccttgtgacctaatcacctcccaaaggtcccacctcctaaaaccatcacgccagcaattaggatttcaacataagaattatagggacacacaaacattcagtctttagcaagatctcacaatgtctgcactatatatagctttaccaccatttgaaaagtacaattcctgtcagtgtttttggtaacccactgttgtgaaatcaatttaaaggttcttgagtggcaatttgaaaatgaaatcgaagagtagaaaaaagaatagaaaaatcaagaatgcataataggtgttgtttggaaaatttgtgatttaagataattaagtatatatatgttgccattttaaatgtatgtattatattggttgctgtcaacaaaatatgaacgctacagcatctgaggttttccagttgtccaccacaatgattaacatgtgagaatcttcctgaaaaagttcaatgattaacatgtgaaaatcttcctgagaaaagttcctatgtggatgagctctaaggaatgaatatagaatgttctattccccacaggtctctgcagtgaatacagttaattgggagctaatcatgaactgctttatatttttccctaattgtctttttttttttttttgagacagggccttgctttatcacccaggctggggtgcagttgtgtgattatagctcactgccacctcacatttctgtgctcaacagaattctcccccctcaaactcccccgtagctgtgaccacaggcaagcaccaccacatctggctattttttgtacttatttttttttatgtttaatgtttgtgggtacatartaggtgtatatatttatagggtatatgagatgttttgatacaggcatgcaatgtgaaataatcacaatgtgaaatmatggagaatggggtacccgtcccctgaatcatttatcctttgtgttacaaacaatccaattacatgcttttagttatttttaaatgtacaattaagttcctattgactatagtcacccttttgtgcagtcaaatactgggtcttattcattcttctatttttktgtacccatcaaccaccctcacctcccaccttgccccccactgtccttcccagctctaactaatttttttagtatttatggagacagggtctgccatcttgcccaggctggcctaattgtttcttgagaataattgttgtatcccccaaacataaggaggagagaagtcgttttacatttctgatgatgctttctcagagcccagtgcaaaggagaacaccagtcactgctggcgggtgtctgacattcagtttggctgtttcacttgtcctgtgatagctaactgatcttgctgtctcatcatgcattatttgcacgattggcagttaytaaggtacaccaggctagaagggagtccatctggctctccrctgggccctgtactcttggcccaggatctgaaccatagcctatgcttaataaatatttgtggaatgagtaagaggttccatctatgagatgaaaaccactggtggctgataagtattcaaatggcatatcttctgtaaatgttacagaacgtcaatgccattaggtgcttgaagagaagtttaaaaatattcatatgcaggaaatgagatcatagaatttctcataaaaatgcagtttgatcaaattgaggggatggatacccacttaccttttcatagtaatagtaaatttgttatagaaaacacattttaccttccttgtctcctaattcraggtcatgtgaagcttagctagaaggagcaaagtacattttgttctgcctgaactgtctctagtgaatacagttaccctgggctttattatgaatacctggcctgttccacaaaagcaatgaatagtgcttcaaggaagaaattttacttgttttatttcccaagaaactcaccaaattgagttgtctctactttcctttcaaaactataactaagtacagtagtaatgtcaggtcacttatgattttgacctgtgccaatctttgaatatttgaacatttttatctcctgaaaaattacttggcttgagggagacacagttggatgagcaaagaaaaaaagaaacaatcaaatgattttctgatgctttcgaatgttyataggcttgctttgaaatccctctgtctatatcaccccatcctgtttttgacttctaatctcctttaccaaatactatgtagcaatattttgtgagtcatccaaaagttgagtatatttagaccaccrtgacaatcaaacagtataaacagaactactcatctgtctgttcatcatcatcccacgcagggagttaattcctaataaaggagtttatcagatcaccctcaattacatcactttgggataatttcatacccaaggaaatttgaggcatttttgccttggaaaagagcaggtgccttaygaaaaagaaactagatttgtgagaactgggcttatgtttcaaatttatattctcaactttactctgaagagatggcttggaagaagtgacggtaacacagaattgccagtttgcttggcaaggtcaaactattccatatgttaccttrcaagaaaaatatgttaatttaaaaaatatcagagaccaaatgagaagttgaacacacagctgatttagctcagatttttgtttgttgttataccgattgccatattagctccctcttctaccacctcaaccccacccccaccaccatacagctgctcgcttgctcgttacaaagcatatttccccctgtatattaatgtcatattcagcaaatcaggaaattttgcaacttcccttctgatcctaatctggctatttttcttgagttcagtgtcatcaaatcagaaccagacacttttgttaagggtatcacattcaaaattgcacacaaacaagccccaccttatttttatgaaaagtctgcccagttacccgctttgtcccgacactaatagagccaaggctcagggtttgcaatgtaaggaaatgtggagtacattccagcatgctttctatgatgagtagatgtttgatagtacacctcacttatctgtgcctccccagttggggagcctttttcttatctaaaaggccttgccrtatcaaaggtaaggatactgtttggtaaattcctctaaataagaatgccactaggagaaatttaaattatatgtaaaggaataaaagttgaaaaataaagggttttttgtttgtttgttttgaaaagttggtttcaaacttaaaaatttgcaagtgtcattttctgaattgtggaaatagagtaaaatttatcatttcttataaagttttaacattagaaaaaaagcttcttatgactaaaactaaggcatttggtaaaattttcttacygcttctactataatatctatttctctttagatagataaagatacagatttgcagtaacattggaaagtaagtgaaaaacacagaggaaattaaaactttactataacctacctgtgtagaaataatcactgttaattttaatgcataaatataaatttttaaaaagtggaaccgtattgtaaactgatttttatcctactaaaacaaacattaagtatctgctgaaatgttttaaattttttcaaaatatatgtattttctgactcatttgctataatacttaactcattgctgcccatgtaaacttgaactgtctcatttgttaaagcgtgagagaattcatagttaattctttgtacagctaaattgttcagtaggaaatgcagaaagaagtgttaaaagaaaatcttcagccaaatttmatttaatttaaaagagtttaattgagcaatgaacgaatcatgaatcgggcagcccgcagaatcacagcagattcagagagactccgggggtgccttgtggtcagaacaaatttatagacaaaaaataataataataaagtgacgtacaggaatcagaagtgaagtacagaaacagctggattggttacaggtcagtgtttgccttatttgtacacagtttgaatactyggcagtgtgtgagtggttgaggtatggctgctgggattggccaagactcaaccactgttacagatgcaaacttttaggctgtcaatcttgtttacctattaagttaggttgcaattcatccacaaggactcaaatacagaagtatagagtccttctcaggccatatttagtttgttttaacagacgtagaagagaaaacccttgttctttgctttgtccagggtagtcagctgattggaaaggtaaccgaagtctctcaacatcaaaacatttctaatgcaaattctttaagtcgtactgttcctactcaccttgaacttatgagcaaatcccttatcaattgtgctaccttttattcagataatgaatttgggaatagggtttggaattcaagtcccatagcttagaaaagattgagtacctggcaattcagtatagttgtggattgcaataattcctgtgcttgttaagtaaccaagatttttgtgtgtgtgcgaaaagcatgtgtaaaataattgacaatcagcacttctgttggatagatgggttcctgaaagagcatatgtgaataaattttggtgtatctgatgctactttcctgttaagctactatggaaattatcttaaacattatattcttttccctgaggcagaaaatgtaaataatacattcccacaggtaacaactataactatttcctatgtatgttttcaaaaatggttcaygcacttacgagcatttgtgtactgtatgtattcatgcacttatatagggtaccctaagagatgatttttacatgagggcctatcacacttacatattcttacttcttaagggaattcaaaggtagatactttgttgtccctaaaaaaggtacatgaagatctatttccctcttatcagaggcaggcttcatatctgtagtaaaggagaaaaatatagaacatttgctttaaaagttcctctttttataaataatacttgctaacttttatgcttctgttttataaggaatttcttccttgtgctatatacaaaagttgcttccaggtggattaaacaaggcataaaaagataataaaggaaaartttgataagtagttcaaataaaaaaattctgatcattaaaaggcaccctaaggagtattaaaagacaagtcatagggtggaaagtatttgcaacttatgtagacaacactggaccagaatatgtgggttacaaatggaataaataaagaactcgtacaaatcaatttttaaaagctaccaggcaataaaaaataaataagtgaaaagtagaacagccacttcaccaaagagagaattcaaatggctaataaacatgaaaagatgttcaatctcattaagtaataagaaaaatatgaattaaaacaacagagataccattacacacccatttaattggcaaaaatttaagcctgataataccaagttctggcaaggatgtgaagtaacaggatatttcatatactgccagtgggagtataaattgttaaaaaccacgttggaaaagagtttggcataatttgataaactcaaagttatgcaaactctatgacctagcaaacttcactcttgagtatatttctcaaagaaatgcttacatacgtgcacccagagacacgtaacccaaatgtacatagcagccctgctcataataaccccaaactggaaatattccagaagtccatcaacagtagaacaagtaaggaaattgtggtagagtaattcaattaaatattattcagcaattaaaataaatgaactatagctagacgaaacaacatgataaatcttacacacataatatagaacaaaagcatacagacaaaaagaatacagtcagattccactgatataaagctgaaaaaggagggagaaaccaagtaccttgctcagagatgcataactgaatagtaaagttagaaagaaaatcaaggaaatgataactctgcaagtcaggattgcggttaccctgggaaaacccaggggtatgagggggaggcacrcacaggaatcttctgttctatttttttacctgagcagtggttacaatctgggtgtttgctctataactctttgttaaagtgtaaaatttttttgtttgtttgtttgtctgagatggagtctcactctcttgcccaggctggagtgcagtggcacgatcttggctcactgcaacctctgcctcccgggttcaagcgattttcctgcctcagcctcctgagtagctgggattataggcgcatgccaccacacccagctaattttttgtatttttagtagagacagggtttcaccacgttagccaggatgggctcgatctcctgacctcgtgatctgcccgcctcggcctcccaaagtgctgggatcacaagcgtgagccaccacgcccagcctgtaartatttttttaaaagacgtgcagatagaaattatcttaaataattgcttacaagacaaagagaacgacctgcccccaagtcccccagataaagtaggatatcactaagaatccacacccaagtaaagtaattaaaggggttaagatgtctctccttttgtgattaacaccccgtcgtgcttgcagaggcaccgctgggtgtcagggaacctgcctgctgctcacctgaacaccccataaataacaccagctctaggacatggtccatgtgaacaaatgaagaatctctccttcagccagagggtgagagtggcataggtaacaactagataatgcttggctctgcctttttcttattgatttgtaagagttctaattgcaagataggctgagaaaagtagtctagccatgttccatgaagaagagaacatggaattaggttagtagctagcagcctcagccacaataactttattttgtttgtgcactcatcatttaagaagtatgtgagagcctacaaaattggggagttacttctcgggaatgctccattgagaaaaactgctgcctcttttatctgtgtagtcaatatcatggcctaaattctagaatcttctcacatagccagagtttagtgatcaagcaccacaaaccaagagatattacataacaataggatcgctcaaacaaatctacgtgaactaggaaactgctttttggctcactcagaggtacaaactttacacccactgaaaattgtcccaggattggataaagaaaatgtggtacctatacaccatggaatactatgcagccataaaaaagaaatcacatcctttacagcaacatggatggaactggaggtcataatcctaagtgaattaacacaagaatggaaaatcaaatgttgcatgttctcactttcaagtggaagctaaacattgagcacacatggacataaacatgggaaaaatagacactgcagacgactagagttggtgcggggaggacatgggttgaaaaaatatttttcaaatgtaactactgtttgataaaaaggaactatgctaaatgaccacttctcccagctaaaggcagaccatctacattacatttttttttttttaagacrgagtttcactcttgttgcccaggctggartgcaatggcaccaygtcggctcaccgcaatctctgcctcctgggttcaagcgattctcctgcctcagcctcctgagtagctgagattacaggcatgtgccaccatacccggctaattttatagtagagtagtagagacggggtttctccatgttgstgaggctggtctcraacccccgacctcaggtgattcacccaccttggcctcccaaagtgctgggattacaggtgtaagccactgtgcccgggctacattacatttttactcagttaagagcaaacaataataggtgaatagcagcctgattctgtatgttaaaaatgatwggtgattgaatctcaaatgtattagtccgttctcacactgctataaagaactacctgagactgggtaatttatgaagaagagaggtttarttgactcacagttccacaggctgtacaggaagcatggctgcgtggctgggaggcctcgggaatcatacagtcgtggtggaagtgtgaaggggaagcaagcacatcttaccatggtggagttggagagagagagagcaaagggggaagtgccacacactcttaaacaaccagatcttgtgagaagtcactcactatcatgagaacagcaaggaggatacgtacttgcatatatactccctgaatctaaaataaaagttgaaaaaaattttaaaaagaaaattgttgggaggctgaggtgagaggattgcttgagcccaggaactcgagaccagcctgggcaacatagaaagaccctgtctctaccaataatcaaaaaaattagctgggctttatggcgcacgcctgcagtctcagctacttgggaggctgacatgggaagatggactgagcctgggattctgaggctgcagtgagctacgatggcgtactgcactccagcctgggtgatagagtgagaccctgtctcaaaaaaaaaaaaaaagaaaaaaggaaaattgtccaaggaatttaaaaattttcattttggctctctcatgcgcagtaaccgtgagggtttaaaggacagtgccagggccccatgttgttagagagcactctgttgtctttggcatgggagaggacttcagtgcaaaacggtgtaygaagtgtgttgtcagcrgaagctaatttacaccctgtgctggacggagggttgcttgtttggagttgtttttcctgtggctaaaggattcctgggaatgctgttcaggcatgtctctgctggtggtatgctgtcatccttttcttttccatytacagtgtagagctgttacagttgtaaacaggcctggctttttacattgttactcactggtgtgggaacaatgtatgttaatgacataagtactgcccttgagagtactgcccaaaacagccccaggttgaaaatgtatcctyacagatttaatttttcttataaaagaaagaggtatgttccttctgtgtagagcgaactagaaatatattaaccctgmaactaacatgcagcacttcacaactcattagtgaggcccctgggatatggctccatatatttgcccacaagttggtataggccagaaaccagctgctttttcacctacgtggtgagagccagaggccagtcaaggaacaaggaactataggagaggaactacaaggagaatcttcagattttcaagcctattattgttcaatacatagtagtttaaaaaacttygacagttgtacttaaagtcccttctcatcctatgagtctctgcctctgccagtatgtgatgtttctggctcatggtgatgacaaattcggatgcaaaagtaaacaaataggcccccatcagcccatcggggcagcagccctaggcagtgacagttaaacagttgcaaagacctattttcagaggcatgtacccacacctgacctactattaagtaagcatggaaattagtatttctgttggctttaattaagtaaatattatagtttgatccacaacaccaaatctttgtcaatgtcctaaaagaaattgttcttttcaccrcaagagttatgtattcagagtaaaaatgggtagatgtatattttctctgtgaaggaaaagaactggaaggtgcttattttattycaagagttcccaaagygaggccgggtgtggtggctcacacctgtaatcccaacagtttgggaggccaaggcgggcagatcacgaggtcaggagttcaagaccagcctggccaacatggtgaaaccccatctctactaaaaatacaaaaattagctgggcttggtgtcaggtgcctataatccagctactcaggaggccgagacaggagaatcgtttaaacccgggagacggaggttgcagtgagccgagattgcgccattacatctcagcctgggtggcagggtgaaactctaaagaaaaaaaaaaagagttcccaaagtgagaccattactcaaaaatttgagatgggaggctaaattgcccctgctgtgtatttagagggttagtattgaataggtcaamaagcatttcctaagtctctaggctgaatttctaatacggtttcttagtaaccattctcttaaagaatgtgagatttgaggtaagctttgctttaagggagggacagatgtgaaccctaatactggttagaaggacataagagaagagagaaagtaaaactatttaaggaatttttttctctcatttaaggcccaaagcagcctttccttttctcggtccaatccgatgcttaaacttgcctgaatttcctctggggttaagttcaaactaattttcactgttctaagcatgcagggctcttgcacaacttcatgcctctgtgcgtgtgtttccaccagttggaatgccctttctcccacccacccctaaactcgtacatgcttatccttgcagagacctcctttgtaaaccaagaagcccccgactcccctgttacagaggtaattgctttggccttacctgttttacctcctggtaagttacrgcacttagcaccttgcaattagaggtcatagatttccctgcttctctagaatgtgagattcttaaaggcagggattttatctcatttattagatttgtatcccatgtacctgacctagtatctagcacaacttagtagatatcaattaatgttcattgtatagtcctttgatratgcggtttggccctgtgtccctacccaaatctcatatcaaattgtaatcctgatgggaggtaattgaatcatgggggcggacgttccctttgctrttctcatgatagtgagtgagttctcacaagatctagttgtgtattttattatttatttattttttgagttggagtttcactctgtcacccaggctggaatgcaatggtgcaatctcagctcactgcaacctctgcctcctggttcaagtgattttcctgcctcatcagcctctcaagtagctgggattacaggcwtgtgccaccacgccyggctaattttgtatttttagtagagacagggtttcaccacattggtcaggctggtctcaaactcctgacttcagatgatctgcccacctccgtctcccaaagtgctgggattactggtgtgagccagtgagcccagccaagatctcgttgtttaaaagtgtgtggcacttccccctttgctctctttctctctccaactccaccaaggtaagacgtgcttgcttccccttcacccttccaccatgactgtaagtttcccaaggcctcccagccatgcagccgtgcttcctgtacagcctgtggaactctgagtcaattaaacctctcttcttcatacattacccagtctcagatagttctttatagcagtgtgagaacagactaatacatttgagattcaatcacctatcatttttaacatacagaatcaggctgctattcacttattattgtttgctcttaactgagtaaaaatgtaacgtagatggtctgccttcagctgggagaagcggtcgtttagcatagatcctttttatcaagcagtagttacatttgcagagtactttttaaaagcaaaatatttgttcttattttcctggagtttacaacctatttgggctgacaagatgtatagagatgtgtgtgtatatatatatacacatatatgtgtataaacatgtatatgcacacacatttacacacatacatatatgtagtttcacttattctttcaacaaatgcatatggagtgctaaacacgtgcccrgagctgtgctgggtgctggcacccgagatgcggactccacggtgcctaaccacaacacttcaatacccagggcgatgagagccagaaacaaaakaagtaagataacttcttggtaagcaggaggaaggggaaaagattagaggagggtaaagaaagcaacctaagtaaaagttagaaggtacaaatgggcatggaatttgcaggagtggtgaggagattcatgagactaaaggctttagggagaaatttgggggccaataaaaagctatgagtacacacacacacgcacacacacacacacacacacacagtgaatgatactcagtttaacctaattcaacaagcacttcctgattcctgactgtatagaaagtactgtgcaacatattgagactcattcaragatgtttttctttctttcttttttatgtttttgagacggagtttcactcttgttgcccagactggagtgcaatggcgcgatctgggctcactgcracctccgcctcgtgggttcgtgcgattctactgcctcggcctcctgaatagctgagattacaggcaagcgccaccatgcctggctaattttgtatttttaatagagacatggtttctccatgttggtcaggctggtctcaaactcctgacctcaggtgatccgcccaccttggcctcccaaagtgctgtgattacaggcgtgagccaccaagcctggcctcgttttttcctttgagayagagtttcactctcgttgcccaggctggagtacaatggtgcaatctcagctcactgcaacttctgcctggcaggttcaagtgattctcctgcctcagcctccagagtaactgggattacaggcatgcgccaccatgcccagctaatttttgtatttttagtagagacagggtttcaccatgttggtcaagctggtctcgaacttctgacctcaggtgatccatcagcatcagcttcccaatgtgctgggattacaggtgtgagccactgtgcctggcccagagattttgttttaagagaagatttagagtgtcaagtgctagcagttcagcgggaaaaacaaaacatatctcatatgtgtaatataagtactacatatcccagtaagcccatgaaaatataagaggaaaatataataatatatatgagaatataagggaaaatatattaatatatataagaatataaggggggccaggcacagtggctcatgcctgtaatcccagcaatttgggaggctgaggtgggcggatcacaaggtcaggagatcgagaccatcctggctaacatggtgaaaccctgtctctactaaaaatacaaaaaattagccaggcatggtgacgtgtacctgtagtcccagctactcaagaggctgaggcaggagaattgcttgaacccgggaggcagaggttgcagtgagccgagattgcaccactgcattccagcctgggcaacagagcgagactccatctcaaaaaaacaaaacaaaacaaaaaaacatatttgtgttgaaaattgagtagatacataagaggaagcacatccagagaagcttaacataaagcattgtattagtctgttttcacattgctgataaagacatacctgaagactgggcaatttacaaaagagatttattggacttacagttccacatgtctggagaggcctcacaatcatggcagaaggtgaaaggcacatctcacatggctgcactgtkagagagcatgagagccgatggaaacgagtttcccctcatcaaaccatcagatctcatgagacttattcactactacaataacagtatggaggaaactgcccccatgattcaattatctcccaccggatccctcccacaacatgtgggwattatgggagtacagttcaagatgagatttgggtggggacacagccaaaccatatcaagtatataagcaggccagggattttaagcatttgcagtgggtggactaccatcttttgaaccaggagatgaaaaaatatcctcttatttatttaaacacagtgtcatttttatataccctatgtctaatacatccaatattggaagcatttgtgggtgagtttcttttgctgctgtttctcattcactttacagggaatggtctatgactagcctcttcacctcaggccagccttgggttttgtcttctgtctcttgttttcatgaggccatgaaaactgaagctcattctctagcytctgagaaattccctcagkgtaaaacagctttaagtgctctgctttccactctgtgttcccacttttatttaaattttcccttataaatccttcttcttcttcttcttctttttttttttggagagacagggtctcaccctgttgcccaggctggagggcaatggttggaaagatatttctggaactcagaagagaggttaagactaaagacatgttttagttatccacctagagagaaacataaggccataagaaagaagaaatgctccagggaaagtcttagactgagaagagaggagggctaaagacagactctggaaaatgtctgtattymagaaccagacgtggggctgggcactgtggctcatgcctgtaatcccaacactttggaaggccaaggtgggtggatcacttgaggtccagaagttctagaccagcctggtcaacatggtgaagccccatctctactaaaaatacaaaaattatccagacgtggtagcaggtgcctgtaatcctagcttcttgggagactgaggcatgagaactgcttgaacccaggagktagaagttgcagtgagctgagattgtgccmctgcactccagcctgggtgacagagagagactctgtctcaaaaaaaaaaagaaaaaaaaatcagacatggggcaaaatggagctgrtgaacacagctaagaaggagtagtcagggaagtrttaatagaaggagggtggagagaacaatgtgggggcaaggagtggaggtcagcctctgaggaagacagggctcattctaaagattaacattctgaagatcttaagggggagcactaggaagaggaattagatttggtgtctcggtggctgctgaggactttctcaggcattttggtataatttgagaggaagaagcaagatcgtaagaggttgagaggaggacgggaaaagagagaagaacaggaaaagagcaagaatgggaaaagagcatatatagaccatgtttttaaaacatttggtgatgaatggaaagagaaagaatgattcttgatcaccaagccaggtcattgaaagatgttcttagcataagagaaatttgtaaggagcccattgacaagaggagatttgaggattgaaaattcaagataggctgagcatggtggctcatgcctgtaatcccagcactttgggaggccaaggctggtggatcacctgaggtcaggagttcgagaccagcctggccaacatggtgaaaccccrtctctactaaaactacaaaaaattagccaagcatggtggcaggcacctgtaatcccagctactcaggaggctgaagcaggagaaggtggtggtggttgcagtgagccgagatcgcaccattgcactccagcctgggcaacaagagcaaaactctgtctcaaaaaaaaaaaaaagaaggccgggcgtggtggctcacgcctgtagtcccagctactcgggaggctgaggcaggagaatggcgtgaacccgggaagcggagcttgcagtgagccgagattgcgccactgcagtccgcagtccggcctgggcgacagagcgagactccgtctcaaaaaaaaaaaaraaaaaaraagaagaagaagaagaaaattcaggatagccaaagtatgatagttagatgtggaccctggaggagtctggaaggagtgggaccatgaccacaagttggggcttgggtagtatttcaagggaatggaaatacttcccctccaaagtcagaggttaaggacaaaaaaattgagtgctcacaggtaagmtgacggagatctcctagatagaacagatgttgaaagacatgagatttggtgacttaaggagaatgggagagaacagcagcatttattacagtgaatcttccaaggaatcaactttgcacccaaaaaactaataagattgtggacaaccraaagagttagaattgcctggattcgtggttcagccaacatgtaaagtgacatcccaaacatattcttcaggatccactctcagagcgtcttggtgtttttccagtactgccgtcatacctgtgttccctttccttttgttctctactagcacctggctgttttrgagtggaattgtgtgtgtgtctgcttggaaggaaagattaatatcttgattctcttttgtcatgagtagataaggaagtgtatttttaatcagtaggtattcaaaaaatgtttactgmtggccaggcatgatggcacatgcctgtaatgccagcactttgggaagccaagctgggaggatctcttgagtccaggagtatgagaccaacctggaaaatatagtgagacctcatctacaaaaattgtttaaaaaattagccgggcatagtggcatgtgcctgtagtccccgctactcaagagactgagacaggaggatcacttgagctcagcaagtagaggttgcagtgagccataatcgcaatcataccactgcataacagcctgagtgacagagcaagaccctgtctctctttctctctctctttctctctctctctctctctcacacacacacacacacacacacacacacacacatttattgaattgagagaaacaggaaattttggatattatggtggcttctgttcagcgttggatattaggggtgtcaaatggaagtataaaaaccatatcaaaatattgggtgaaggtgacagtcctaccctcgcctgtttcctgaaggtctgttgagtgagataagaaaggtggttgctatggagctgctttgggacttttgtttgacaatatagaaaaggccaaaagtataaagcaggacatcaaggaaaaaacgtatttccataaaagaagagaacatgaggtgagagtggttatgatgactgatgagaaacatattaataaatggctttataaaactctccttattctcttagattggcaagacaaagaytagacttttgtgttagggaaactaaccacaaattgtggcctggagccaattaggattgttcccaacccccttgtccaagcttggcctccttagaaatacggcagtacagacgattagtaaggggtatctaagaatctctgctttctgtttattgcttcatgaaggtggttagcttaatttggtttgtcggggcactgtatacacagaaacatctcccttgggcctcttatgggtaattacagaatctgtcaaatagggctgatctgcctggagagacaaggagcacagcatctatggaacagggagttsggcagaaagtttagcaaagaagcctccaggatggcaatctgagtcatggccagatgtcaggcgagaatgcgtttccagcacatcgctgtgatgatttaagttacacactctctcctgcttgctagtttgcaaagattttccatctcaggagatatttctgcagctcttcctaagagtgaagacattctgagcatgttacattcacaatcaggcctccttgataagtattgagattcagagtcaaagttgggaaagcagccttcaattgtactcattcatgtgaagttttataatgaagagtgtatgtgtgtctctttttgcacttaaacaaaggtagggaagttgatggcaactattttccttctttccccatcaaaacctggagtataaatgtgggcgtggaaattagagggaagcctaaaatttgtactggtccccagcccccgtgtagattcatcagcgagatcccaggctgtttgaaagaatgctgggcctggagctgagggacctccccagaggcaaattgatggttggaatgctgctgcagaagggctcagtgtccctgtggttctttaagtctggaatttttctttcttttgaaaaacgtacttttggggggggcggaaatgaatttgaatctattttctaccacatgtttaatgaccgaggtgatgtattttttcctcaaattattataactcccagtaaaaattcaagcctgtagaaggtaaggaggagattatatgatgaaagtattattgattttagtggaatcatggaatttaacatatcttctttacttccaagttagtgyttttcactctacatcatgcccaacactttcctaggtaaacaagggctataaaagaagggcttttaatgtatctcttcccctgctttggagcaaggcagttacagaacaacaacaamaacaacaaaaataacattatctgattgattggttgattggttggttgattttagagataaggtcttgctctgtcacccaggctggagtgcagtggtgtgatcgtggctcactgcagcctcaaactcctggactcaagcaatccccccacctcagcctcctcagtagctaggactgccggcacatgccaccacacccagctaatttttaaaaaatgttttagagttgggggtctcactgtgttgcccagactggtcttaaactcctggcctcaagtgaccctcctgcctcagcctcaccagtagctgggattacagatgtgagctgctgtatgattmtgtctcrcataattggatatattttaaatggtaaacttgatctgtmtaatatttggacctccctcaaaaaacaaatcattcatgaagctttggaaaggctattataaccaaataatgtgtgcataagraaccttctccccacatctctgagccccttttcattatggaacctcacagcatccctcaggatatccctgagcccaggggaagatgagagtgggaggaatttcagtgatgggaaatagaatcaagttaaagtaaactctgaattcgatagagacagtgtgggatgaagcaacaacaaaaaaatgtattaagacgctatcaataatacattttgccagcatttttgagacgttccaaaccagtctcagaaagtttgagactgatcccaagaaaacaatgagaaaggttgagtctaagcctaaaattttggctgaatttggaaattatcagtgtgaaggctacacaccaaaaatataagaaccaactgtcctgaaagtttgggagttaagatttgrggaaattatttgaaatcatttcaatctaccaattcctgatttttttgcactaagaattgaaattctgaatcccttaatttatgtatcaaatatatctaccagcagtgcagggacaatragggtggaaatgcattaactaatagattatatggactgccttaagcaactgtataatttctgttaggatgaaaccgaaccatgttgggaattctgatttaaaatgaggtctgtactttatagatgtggaaaataaggttcataggacgaaattacttcctcaaaagcgacataactgcgttgcagcaaaaacggcaggagagtgcaggtctctaagccmagtcttggactaggttcttgattccaacagttctccagtgatgcttcygaagacactgggctgaaagtgaacagtgaccctctttcccgaatgtctataattttctcaatttaaaatttttctcctaaaagacaatggctattttaatcttttctgtttgtttgtttgttttgagacacagtctcgctctgtcacccaggctgtagtgcagtgacgcgacctcggctcactgcaacctccacctcctgggttcaagcaattctcctgcctcagcctcccaagtagctgggattacagttgtgtaccaccatgccttgctaatttttgtatttttagtagagacggggtttcaccatgttggccaggctggtcttgaactcctgacctcaaatgatccacctgcctcggcctcccaaagcgctgggattataggcatgagccattgtgcccggcgaatattttaatcttttagtgacctctgccatttttcttttcaagaacaagatgaatgagcaaatgtaaacattttaaaattaacttggaagggctttgacagatttcatttctcatggacatatgcttgtgactgtttcaatattgcaggcatacactagcatcattttcttttagcagaattgcttggtgctcctgtaatagaatgaagtgtaatagtgtgcaaacattcacaacttccatgtgctctaaaacctaaacaagtttgaacccacaagtcactttgtaaggcacatccaggctcgttgagattctaactggtggaaatagttgaaagtatatttgtcacttacaccttgcctatatccaagaaggatttgagtcttcctccaacaagaatgcatccaagccagtctaaaactgtcctccataaaatagggaaatacactttgggaatttcataagctaaacactatttccacattggtcaccatggtgaacacaaatawgcaaaatcgactgaatggtaacaaggcagggagagaacgtgcttcctataggatttgatctgctgcttattctgatcaaagtggaaactrtaaaggttggttggagcggatagcccaatgcctgcccagtaacagggctgcaggaattaacacggtggacgagggaaggtacagaccattttcggtggctaaatgagaaataatactaagcgataggatatcctgtatgtttagattacttgcctctgaaaacgagctcyaattctttttcagaacaagtattgggaacaaactgtggatatttaatcacttaagggtactttcttctgggaaaatcgctcactcttaatttttcagttgagttagacaagggctaattgcaagaggattaaaaccttgaaaactgctttgttcagcttattgtttcaggtttccctttggagtgtggatgatgtgtttatttgacataatgaataccaccatccgctttgttccgggaaccaaaaggctatgtgcttgcccaaggaatttctcagttgtttatatgtaaggaaacactgctctgtgttattggatgggaccattacagctctttcttaaatagggaatgcagagagccgtgctttcctcactcacatctgagcagagaaaccagaaaatagccttcagcactccaaatgcctgcttgttttcaacacaagagagcaaagggaacatttattgaaaatgtgtgttcttcgcttaggaacccagagctttactttgtgttattggcacatctacttagacctatgttatatgtgtatgtgtgtatatatatatatatatatatatwttttttttaagtattagattggagtgcttggcatgaatcatagattagagaacattgacaactaaccagatagtgaactctgcctctatcagccaaatctaactgccaaaacactgaggaataaagtaaccactaattaagcagcctrgagttttgtttttgggttttttttggtggtggttgtttttaatacataccctgccataggatgagggcaattgtgtgaaatacatgctttgcggtgacttccagtgatgcaacatagcagtctttttaaacagctgaaaactctctggtcctttatggtttccaaaaggtactccttaaatgggcataactgatgggggattggctagtgagctacagagaaggctgagtcagagtgacctgttggagctagccccgtgtgtgtgtgtgtgtgtgtgtgtgtgtgtgtgtgtgtgtgtgtgtgtgtgtagaaaagggggagccgtgggcaaggggcgggggtgaagggaggctgcaagcttggcagaatgtttgaacaagacaaagagcagttccagcgaccaaataaggaagtgagtgctgaagtatttcagaatagaagtgtgtcagggactcaaggcaattgcggagagtaaaaataggcaaagaagaaagggcaaaggatttttgttttacttgttccacaaaataaacagggaaagaagtatctctggtctttcagctggagtgagaaaaacagatcgtatctatccctttctgttggctttttatagacatgtgtctgaagagatgtttagaagctctttcagtggcaatggcaataataagcatgcttttgttaaagacagaaaaacgcaagttgtgcattagacgcaccatcacattccctttatgtgtaatgcatgaaacttttagcccaagatgatggaagtttccaagaaccaacagaaatatctggaaacccattttcagacatgtcctgaacactgaattataactgtatcctttgagaaaaatcttacctcttaacaagccagttaaatgtccattagatacagtgtctaacttaaatatgttgatagttactgaaaaagatgtcaaaagaggcaaattacgcaaagaaactgtcagtacttgttttaatcttctcaataccatctccccaactctccagagtggccaataatatgtcactgatcctatggataaatgctgctcttattttgatactttttttgcagtacgggtggaagagaacaaagatttggaaggagaatttcagatactcctaaacataatttgaaacaacctttttttgtcctacaaaaccaacattgagaaattatttctattaaccaagaaatcaatttacttatgtctgcaactaggaataaatagaagacattcatcctgggtaagacttttgaaagccctcaataactaaattgttggcaactctaggattggcaattgaacaaatctatccttctgttctcatgcaaaatacaaaattggacagcccacacttgaatcagaaactaccagaacctgcccagaagagtttgggtagagagctaaactggagtgcaaaatagggaacacacaaagattgaccacggcatgtagatgatcttacaatgtagtgtattctggctccaaaaataacctgccccccacttaaactgaaatataaactctattgaataagctaccttgatcatgcttcaagaaaatgttaggcttatgacaaaatgtttattatcacaaacaaagaaaaaattaaaatgagacacagtgttatgcccacgaatagtcattttaatgaccaagctccatcctaccaatgcttcmctagttgacttttttttttttaagcaatttaacaatagatgtcaagagcagggaaaaaaggctgggtgtgctggctcacgcctgtaatcccagcactttgggaggctgaggcaggaggatcacttgagcccaggagttggagaccaggctgggcaatataatgggactccatctctacaaaaaaatatttcgaaaaagccagacgtggcggtgcacacctgtagtcttatctrcttgagaggatggcttgggcccaggaggtcaagactgtgtgagccatgattataccatgtactccagcctggacaacagagtgagaccctgtctcaaataaataaataaatagtggtaaaaagagtatttgacttcaaaatcatacttctcagtatttgccctgaggaagtaactcaaaatgggaaaagaaatgtataagcctgaagatgtttagtrtagcatattttttataatttcaaaacaaaaaatttagaagtcaaatacacagaatattctcttatctcaacaatgcaatattatgcagcaattaaaactggtaatgattaagcctatgaaggcaaaaaatgtttatgataaatgatacaataatgacgaaaagttaccttgtaaaattacacactatctgtatagctatgttttgaggactagaaaagaacatggtgaaatagtgctagtgtgttatacatacatagaggtagattttttgtcatctttattttgtgtttttcaataataaatgcctttcaaaaaaagatgatgatgaacaagcttacaggcaagaggcaggattccagagtcagaaagaactgaggcttcagagtttacctatccagcaaatataagtcacaaagttttgtgtagctagttagtgatgttgtaatagactttgccatttacagaactgttttacttactgatttgacttgtcaattatttaaaaatagcaaagctagcaaaaatagcaaaatgtcaattatttaaaaatagcaagtgtaattcttttgtgagaaaaacaatcacccacaaaaatgtaactgcagaggctccgagaccatttgtgtgtgtgtgtgtgtgtgtgtgtgtgtgtgtgtgattcctccggtatagctgtgaataatgtgaggtaaccagagactggcagagtcagcccaggattaaacaccgtcatcagmagcaccccagtttaaagagaagattcagagcacctgcatcaggatctccttctaaagccctgaatggcaattgggagccaatcctgacattgagatcacataataaactgttctcacaaagagcagttcatttaatctttccatgcttttgttttggtgaccccgctactgctgggagtaattataaagaactccaaatgattagaaagcattttgcataaatcagcttgtttgaattattgcatttccagggaaaattaattgcgacttagaacaatgcagaaattatttacacacccaggtgtcaaaaagcagaggagaagcaaagaagtaaatrtatatttatagaatttcctgtgatggcttataataactattgagtaatcatagaatgttaaatgtaatctcatccaaccctctatagtggagatttgaaaatggagacacaggactcgaagtgaatcgtgcagggtctcataaagagttaatgccagagccaactcctttgttgaaaatagtagttaaatccttaatggctgttctctagagctctacttgctgcctttgccttcttgcccctctcctgtggcgaacttaaacagtacttccatcagtcttacttcgaaagacttaagagtttgaaggagctctagacaatttatagtcttgtcttaggcaaggtgattctgcttcatctagttacttatttagaatgttaactccttagtggcagaagtcatgtttctcagtaataactaaacttattggcagcaatgccatgtgcgccgtgccaaatgctttccaaagtctcgttgaatccttgcagcaattaatcaggtgtgcagtgctattattctcattttactagaggaggaaactgaggcacagagaggttaaataacttccccaaagccttacacctagcartggaatattaygcagcaattaaaactagtaacaattaagcctatgaaggcaagaatgtttatgataaatgataaaataatagttaccttgtgaaactgcaagctatttgtatagctatgctttgaggactagaaaagaacatggagaaatagtgccagttatgcrtatggatacatatgcatcacaagtgcgtatgttgagatttagacaaagtatcagccttgggatttacacccaaagcatgagctcttaagcatgaacttgcattacttcagtaggtgttcagtgaaagtttttgaaaatacacctaaagtatcccaagcagatgacaattctcttgactatgaccaaaggtatgaggaagaacttctactttgagtaaataaaatgatgggcttccagaagccaggtatccaggtgataatttttctatttgaatatgagaatgatagttacacarataactccaaaaattacctgcatcagtgaaaatttggaggacagacatatataaattttgcaatgttgtatgtcataccagtgaaggaatctaatgatactattatttattaagtgaggatcgcaataagagttattgagtaatcaatgtctctgtatttctttgggttatgattcctgtcacatcagtatggaaaaagatttagcaagtcgcatgctttgcttgtccacaacatccaagctccaaatgtcgcagacataaagatatgcccagagtaatctactctgtaactcacagtgagggtatttagttgaatctccatataaaggaatgatttgaaggaattatctttacctaatccatcctcctccccaaagtagtggaaaatagactcaattatttcacctgaagttaaatttgcatgtgtgaaagtgtatgtttatgaaacaaatagtgctaagcatgacattagaaatggaaatcctaagtcctctgcaaaacattatctgatgagttgattacgtatttgttctctacttatttcatcttaccttaaaaccatgggatactaaggtattttttttttcatcattcatcccctttggtaaaatatcaagtatatgtatgtgtgtgtatgcagatatgggtatatatatgtatgtacaaatatatacatgtttaatgtattattacacatacagatatacacaaagagagaaaaatttgaagaattagatgaatatacgtataaagagaagttttaggccaggtgcagtagctcacggctgtaatcctagcactttgggaggccaaggctggtggatcacctgaggtcaggagttcgagaccagcctggccaaaatggtgaaacctcgtctctactaaaaaaaaatacaaaaactagccgggcatggtggcgcgtgcctgtattcccagctactcagaaggctgaggcaggagaatcacttgaactcgagaggtggaggttgcagtgagccgacatcgtgccatcacactccagcctgggcaacagagcaaaacgctgtctcaaaaaaaaaaaaaaaaaaaaaagttttagtattttttttctcatctctcaatagactgttgttgaagcccactgctctgtataataccccaacacccatttgaagagttgctgaaagttctgtgccaggccatggtgggctggcctgaggcctgatcccagaaccctccagctgaaaggaatgttagagctcagccatccagcccctcygcagaacacatggggaaactaagagagtatgagaattttgtctcaagacctcatttccaagaggactcaggacctgatgaggtctttgttatatttaaagtctaaatagctgtgtgataataatgaacctagcttaggaattgttttacatactagagcttttgtttggttttagatttttttctttttggggagggggtggggtggggaggggaggcaggtagcaaagtactcttcaccacaaagaagttgaaattgaaaaggaaatctgtaggcacttaaatgaaaagcagggcattttgctgatgaggtcaaatgatactgatcaatgggaagctctgggagaggtggctgtgtaaaggagagactgggtgacccagggaagtgtccggagctgaatgagaagttggaatcacatattcctatgttgcagccttcaacctgatactaactcattcttcagacacggagtccaacttccaagtgcttcagggatttttgttaagccttttaagggtatccaaatgaattaactattgtgtttcaccaacgctctagtaattcactttcagtgggcggttttattttcccagatgtgcagattgttcaccatggagctatgagtaattaactcataaaagaaatgtccagatgaatgaacaactgcaaagcacctgttgtcaacagctgatttttgtctccgcgctttgattatgaagagcttgagaatactggaggttgttttcttcttctaaaaccttgtgacacctgctgatttaggttcacatagaatacaatggtaaatagagaataggtggtagagcttgtctttatatctaatgaaagaaaagtgtcaaagtttcagatgaatgtcagatacccaaggatagggctgcattatgactttcatgggccttaggcacttttgcctttgtgggtccgtttctccattaaaaaaaatagaattatattttatagttgtattggtataacgatgaatgtaacccaggctggattcattattatatggtcatcattgttatatttatttatgttcactttttccttctgggtttattaaaattaaaattttttcttgggttgcccaaagtgtcagccctgcccactgaacctaatgaataaattggccctgcctaagattatggacaaagagacttcacggaaccatagctggccccatcgatttttactgtcactgtaacagagaacactgctaggcccatttcttctatttttcctgatgttgtctctgaacaatgagcagctcaagaatcagaaatccctttctcggcaaggtagttcacgcytagagtcccagcactttaagaggccaaggcaggtggatggatcacttgagctcaagagtttgagaccagactgggcaacgtggtgagaccctgtctctacaaaaaatagaaaaaaattagccacggggtggtgcacgcttgcagtcccagctactcgggaggctgaggtgggaggatggcttgatcccagaagatggagactgcartaagctgagatcataccacggcactccatcytgggcaacagagcaggacccatttcaaaaaaaaagaaatccctttctccttatgtaacactacttggcctagaaaagccagtatttgtgtccactgtgctctgccagggctgcttatgtaggggccttcgttcataatatgacaacgaagcaggtgactgaatcaaaaattaattcctccatgatgctaaaagactgtgtctgtgttctccaaaatggagtcagtttgtgaagagaatttttgtcagaccagtttattcattgctacacaaagytttcttaagtgacatgcagtgggcaaacaagggaacaatgacaccaaagttatgtcaagcttgtacttgtaccacccacaaatgaagatggaataataatgttgccayctataagctaatgaacaaaatgcaacaatgggcccaaacatgcatatacccattgccaataaattaatctctaatgagacttttgctaaaattgaggtaatgatttacagaaggcctggcttttaaagaggcctgaatttagtctttatttatggttgccgtattttcttttcacttgcattgaaaactttactttcaaaatcttactttgtcaactttgtccagaaatacatttttttatttttttatttttttaccaatcctcttaagtgaatactttttaaatgatattctaaactcttatttctctcagtgcagtcttctctctgaactcttttcatgagccatatcttattaaaatccattatatattgtaaaagaaatagccattggaaaatattcataggccaccagttcctttgaacatagcagattgaaccaaagtttaatttgaaacatcttttgataaatcttataaattgaccaaattttctcaaaatcattgaactttttctaaagttactaaaaacagacaaatatcatatactaatacaagaataatgatcttacttctttggagcaatggaattattttttacatttacgactatggaaatcttgggtaaaaaaaaaatcttaattttttttccttgaaatctrgtacttcattgtatcagcagtgacctagtataactcacttaaggggcctgtaacaggcaatatcaatattattgtcaattgttttaactgtcaattatataaactatatatcagataaattcttttttttttttttttttttttgagacaagttatcactctgacacccaggctggagtgcagtggcacratcttggctcactgcaacctccacctcccaggctcaagcgattctcccacctcagcctcccaagtagctgggactacagaygcacaccaccacacctggcttctattttttgtagagatggagttttgccatgttgcccaggctggtctccaactcctgggctcaagtgatcctcccaccttggcctcccaaagtgctgggattataggcgtgagccactgtgcctggccaaattcatttctttaattgccaatgttaccaaatattctctcctatggagcttatggtctatattcagagaattttctaattttaaatacatttattacatttttatatttaaagaaagtttaattggaatatttgacttctccttattctctctcttctctctctcttctcattccatttccatattggagtctaggtttgtacattttattttgttaaagatatatactgcaaaataatctcaatgattctcttagtagttggatatctttgttagaaaacctttaacttcagcactgaagcaaatcattatgtatttgcctaatgagaaaaataaagtacttcagataacataatcccgtttatttgacgcagaagattcgtgtattgatccagaagaatggatattcaagtttaagatgtgaagtgctgggtagaaggaggtttcagagatgacaggttaatcagagttagggaaatagacccaattccctccttcttgtgatagtcccctatgtatagcctgtcggagtccatggtttcctttgaattgacttcattcttctgaaaacggcgctgcaacaccctaagcagctccattgctgagagagttttacttcctgtatttctgcgagcaacaatggaatcatggctgatctgggtgttttctaagcaccctggaaatctacatgaaatgcgacacaagattccttgttatggtgtcaccagaggtaatattaatagtattaaaagaacaagctgaggactttatgcatgatcttamccatgacttcatgaattgccactgggattaacgtaaaatctgtaatcctcgcctaaataggccatctttgtctattatccatcactatatatataagatacaacttaaggtttttcttatgtaggataagttcaaatatttagtccactgataacggtatttcaccacttattcaggagaatcacataaacaggcaaattctcactatgcctctttagtaatccacatggaatctgtggatgattccttcagagccagcataactcatttgatttggaaaagggtgctcaatagtgagtcagattctactgtggatcaagcaggacatgtttagaagctgccttaactatttcagatcaagcagacctgactatgcgcaataaaacttggcaataatcaattgctccattggtaaaatggagatcttagggacggtgaatggatggtgaatgcactttccataaatatgtattttttactccaaacatatatattccttggagcttggactctggagttaaggatttacatctccgctcctccccttaccagctccgtgcccttgggtaagttacctaacctctctgtgctcactgtccctgggatgatagttatagtgatacttcttcatggtttctatagtcagataaacaggagaatgcatgtgacatgattggcataatgccagcccaaagtaaagttcagattattttttttactctgttttttaattatctgaaactaaatactgtgttttgcaaaaacaaaattaaaaggcaaaaacaaacaaacaaaaaccagctccccacctgctacataccaaacagtatgttaggtactgcaatggcagcatcgcactgtgtcttttcaacagcagtccagggtaaataccttaacctccacttyacaaatgagaaaacaaaacctttgtgatttcaaggtcatggaaacagtggaactgaccccactctgtccagctccaaaggccatgctcttttcaggacatgccttcactagatgatctcttcagccccctcccgactctgatttygagtcctctggaattgtctcggatgttcaaggcttacctcactctcataagctcagcctgttttttgtttatcgtagcgtggcctttctttacattccaactgcagacctggttgtcattctccctgtgacatagcatttgatgtccactgggttctagttatgtctatataagtacaaacagtcccatttcttttttcccgatccattctcccttatcttaataaaaagttgtgaacaaaccaaagagccataaagttatctttaccaataggatagatgaatttgttttcatgttcaaagtatgagttgtcctcggaggggtgccctttccctcctcccctactagtctgtcttcatgatcagataatgcatgaggctgagcctctttagaatacccacattttggttttttaaagtttctcacttttgttaaaataattactagttgttgatatggagacaaatgtgttttgtataaaatgttacacttaattacagagtccaaattcaaaatagtccaagattgttaaaagttgcttattcttaaaaatgaatggactaaaagctgatcttaagcattctactctcagaaacattttcccaaacataacattactatgaagcaatatcaggtaaaatctataattaatctgttatttccttagtcttgttcttgtttgataaatgtagttgggagcccttgcaaaggtagcaagtacaatagaagaaacaggccattcaggcaagattctgtgactctaaaaaatatagtaagagctaaatcaagtttttaaaaataacatcaaaggccaggcgcggtggctcatgcctgtaatcccagcactttgggaggccgaagaggcagatcacaagatcagaagttcgagaccagtctggcccacatagtgaaaccctgtctctatttaaaatacaaaaaattagctgggtgtgatggtgcacgcctgtaatcccaggtactcgggaggctgaggcaggagaatcgcgtgaacccgggaggcggaggttgcagtgagccgagatcacgccattgcactccagcccgggtaacactgcaggactcygtctcaaaacaacaacaacaaacatcaaaacaccagaagtgaatggaacaagatcctgatgctgacctgattatcagaacatctgttatagacaacattgatcactctgaggaaatacatagcaaaagcctccttgtagaaaatgtgccaatccagaagccaggaatcttctaggaaaatctcaagttttggtaattttcattaaaatattaagcaaaatgccggaagatatattaatattcctttgctgctacatggaaataaaataaatgaaaatatagattttgggctttaattcttaagttagaaaagcgtgattgaacaatgtcgatttgtggtagcagtaaaaagacatttacttggtttgctaatcatatctactttataaaatattatcatgttacctatgctgagcattttgagctagatagtgtgcaatacccgtcagtagttagatagatcaatcagtcgattgataartagatagatctgtgatttggtttcactgccaatatcttctttctttagtgaatactgttggtttttagtgtctttcgttttagtgttttagtttttaaccacctatgtttcactattttcmttgtgagaaaaatatgaaaaggaatgatttgaaggttactttcaccctttccacttttctccccaaatacttggcgaattgagcccaatgtttcatctcaaagtaaatttgcatgtttgaagccttaggcctctgagccaaagcctgtgaaggtaaagccagagatgcacgscctaaagcagagactctggcagatacagccagcgaagctggagggagttccttgagtgtcactcctgacgaaataaaagttcattgtgtatttattctctgcccctttcatcttatctcaaatccacagagcgctaagttttagtcaaggaagaatgaaataaaagtaatagaaggagaagacttgatcagaatcttcagtgttcagaggaggatggaatattctttttcaaacttggcagaaattctcatcagtgcttctactgatactagttttagcaattctgaggcttgttcaaagtgatggccaagatgtatccacacctcccacggttcgtgtgtaaaaccttcaaagttgcaaacattggaatattcagtgttttgcatcagtgccttaaatcttcatggatttcggcactgaaaagtgaaaactggtccacgtgtaygcatctttccgggcacctgtagttggaataaggcagacacacagagatgacagatmtaatggatcatccttcttttgctgtctcctcagagtaaaggaagtgcgtatgtyttctcacagccaatcaactctccaagtctattctaccccacagtcccttccatggccggtaaacactacaggtggtaatatcagacatctgttttattctttctgctctttatgttgtgaaaggactcctaaatcataaaatcataaaatttaagaagcgtaacttaaaaatccatcagattaatcccattattgtggaaataaggaagcttcagagtcccacagttaatggcacagatcacacgtcctaactctcatctggtggcactctttagtcagtgtcccatcacagcctgcaagaaaaccctgctgcaggccacgtgatgtcattgctgcagccctaaggkccctttgacatgggcgtaaacaagctgagaattcaaagaaaggtgaagctaaacagggaaatactgttagaaatattagaataggcaaagtgattttcactctttaaagtytgtgttccaggacaatgaattgttggyctatcaccctctcaaaaatgcaagagatgataatgctttgtattatccccagaaagatgactatggtcagtatattattaggttaaaaaaaataggttacaggccaggtgcagtgggtcatgcctataatcccagcactttgggaggccaaggcaggcggatcacttgaggtcaggagttcaagagcagcttggccaacatggtgaaaccccatctctacaaaaactacaaaaattagctgggtgtggtggcaggcgcctgttatcccagctacttgggaggctgaggcaggagaatcgcttgaacccaggaggtggaggttgcagtgagccgagatcacgccactgcactccagcytgggtgacagagtgagactttgtctcaaaaaaaaaaaaaaaaaaaaaagtyataggctgagtgcggtggtcacgcctgggaggccgaggtgggaggatcacttgagatcaggagtttgagaccagcctggacaacatagcgagacsttgtcttgaacaaaaaaaaatgttttaaattagctgggtatgatggcacgtgcctgtagccctagttactcaggaggctgaggtgggaggatcacttgagcctgggaggtcaaaactgcagtaagccatgactgcaccactgcacttcagcctgggcaacagagtgagaccctgtctcaaaaaaaaaaaagttacaaaattgtatggaaacaattatctaagctattttaagtgtgtgtttaaatacacatccaaaagcctggaggactatattttaggcagctaacaatttatctctgggagtaaaatcacagggacattcaattttggtttattgtttaaagaacaatatttggtttttaatattttacagacatcgttattcatttaaaagtcaataaagatatttccgagagaggaatagactacctggctgaagacagtgracctagcaatgctagtgttagatatcagtaatgacggcaggatacagttacagtactaaaccctttaaacaagtggtctactggctattcaaaactagttagcatttattggcagttactgagtgaccacgttaccgaaacagcctggcacaacagtaagttcagtaaatggtagatattaccattcattcattcattcattcatgcattcattttgttaacagcttattgtgtgtgaaagatttggtcccagtggccaaggagcacactctggaaggagaaagaagacagaaattgttgtgacatggtgtgccaacccagctactggaggattatmcacagagccaggggtgtccttagctgatctggtgaaagaaaagttggtgatctggatttagggctaagcccacaatctgtcacaaattttgcatagaatattaattctggaacgaatgagtccagttcctctttgaaaacacttctacagaagttcctgtgtagatgagcgttaaaataagtgactcagggcctccagtagtttatgagctaagaggatcacaggataggatagggaccgggttcctcagatgttgctagatcaaatgctttactcttctcaccctaagggctcctgaatttagctttttattacacagaacccagtaaactaattaatggaaatctaaaaattatccttcctcttcttagaaaagaaatatactgcatgatgatttgtgcttttcgatttaatgtcacacaatcgtttwtacactgtatgtgctttccctccccacagccccagtcccagccccagtctcgcagttccattccttcagggcagcttccattctaccgtgagtttttattgctttcccctaaaacgctgccctggagtcgcgtttattggacactctttagtctgtaaaggaaaaaaacacaaacaccggaggagaatcatcctaacaagccgacaacrtatctatgggcctaaaaaacttaaattctttcccgttattagcacttctcgatcgttccaggaaagcccgatttgtagcttggctgccccaggaaggggcctgcgaccagaaagatgcaaagggcgggacaaggttacgagtgggtgcggggaagcctccctaacctgggggccgcgtcccagagctgcgagccacgcctcctctctcccgcccgccgcgccgccggactcttattttgaagggcggcgggtgamggctcggagcctcctgagtcacccggcgggcgargtataaagcccgatacctgccccgcgcccggtccgcggagcccgctgcagctcccgctcgctccggacgcggaatcgggcagcagcgggaggcggcccggagagccgaggtaggcgcggggaatcggccctgaggctggtggaakaaatgtgtgaattaaagggagtgcagcgtgcagggtgggccgcgagtcgggagtgcagggctcgggacagggtgggggcggggaggacaagagactcgtcagcgcactttccacccggccggttccttcccgagccctctccctcccccggcccgcgggagcacagatccctgaaagcggagctccagataggaatgtctgcatcatcttggcagggcccagacgggagaagatgctctgctgccacggacgatccctcccgctctcctaactcttctctgaacacctcgcacccccacggccccccgcccctctcttaatcttggccacgctccctgaggggtcagacctggggtgggagrgcagagaaagcggggctggcagagacaggggtgagggccgggagaggcgatgacatcattccctggcagctggcggggagrgggtggggacggaggggtccccccgacctgagccgagccctcccttcccaagcccatcctcctttctttgggatggttcaccccacctgggcgccattcaaaggaagtttgcgcgtaactcggggcgtcctttccccggccgggtgctgtgcccggcccgcagtcggtgtttcttctgggcctgggggcggcgtggagccggcggctcagtcccctcagtcccaggccttggcagccgctttgttcacgccgggcgcgggccgaacccgaacctcagctgcagcactggcagcgcgcaccggccacgcgtgggttcccggccacggccgggccaacaagggagggtcccgtgagcagccaggctggccctccccgggcctgggtgagctcccaaagctggagcgcagggctctaggccggccccgccccggggctgggggcttcccgcccgtttgtctcattttaacttttgggggcagctctgtcccgaatggtgagtggtccagactctagaaaggggtttggtcgcttgagcccggattgaggcttgggacctttgctctcttgctggggacggaagggggcgcgctgggcaggagagggggcgtctcggtcgggtctccctgggctcgggcatcttcccaccctgcggagccgggtcttgcgctgcgtgccccgaacaggcccgggcacaccgagtcccgttactggtcttcaggcgaaattccaggacgggtgtgcattcatcaacctgggagtctctaggagccagagatgactggctctacattttaatgcgtaatcacagagaaactagcacgagaaaaggacagagggaccgacccaagcttcagagacatggaataatatgatcctggttcataagccttgaaaagctcccctccgccaggttaaggaatggtgtcaccagccttggctgtgaggataatttcttgatttgtgttatgcaggctcctgtcaggactgtctccttaactcccactacctaaggaaaagatagccagagarttgtccagggatttgggtttgggttgcttctagaaagacagcatctttcttgctattttttttttcacatccccccaaaacaatttttttcccccttcagacttggcagactttgatttagataagaggtttgagttaatttgattttccccatgtctgtttagatcaatggatataggagatagtttgaagctaatgtacccctatgcctttgtgtgagtgtaagatttataacttgagggaggcagttaataaatagcacatccttgaaccataaacatacgagatagacaagagctagataataaacagtttttcccccaatccctaagctttacttattttttttactgattcttgtactttgtcattagaaaaaggagtggggttggtttcccagtgaccgcattcattaagaaactgggcatgtacagcaagtagcaaaatatgccaacatccacaccatctctggctatgtgaaaacttggtgccctgtgtgaggagcatgggggatggttggaaataatgcagctttatttttattgtgattgttggaattcatgaatcataaaattctgatagctgggatggygtggtagctcacctgctttaaataatgtaataacgacaggcccagtctgtcccaggtgaggaccactgacttagtaaacaataaacaggtgtcctactcatagtagccttagtgttgcttcagtagatccttaygagctctagatagtttttagttgacttttaatatttttaaaggtaacaataggccgggcatagagactcacacctgtaatcctagcactttgggaggccgaggcgggcagatcacgaggtcaggagttcgagaccagcctgaccaacgtggtgaaacccggtctctactaaaaatacaaaaattagccaggtgtggtggtgtgtgcctataaccccagctactcaggaggctgaggcaggagaatcacttgaacccagcaggtggaagttgcagtgagccaagattacaccactgcactccagcctgggtgtcagagcgagactccatctaaaaataaaaaaaaaattaaatgtcaccaccttgcattgtacttgatcttcagaattttactctattgtcttaagcctttaaaactttgctcatgaactatattatttggactacctttgagggtagttgcatttttgcatttttgcaaaatattattttccctaggttacagtaaacctttgactctgttatatttgaagcaactaattattcctgaaacatataaagcatttcctggcaatgttggtggagttcatactgctcaaggtgctgaagtcattatttcaaggggaaattattagcgtgttccaacagttcttaattgtccaaacaattgttgatttcccccctttccagatttctttcacaatcattgggaactataaaaaggtgtattcgacattttcttttgtgtatattttccacttcaacaattttgtatcaaaacgtatggcactttttcagcacttatttcaagagatccrgataaactctgagtaatcacaattcactatacttcaaaaattgcctcccattcagtattttacaaataatcttctacaagtaaatggggaaaatagacactaaccatatactttttaaaaataatacattaaaagagcactaaagcgttctttgaaagtgctcctggtactatatacgtattkgctcattctagcaatgttcttttgagacaccatacaagaaatggaactcgaccagatttgagaaaaagctgcagagaaggtgaggatttgttccagggccatacagagaggaaattgagacactcatttcttcttagttcagtctcccaggtgtttagccctagatctctttgagattgcacgaatttaagggattttttttaaaaaacagggaagctctgttatcaaattttaagagaggataaagaattagagatggtagatgagaaatgtttcatccaaagagttttttgtttgttttgttgtttttttgagacatagtctcgctctgtcacccaggctggagtgcagtggcatgatctgggctcactgcagcctctgcctcccaggttcaagcgattctcgtgcctcagcctcctgagtagcttggattataggcgtgagccactgtgcctggctcaaagagttttaatgaatagaaaacagtgacccattcttgtagaaaagacatggagataaaatgaaataaggagagcctgaggtgtcagggaaggagaaagagcattttgaaactggtggcaggtacaattctctgcctaactccgtggactacttagggcacagatttcttcctgctcagtcagtgttagctgccttcctggttatgtgctttagggttgaccgtaattggtaacataagccattccagttaggtgagcctctcttccttgtgtattttggataatgactacgaggaaacaagatggaaatgtgggatggttagctaatgtcagtgccgagtctccctgctcaatgcgcgttagcccaactgccaaagctctgccactatggtaagtgaagatggtgattttcagtttggcagagactgttggaaggcgtaatggcttatttgatggaaaagatttcctgctgcgggagaagctgccatttgcagacaaggtgtgtcagccagaagaaatgagcaataaccgttttctggtttctactggcaaaagctttgtatttttttcatatagaagtgttaaaaatagattcataagaaaatgcatgaaaccaagtaaaaagtacagacactgaaatttcaccaatgaatgggagagaagagagctaacctttgttgaatagttattgctaaccaggtgcttcagttctcacaaaattgtgtgaggtaggcccgccacattagagaacggggatcaggcaaacagagatgaagtactgctggagcgccacgcaggagactcttaagcttggygttgacgtctatgacattcggatgcctttgtgaggctgtcaaacctactgcgaagtaggcggccctcagctttcagatgggttgtgttctgattgtgggtttgtaaaactcattgctgggaaccctgaacacactttttcactgaaactatgtcatatttagtggtttcccaggccagcccagaaatcatagctgaagtattctgtcttattaatagtaccatagaaccaaaccactatatataacatggtttttgtgggaaaatgcactcagagctccaacttgagttttttaaggtttttaattccagttacaatggcaaaagggactccaccttctctctttttccatttaagccctggagggaaaataaaggtacacagagatacatttcctttcacgtttcctcatgctaacagagaccccaccctggactgcagagcgatggggaggggggatcctggcagtagctggctttgtgacaacagaggaaagagaagagggggaagagagcacaggtagcggaagaagtgaggtctagatgtcatcacctatgggaccaattttggatggcttatcaatatgagctgcaggctgactgacatcrtttccttactaaacatcatttttactgagaacttagtaacctagacctagacattaatgttacttagttgtatgttcagtattttttaagtgaaggttagtttttaaatagtcttcagtagtagaaggaaagcacatatgtagacatcttatttttctttttcatgccagtctactgaatgtccaaaccagcacctatcggtagctgaatacactcaaggtaaacctggatgctaatggatatgattcgaattaatcatagaatatataccgttcgttgagtacttcaaaccagaaaatgtgctaaaatgttgaacacattttatgtcatttaatcctcaccacaatcccacgtagtgagtactatcagcactcccatcttaaaaatgatgaaagtgagattttaagagggtaagtaatttgtcaagatcacacagatcagaaatggcaagtctgggacctcattaattcaacaaatatttttggagcaagtcctgtggcccaggctctgtgttagactctgggagtaaagcagtgaatgaaatggacaaatatgccgaaatccttgccctcgtggagcttatatgccagtggaaagagatgaacagtaagcaaaacaaactaaacagctagtgcctcagatacagttatgtgctatgtggtaaaatagatctagggagcatgaggaatgccaggttggggttgcagttcaggcaagtagagaatacaggctgaaggacagctgtgagataacaaaatcagtccaggagtacatacgctattgtttctcgcagcaacccattttatgtcgtaacaccaaatgttgagtacatgtcaccctcatcagtcactgcttctactgcagcaagtgactggggaggtatccaagaatgactggtgaagggcttggccttttctatcccaaggtcaggaaagatgaggacagttgctggagggatgtcctagagcggctggggttttgtgcacaagcagagggcttgacctcagccaagagcacagagctgattctcctgtagccccagaaaacaggcggaatctgggggcacagatgagggctgggtggaaggagcaatggaagctcgtggaagttctgtgttgcttctgttttcttagtggaatggggagtgtggtcatcagtggggagcgagggtcggggagggagtgcggggccgggggtgcagtttkaggagagagatgtgaaacagtcacctggcagaaagggagcctgaatttagctggtgaaatgtacactcaggatctgcccatggtcaaattctgactcttaacrtccttccacagtatattggagatcagaattctctagttcacttcttgaggagagagattatcttctaactccttttttttttttttttttttttttttgctgkgtcatttacttggagcagagtcctgcacttactatgtgtatggttaatgcttgttgagtgactgctacaggaaacctacacacttgtccagaaatttcatttaagcttttcgtcctaattgtcacattgttctctcccttttctgaaatgctgtratgttcctagttcccaaaacagtacttgtatagcaattactgttaattatttcattgagttaatctcattcccataacggattaagttttagactaaraaataattttttttgtttgagacatgaactcactaccttcacccaggctggagtgcagtggcatgatcatggctcgatgcagccctgacatcctgggctcaagtgatcctcccacctcagtctcccaaatagctgggactacaggcatgcgccaccacgcccagctaattttttgtatttttaatagagatgaggtcttgccatgttgctcaggctggtcttgaactcttgagctcaagtgatctgacctctcagcctcccaaagtggtggcattacaggtgtgagccacygcgactggctaaaaattcttaattgtatactcttttgtagtattctcttgggaccacctaagtcaagcctcattcccaccagatggtgcccctgttgggggcagtgaagaagccttctatgtctgtttcatgactccttcttggctggcacactgttgtgggcgctctgtaggtagtcaatgggaaacgggaaagctacttgcggttagaataatacgagaactagatattggtaatctcagctgagcgaatggcaaaggaactgatgaagcaggtggattccaaggctagttaggagaaggaattgactacaagtggtgttggtgggatgggaggggtgagggaggggggatgggaggggtaagggacgggggtgcatcagaggttactcccagggctctgccagaccctgggtagatggagccgccgttttacagaggtaaggacaagagtttagttttgaacattccaagtggagatgtccaggacacaattatatacctaggctgccattctgggaggagatctgagtgggagaccatgatttgggaattatcaccacagatggtaatttaagccttgggagaggatgagtttgcccccaaagagagcataaagtaagaaaattgggctctccgtgtttcaaggttgactaaagatcctgtcatttgactaggctctgctatagtctgcaaaatctgcccagggacagaatattgaagtaaataaagtgtattccagtgaaacctcaaatagattgattcaaaactggagttagaaaaacttgtggtttttcttggtaaagcttcattttctatttgtcttcataactataaatggatgtatttgtgtggaagatgtagattttttttwaaaaaaatctatttttggctctattaagagacaaaatgaatccaaatgtattccatacttctctcacattgcaccattttgttatgtaacagagaacgtttgagtacatactgtccacaccagcaactataaatctgtcctggcaagtgactgtaagatacccaggaacaagagataaggagctcgcctctccagggagaagcttttatttgcaagagagagagtgatatacaagaacttgcaaatgtctttgaagggcagaaaaaatcagctagggctaataaggcagctgtccaagttcatgattccttggcccttctttatacacaaccaccaagagttgtcagtttgcaaacctagaaaagtataccattgtaatatcagttcatctcccgcttttccagagctactcagaagcgtggtggatgcttagtgaaaygaccagaggtgtgaagctgccagacctttacccagatcaacttctttgactcagggtacaaatgaacaacgtagtctgacagctcacctaaaagttatttggaatgattttatattgagagatttttttaaagcctaaatttagattcatcagagcatatcaaggttgagatatgtgaaaggcagtgctatatgggagggtcaagttccattcgtttaaaaataccaggacatttgctgctgtttagtaggggagttgggtagggtagatatcctcacctccactatacagatttatttatttatttattttttgagaccaagtttcgctctgttgcccaggctggagtgcattggtgtaatctcggctcactgcaacctctgcctcccagggtcaagcaattcttctgcctcagcctcctgagtagctgggattacaggtgcgtgccaccacgcctggctactttttgtatttttagtagagatggagttttaccatgttggtcaggctggtctcaaactcctgacctcgtgatcctcctgcctcggtctcccaaagtgctgagattacaggtgtgagcctctgcgcccggcccactatataaatgtttaagaattaacatgtataaaggttgggactttcccaaggtgagctgttggacctggatctcctgaggccaactgtgtttttcttctcagcacagcaagcatcctttgagatgcagagtgatcttaccacttgaaaatgtrcatcaagggcaactgcagaattttccaaaagcttaagcacagatggcaaatctggcaaagtcaaattgagaacactgactacatgttcaggaggaaagtttttaagggtaaatgcttaaaaatcctgaagaccagtttatttgggaaagcaattccaatggaaaagtgcggttggcttactgagggaaccacacagtggcagtttctacaacttggccagctgcccygggctggcagttgaggagaaaatgcagcagtggggttgagtagrcacctcagccacggagtgacagtcattgtgttctaggtaccayctgaccgctctctgtctgctccttctgtggctctataatatctgagctcctgggtaagctccatgcagcctctacaactctgcttggagctcagttttcctatgtgtttattttgattttgtctacttattaagttaaatacaaatctgaaaatgaaagaataatcaccttggactcctgaatgtttgctcaatgtcatttagctcccattgtttcctgtcaccatagcagtctactgaaatctctcagcatatatttcagaattactctgatagtgaaagatttcctatcctatgtagtccaacaattattggtttattatgtgaaaaataaagcaagtatgtagcatttacagagtaatccagctccactgttaatactgtcatttgaagagttagcaaggaatgtgatgaagactgaatatcttgaaacaaagtttggttgtgcagttgctctgctatgaattatgggtctgattcccctytttatatgtggcttttggattttcttctgcccttgaggtaatctgctcctcctttcattcacygtgcttttaggtttggtttcagatacagcatcccttctgctacattctttaaagttaaaaaaagaaaaacaatttcacttttattggtgatgggcattcaactgaaattacaaatcgggaaaacatgacattccagctcacagcagtctgattaaaggtggaactcttatgaaaccacaggatctgactgaacatatggatcatcttctggcaagcttaacagacacctgatgttttccttggccatccagaaatctgcatcctggtgtagatatcatgagttaatgatggagtcaagygtagaaatgtgtctgggacttgcagacctcttgctttgtgatactttcttttattttcttaactggctgagaaaatggctgtcactccaagtctatcttctgatgggctggtagctctcattcaggccatccacagccagctgcctttccccagacaacctacattgccttgagtcttctcttaaagcaaaaagactagaggagaggagtgctactttcttctcagccttgctgtccctgtcatgtaaggaggtacttaaaaagcattcctatccagttctctctatctgctccgtcttctctccatgccctcatggagtacttggtaaaaacatttaagtagatgactttatggaatatgattccccggttttggagaaataaaaagatgaatctcagacatcagtaagggccacattctagttcaaattataagcctgtacataatcagtaaaactatattagaaataaaagcttctcaaaaatcccaagtgctcgttacccaaaaaatgatgatagacgggggtcccacaaatgtgtagttgtgtatatgtcatagtatacgaaggccagggaaatacatagtgccacctgacctaaccagctgttaagcataattactgtggttttgccagaaaggaattctaaatgcaggaaggtttgccattagtgggccacagaacatgaaagacttccckgcaaaccttttagaaaatttatgctagtttatatttcaggaggtaatacccattggatatactctaatttgggaaacatgggatgattaatgaattgatacaacctctagaccaggggaacagaagaaagtttggcttgcaaaatcacaggctccacctggtcagcgcttatcttcyttgtttagctcaagttaggtaagtttacctagtytaaaaggagtattttaaatttatgtttgacatttaatgatttcagatagttcttggacatcaggataaacaaattcagtgtagcacatacgtagtataagaaytctgttgatataatgccgcagtcatagttgtagcccattattccaggtaataatgatgctacaattagaaagttttccaattgtagttttgatttgcacagtagtaattgctgtttctattttcataggcaaggagaatccacacatgaattagaggctttccatattaggctttttggagacatagacatggtggtgatcgcatggggtgtttgagaaaatggagactaattgaatgcaaagtattctgtggggcaagcagagtaaagaatccagtcaaatgatgtcagccaaggatggcaagcccatgcccgaaaaactggcagcagctcacccataccaagccacctgagacatttcctgggctggaaacaacrttacggaaattgaacttccgtgccaaatttaccacacctcgccaaagcctgggcacctctcttattcatgggtgcctcaggagtaattacagctttatagcatatctactaagaactttagtgaaagtgaaaaggagtcggtaaccttgaattttagcaaactagagaaggaagatgtgggtgtcctttcctcacgcgttaacaaggatgctgttaggttgtctatctactctgaatccctacttaggaggaaagtcacgtatctggttgtgcaaatcaaagagctttgacagtttgttttttgtttgtttttatttgggtgcaatttttctagaagactaaataacctgtaaaagattaaaaaccatgattgagtgtgcctagaaataaagaccacccttgactgggctttttctacccaagtccaagtgaactgctttatccatttagtcaatacatattcagtgatgctggttatttacaaagtattttatctacattctgtattaattctcaacagtcctgtgagatcattgtttattcttgttaatacacatatacgcacacagaagagagaagtggggaaccccacaagccttgagaatttcaagaatttgtggatttcagaatggktgagcagctcatagcttttctaacactgaacttttctctctccaagtcccagtcgctcgtcaaaaactgtgccatcagcgcaagacyctgtgatttctgtggtattctaattttatctgagatttattagaatatatgaggtggaaaaaaaagttgtgcaacaggagattggactctggcatcccacagcgtatcttccctgccaacttcctaataaagggtgaactccaaatattaaaaagttattaacgtgcttgaaagtctttccaaatgcttcaaaaagctagcagacacatccagtatcatttattcagcaaacatgtactgagtttgttttgtgctcagcattcccgactaagtaggacattgaccaggccatcatgggttaggctcggaagggaggggcccagatgcagaatgaattgattagttctgtgggtgaaacagattcagtgtcctctgaggagggactgaccagctctgcctgggggagtaaggagaagcttcaggagagaaccaagagctgagagtggagagtttgggagaaggctgaagctgggtagagaagctggaggggggagggctgtgtgtccggaggatggcaggtgactggtgtggctagagaggcaccggagcagaggaggtgagggaggctttaccagctgtggaaggccttgctttccacacccaaagtgccatggaaaacatgaaaatgtgctttctatcaagggatacggtcagaaatcgaacaaaatatttcctacctgtctatatcattggagaaattgttctaggtcctttaaggaattttaggacccttactaacacctttcttcttttccaatagcatcatctgtcttagataatagttggccctctggatccctgggttccacattcatggatttaaccaaccacagatcaaaaatatttggaaaaacaaaacaaaaacartaatacaacaatagaaataatacaagaaaaaaagcaatatagcatgacagctatttatatagcctttacattaggtattataagtaatctagagatgatttaaaatatacaggaggatgtatgtaggtgatgtgcaaatgctaggacatttttttatcagggacttgagcatgtgtggattttggtatccgaagggttcctggaaccagtccccctcaaataccgagggacaactgtactcacgagacaggttgttagagtttaagagattcctaaatcataaaacctcttgtaaaaaggaagacttatacatacaaagaactcagctagtcaagactaagaaagtaccagtgggaagtaaagccacrgttttaaatagtaatgtaatgaatgcttcccaagggcttgaaagtcgtttgtcttaagcagcacttttgccaattgttatactactgatttatttgacaagccccctttttagttgttagtgaaaatctcagaggtatcacagatttcaaattaatgtggtctcaatcagtgaggcttcctcttgcaataatctgagatggcaagtagctgttctaggatacctctttttgctactcttctgtcccttaactgaatgtcatttcaataccaagtcctcttctctaatatgcattcaaccatgcatgtacaaatattgacttgtccctttgctcaaccctaagcccactgcacgctttactattttcattcttacataaaagatctagaacagaaaatagattggaagtactatatagatccactacatacagtcaaggggaagtctcaagttttctcatgtttccttttataacgtggacaactgaaagttaaatatgtccgtttgatatgggtaatttaagcagctataggtacttggtgattattgtaaacctaagaccttaaataatacataaggaatcaatttcaacactaataacatctgatcaacaaagagttccttttataagatgagaacggcatggaattatttctagttgccttaaatgaattttaaacacccgttatgcgagggagagtaggtatggtctgtaagaggaactccaggaagcccatgtggaattttgcagtttcctctttacaggtgacctgttaaacagcctgcatgtcatggtagtgagatgtaacagaaaagctatgttaattaaggtgactgattaccattcaaatacatgtaaatcacagtctacccagaggaagataggagtcctctaactgcaggcttcttccgaagaattaaagggctttctgaaaagctgaggctctcaaagtgtgggtatggtacccacactggtggtgtcagcatcaccatcactgggtacatgtccatggcatccagtgggtaccaggacatccatttcttacccactactagaaataagcaattcgcttacggttagcaatattaccatgaaaaaatgttaatttgacaatattgagaccaaagcaaaacagaattttgatatttgctaaaaaagaaaaggcctgaaattagtgggctggttgaaaggggactggaattgcaagctgctcccatctgccattccagcttttaaggcttcttaattgaattggaagctcagttgaaaaaagaaaaggatcatctattctttcctctgttttcagataaagtcctaagaacttttttgagggcaatttatacccattaaaatgtcaaattcacatatcctttgacccaataatctcatttctagacatgtttgccacagaaaactcaaaacaagtatacagtacaaattasttgtacaggcagctttattgctacactatttgcactaatgagtacttgaagagagcatgtctatcattaataaagaatggtttatactatggaatactatgaggccattcaaaagcatgaaataaaccttcatgtaccaacatggaaggatacccatgatacatcgttgaaagatacaagatcactgagggaaaatgtgcatatgcttcatccaacttttgtgaacaaaaacccaaacatgtaaacatatgggtgttgtaagtatttatatttgtatagtaaaggttctggaaagatagcaccaagattttattggtgttttgccctgtggagtggaattgtatgaggattggtggttatgtgggaaattctttacatttactttattatcgtactactttcactttattttttaattaatattttatctttaatttttgtgggtacataggtgtgtatatgggctatttggatatggacatgcaatgcgtaataatcacatcagggtaaatggggtatccatcacctcaagcacttatcctttgtattacaaacaatccagttatactcttatactttctgatacttcagtttctcacaatgaatattccttttctaaaaaagaaaaaaaaaggaagaaactaagtcccaggcatattaagagagagctaattagctgtagaactaattctgacactctatttcccaatcagtattattcagaattattttttacttccctgtaatagttactcaattttagagccagaatttagcctaatctactcatttaacctctaagaaaactgagcccagggggtgctaagttcctggmgagtggtcctcaggtggtgactgaggactgagttagcctcctccggcaaccctacccccgtcccaccccaccccaccccaccccacccctgggcaaagtgaaagtgaagcaaactgagaggaactcctccactgtcccttctgcttactcagcagatgggagccagccactttgttttgtcctggggcctgtccttgatggcttctaagactaaaaatcaaagctgtaaatttgtgtaatttagagattgaaggtactgatcgttgttgtcagtgactggaaaccaggcctattgagcaagagccattgttcagtgcctgtcagcccagagagtgtgccgaatgcactggccatcttagacacagatctacttggtggtgttctgtgttttttctcctaaaagaaggcttctcacaccaccactgatgagaaaacaattcgaggaaaacgtaggcacactcagtacatgaagggagacactattaaaagcaaaaagagggttattgtcaaacttagaacgatgctaatttgagttctgagctctaaaactggyagaattcaaacattaaatgtagaatgtactagtattctatgccttaaacagttgaaaggaaaggcttacattggcaaaatgtatttcacaccaaataatgatcctaaatcagtcttttgcaacgtcataagatgcagctttgtaagtatactttatttctaaactttaccaatctcaaaggctacctggagctcttatttctgaaataatttcaagatgttcattctctacagttttgtggtatgattaacttcgaagtccactgcagacacaaatgaactttccctaaaatgcaacacgagagtactaactacagtcrgtaaagatgagagggggttattttgtagctcttcctgcaggctgtgagaatttttttcgttaaaaaattcgttaaaaaagcaggatrtactgcttcagtccttaccatgagagccactcccatcggaacataaattagtcttagtatatttcaggttctcccacatgttcacattccaactgggtgcaacagttgacttttgtctttaactttccttggcaaaccgatagcatcagaggaagagataagctgccccttagggagctgattgtaatgcgttccagacgtctgcacgcccctggtgcaagcaccagctttctgttaaagactcagggttatgttgtttggatgttttgttgtttgctttttgaaaaagccagatcagatttttgtcattgtataaactccagtaggagaagagggatgcgtttttaaggtgatttctagaatgctctggccgacttagctgcagargaaaaaggagaaaggaagagacagtgtatattttggcactgaaacttctttagtaacaatgcattcattcacaaatctggagagaactgaatgtctgctttttaaagtctgaattgaattctcgactagactttgagaccctgagaaggttttcaatccaaaccatgcttaatattcacgttttatcattattgatggaaagtgaaagaaaatttgaattcttggtagccagatttgacattagacttttacatttataacctcacttaaactttacaagaaatctcattacaggtattattatccccatttttaaagcaaaaaaaaaaaaacactgacccttggaaagaagaactggcactattgagattcacaccacgtgtggctggctgcatcagggggctcataaagaattcagagctggcccccagcttatcttccccattccctcttctcacccccaagctacctccattaaaagagatgccaggctatatttattttattatgtatacttacgaatgcatttgctcatctttggtgtcataaaatacaatgaataaactcctatccagtttttcagtgtatttccttaatttttaaagcaataaactcctttaatcctcccttatactcaatactaaaaaatgaaagatctgattttaagcaggaaaagttttgtcttagcatatagccaggaaacttcatctgcctaggtcctgaaatgtaagtgatctgccagaaccaagcgtgggggtagctcgcgaggcctcagccctcctgctcctgtgtgagagtgctttcttctgcaacctggctcctggaaggaatgaatgctmccccttcagcccctactccccaccaagaatttaaaagataagagggaaacatttccctgactctaaaatggtttgtttttaatatggtatgtccaggcctgcactactaaaatccttcataaaagtcctctagaagataacgattgttcacattgcaaacctgtttgaaaagcctggaaaaaatgcrgtatactgtagggaaagtcagtctccttttctcacttatataatttgtaagtctgtcatttcttttttttttttttttttttttttttttgagatggagttttgcttttgttgcccaggctggagtgcaatggtgcgatcttggctcaccacctccacctcccaggttcaagctattctcctgcctcagcctcctgagtagctaggattacaggcgtgcaccaccacacctggctaatttttttatttttagtggagacggggtttctccatgttggtaaggctggtcttgaattcctgacctcaggtgatccgcccgcctcggcctcccaaaatgctggaattacaggcatgagccaccgcgcccagcctaagtctgtcatttctaatatgctctcctagttttagctcagtagtagctgagtattatacaaaataagctctttttactgctgcttagcatgtgtctgcgaaccctagctcagtacctggcattccatgggcaggcaagaaaagtttgcagaatgaattaatctggcccaagtgtgactgagaggccagaggaggtcagtgggtgccgtctcccaggccagcagcacacacacagcttcctacagtctcccttcttgtctttgtctctttacatcctcttcccttcctcccatgtgtctctaacctgccaattgcaccaacatttattccctgctgcagagcctgtggacccacagtcyggcttacctttattttctccatctccagaatatgtctctcctccatacccccataaattaaaagtgacttaaatatataaaatggaagagagaggcaggataaaactgtttgataacttaatagtacaactggccagtctctcgtagattttttgcattcattccaaacctgttttttgttttgttttgtttttgagacggagtctggctgtttcacccaggctggagtgcaatggcgcaatctcggctcactgcaacctctgcctcccgggttcaagcaattctcatgcttcggcctccctagtagttgggactacaggcgagcaccacctcgcccagctaatttttgtatttttaatagagacggggtttcaccatgctggccaggctggtctcgaactcctgacctcaagtgmtccaccctccttggcctcccaaagtgctgggattacaggcataagccccacgcctggctgaaacctgtttctattaaaagacttataccttggaactttaataagtaatttattaaagaaccgttaatattagacattaaaataattatgactcccttacccctatttgataagcatataggtgacgttacactaaatactatccctgtctgccaaaataatctaatgttgaagcagtccaccgcatttcaggtctcctggaaatgtgctgcgattttctgaaaattagaggcaacaacttgctgttraggacaggaaaaaaagaggaggctaagacgcaaggtcctctgaagcttctgccagctctctcaccagaacctaactcttgataccagtggagtgaatctggaagtctcctgccttcctgagtgagttggagacgtagacactacctggacaggctggagaaatgagggacttaaaacgtagcacaccccttgccccatgccacctgactagaaatgcctgccaaaggtatatggacatgcaaggctggcacagatgtaaagctcaatatattaaactagatagcaaagaaatatacaccaagcccagcaatacaaascaccctgccttcatgcagttaaacattcttctgttttaggccacactgtacttgctggcttcatgtggcttcatgaaggcaagtgctgtgtctgttttgatcactactagatttctggcacccaacatgtagtaaaagctcaatcagtatttgttaaattcattgagagagctgggaaagaaggtagaatgaaaagaaaagaaaagaaacaaacaaaaacacaagcctgggcaacatagctagactatctctacaaaaattagccgggtgcagtaactcacacctgtagtgccagctactcgggaggctgaggcaggaggattgcttgagcccaggaagtcaaggctgcagtgagccgtgactatgccactgcacactccagcctgggcaacagagtgagaccctgtctcaaaaggaaagaaccatccacaaagttagtagtgcctacaagagtgtagttgctctttaagcttgaatttttggttattttgcaagaggtattatttgccttaagccatggtaattagatttattctgctttgtgggcttttagatgagttaatcggctacaattksycttaattccctctaatgctttctaggtgtggatatcaagaaacctacatgttgtgtttagaatattttatgtatcacagatatcagtgggtagtagactttgcactggaattgcccttttccctgcctcagttgtttttggtaatattaactctttatttactgttaaactttacaaaaaatgtcaagtttactttttaggactaataaattagttttcataattttagccatttaggaaaaacagaagaaaccacattgcagtgtaaagggagaaaagtcacacatagctaattattgataggaaaatgagaagtgagatagcaacatctgagaggacttcatatatgagcatctcacagagtaactttttcttttagccagcataattactagcttttcccatgtgtgtacagacatttttttccttagaaattttggccttaaaagtcaaatacaggttgttttacagatgatcaatggkccttctagaaraagtccmcagaagctctcagatgccctctagaccagcctttactcactcctctgtcagcatcctscctcccagctcgcattttaccaaagctagaaargaccctcaagggcctgggtgcgtggaattattagagaccagataaaagacatgtaaggagtgctggtgtggcagatgctgcgaaaaaaatgtgccacaacctctgagggcaggaaactgaaagacctcgtgtggtttggaggcctgaggaaagagcctcaggaartgatgtttgacctgacatctgaaggctaaatgggagacagagacaggtgtgcagtcaggaggaatcgcacattgaagggaagggctgagactctgagaatgggggtgggagggagaaaagaagaggctacagggggcgaccaggcctggtgggccaggtgaaggaatttggagttgatcccaagagcaagcgaaagtcactggggacagggaagtcaagagtcacaggattccatgtggtttttgaaactggctgcatggaagagaacagcgtgtgggagaagtgtaggagagggaaaggcaggactcatgatggttgagatgagacggatggagacaggcagctctgacttctgcggttctgacttgtgaaacaggatcagggatggtgccactgactaaagaggaagagaggattccagtaacaactaagcactattctcttttaatctctgcaacagccctactctgtgggttctattattaccccattacatagatgagaaaacagaggtacgaaagattaaatttgtctagagtctcctggtaagtgttcagtaaatgtttgctactactgcctctgtttactcatggagtcattcattcattcattcattcattcattcatggatggtatgctgtatctaagataatacattgttgaacagaatagatgtgaactctgctcttgagaaagactggtagtgggagaaaaagacaataaacaagcagttatcttgcttggacaagctggtcagggatggtaggacggtctaggtttcttagactggaatgttacaattctagctcttgcataaatcttggatggatatacagaggaaaaatacgtattgacaaagccaaaaaaatgtttcccagatgttctctgaggttccacaggcatccccaatgagttagatcagaagtaggccctgtgccgattttgtaggtgggaagctgaagatgcaagaagagaacagccgtgcagctgtgctgaggtctcaaagagcaagggttccaggtgccgccgctcctgctgtccagcaggttcagctgcctttgggcccaccaaggtaggaaatggcccatatctgactgcctctgtacaggtcaaatcacagctccctgttctctactatatatagtaacgaccttacataagagtgctattaaaaaaggacgacagagaggaaaagagaatgccagctgaattttttccactaaagctcatttttaacagatgtgttttctctgtttccacaatgacagtgtaccaggggactgttctccaggtcaggagggaagcaacccaggtacttgtaggactgtaattgggtccgtctgtgctgagcacaacaataaaattacttgtacttccctttttatttaatgttactctcctcatcagttcccattttcctgatatttgtgggaaggaggccatgaagaaggatgaaaacactgtaaaaataatttaaactaaactttacaatatatttgggataatgctgagaaggaatgttcttttttttttttttttttttttgagacggagtctcactctgttgccaggctggagtgcagtggcgcgatcttggctcactgcaagctccgcctcccgggttcaagcgattctcctgcctcagcctccaaagtagctgggattacaggcacatgccatcacgcccagctaatttttgtatttttagtagagacaaggtttcaccatgttgaccaggatggtctcgatctcttgacctcgtgatccacccgcctcggcctcccagagtgctgggattacaggtgtgagccacctcgcccagcctgaaaaggaatgttctaagttcagcaaaatgagtgattaacatgtaagtggtacgtctatcttaaatgctttaaattataattcatgattttttaattaaggctttcttattccatctgatctcttatacactctagtacccagtgatacacaaattttgttaattttggtaagtcagtctgtctgtgcagtgtgtgaccttgacattatgtaatatgaatgggatggctacgtgttcccttttccccaggacagtcaatctgccagttgtctagagttctatatagttcagcctttgtcccagattaaagggcccacatttggacactgaattatttacatgaccgtcctgaatactaatagctcacatttatcaaaggcatgcttgaacattgctcaaaatacttcacatgtactaccacatttcatcttcacagtctaggagggaagtgctrtcatgacccccattttatttattttagattcactggttacatgggcaggtttgttacaagggtatattcatgatgctaaggtttgggtttccattgatcctctcacccaggtggtgcacacagtacccaagaggatgtttttcagcccctccccacctccttctctccccacttttggagtacccagtgtctgtcgttcccatcttcatgtttgtgtgtacacagtgtttagctcccacttatcaggaggtatttggttttctgttcctgcattaatttgtttaggataatggcctcgagctgcatccatgttgctacaaaggacatgattttgctctttgttgtagctgtatagtattccatggtgtgtatgtaccacattgtctttatccaatccaccattgatggcatctaggttggttccacgtctttgctgttgtgaacagtgctatgaggagcaagtgtacatgtaccatgtggggttttttggtagaatgatttattttcctttaggtatatacccaatactgggattgctgagtctaatggtagttctatttttagaactttgagaaatttccaaactgctttccacagtggcctaatttacattcccaccaacaatgtataagcattcccttttctccacatcctggccagcagctgttgttttgacgttgtagtaatagccattctgactggtgtgagatggtatctcrtcgtggttttggtttgcatttctctgatgattagtgatgctgagcattttttcatgtttgtcagctgcttttatatcttcctttgagaaatatatgacccccattttaaagatgaagaagcaggttcagaaaaattaagtgatcaaagaaactcagccagtaaataatagagtctaaaatttaaacacaggcagtctaactccagagcctacatggctaagaagtacagcattacctttcattcctaaaccagttaagaagtatatgaataaaactcctagaggatggaagggtcctttggaactgggaagttcttggagtccttgaatagaaatgctttcccaatttgccagtgcaggggccctttatgggaaacagtgaggaccatccaacagtccaattaactgagcacaaagcacaaggcatatttgttkttctttcttttgaaaacataaatgttagaaaagttcagaaatgaagagatttagaagtataaacttataactgttggaaccatcctcgtattttctagaccagtcttccttctctcgacaacccttctctcatggccattcctcgccctccatgttttcatgaacagtgtgattgactactctgattttgttagctagccaaagtggaaaatgagaactcggtgagtgggctggtgtatgctgcctgccagaggcagcgctctgtaagacgacttcattgtttgcttaccctaatgctccattacatctcaggatttatttataaattatttgttttaggatatggtactagcttcatgaaccccattgtagacttcacatttagaagtgttttttccaactcttttttacttaattttcatgagaatagtccttacgtcaagatgaaagaaaggtgaaacaccaggtagaatcagcaaactgataagcagccctgtttaaatccatggaaaggtaatgtttaaagaagacatttgttttaattgatttttattttacgtgtacacattaacttcataaatcttacctttcataccaagaagcctagatcagctagcgtgttaatatgctgacggctgagagcaaaaatagataacctaaagttgtctaacaaattagacatcacttaagaggaaactcaagtgtgtttcagggagcagtggcagatctgccttagatttttaaccactgcatcatcctgttaatcaagatcaatcagatacaaaaatctttggwcagaaccagtattacaaaagaacctaagaatttctgctttctcatctttctgtttaccataacacaggcatatatccaaaaayatatagaaagcaaaaatttggagagaatgacatgcgctttcctaaatgcaccttaatgctttccctggtgttactattactactgttggaagcatcactgttgaaatgagcctgtacgtcacacacattgctccccacacagcaacacttctgatgagggcagccccctgccttgttattcattgagaaatagaaactctgattatttagagcaaaatttcagatttgaagaagttttcctaataaggaagaatgatgtaattttcatggaggggggccaggttcccttcatttgttttatttatattagctgaattccaggggaaaatgggctatgaagcatgagggctgctaactatatttagccacacaaagttagtacatcaggggtcattttttctttaagttatacactcataaatgggctggaagatatttttcccggcatcttgtttttataaagtttgatcaagcataaatacttttattaagatgctatcttttatttcgagtgtgaagaaagtatccattgtaatctctttaatttggcatgtttctctgagatactggtttttgggtcaaaagatggataactaataacaataccttggttcagaagattgtattaactttccagagtgctcacgcctgtcatcccagcactttgggaggccaactcaggagaattgcttgagcttaggaattggagaccagcttgggcaacacagggagaccccatctctacaaaagtaaaaaaattagctgggcacggtggcacatacctgcggttccagctacttgggaggctaaggtggaaggatcacttgggcctgggaggtcgaggctgcagtgagccgtgatagtgccaccgcactccaaccagggcaacagaatgagacccagtctcaaaaaaaataaaaattaaaaaaaaaaatccagagtgggctttaagaaggaagcaatagtagtttcttggaagaaagataatgtgtgtttaagagtcccgttctgcccattgtctggcactattcaatctggattcactcccatccccctcaccttactctaaatataaaaatagtcggtgcgtcttaagacagtagactatcatttttgtacttttgcattaagacttttatttaaatgtatttataaactggagaaaaatttgtagcatttaaacataaaacctcagcgttataattggtcattccttcctcttgtcaacgtgttacaacatttttgctttgctctgttacatgactcggggcttacctgcatttcacgtgagagaaaagtcaaattcatctccaccccacagcctgctatcttctgccttttaccctaaatctttggaggcgacagcttcctccccatgactgatagttatccatgctcacagctgctggcaggactgactcctttacaactgtggccttgtagttgatctgaacaggatgatcctgtctatggaagcggagtcttctctcactgcctgaaggagaaggctctgctggagatggagggctctcatctgtcaatgggtagcaccgacggtgccccagacatgctgaccatgtgtggatgtcttagaagagtggaaaggcttgagaaatgcaagcttagaatcatttctaatattacttgatgggaagtcagcaaataggaaacttgtaaaaaattggaggacaactttttgccactatcatggacaaatctatcaccactaccccaaatatcggtccctcagagaccaagtccttagattctgaggctctgctgtataattcctgttcagtagagcatctggcgaacctctagtaggacaaacagacagtaacccttgtgagaagtgagggaacttttagaactaggcctcaaggagcactgtacagtagaaacagaatgtgaaccaccacaatgaagaccacatatgcagtttgttttctagtagtcacattaaaaaggaaaaagaaattaattttaatagtacatgttgtttaacccaatatattcaaaatattattttaacatgtaaataatataaaaattgtcataagatcattttccaatatctttttaaactaaattttttaaatctgctgtgtacttgacacttacaacacgtctcaattctgactaaccactgttcaagcacttaatagctacatgtggctaatggctaccatagtgggacagtgcaggtctggaggatgtgaaatcgggtraacacacaacctttacacccgaaacagtgctgcagaattgatgataattactctaaatgctcatctcttatcttttcgcgtctgaaaactgctgctgagtgtacaaaccaggtaacagtaataagggccaatcccagtggtagaaatggagttgatatggtggagaaggatctgttgacaccagaccctcaaccacagccatgcacagctggacagaagccccctcggactcccaggkctggagtcggggcagaggcagaaagtctaaaaagaaatacatcartgtagtcatttcagtaataaatgctgtgaagtaaataaaacaagatagtaaaagagagatgggagtactcttcttgctcactccaatagttgagtgagtcatctgggaagtaagttgtgctgtggagtgtgaaaggtgattttaattcagcctgagagccaggcgcagtggctactgcctgtaatcctgcactctgggaggccgaggtgggcagatcacttgaagtcaggagtttgaggccagcctggccaacatggtgaaaccctgtctctactaaaatacaaaaattatctgtgcctggtggtgcacgtctgtaatcccggttatttgggaggctgaggcacaagaatcacttgaacccaggaggcggaggttgcagtgagctgagatcgtgccactgcactccagtctgggatgacagagtctcaaaaaacaaaaaattcagcctgaggaaaatacttcctctagtcctcaacgtgactaaagagatcctcatttttctttaagagagaatttcattatttgaaaacacaatgcccaaagaaatggaagaaattgaagaagctggtttctatgtacttcaaataatattttggtgtgaggccccacatgacaacatctttcccccaggataccacagctgacatagctaaaatatgaagtatggcctaaataatacacagtgagctgataacttaggaaatattttttgtttgttttagccaaggcaaacgaattaaaaattttaatgttttgtttccatatttgcttaagtaaacttcaaaactaattacttgcaaagaattttgcctcggctacatggatgaccagtgaatgcttttgggagtgtaggactacactgaataatcgaataaatctattgaatayggaattaaaaaaaaaaaaactaagtaaaaaagcattagaaccaccatacagcttatatctatatgcttattatgtatgggctggcttaggagggaacttgagaaatggtaacagtatttggttgatgctggagagggaaattggactgggaagaaaaagtaagagatgaagatgtactttcagtgttctctttatatcttttgcattttgaagagcagaggtttttaattttgatgaagtcccagttcatcaattttttttctcttatggatcacccttttgttgtcttatctaagaaatctttacctaacttatggtcacaaagattttctcctatgattccttcttgaaatgttatagttttagattcacatttatgttgaagattttttttaatttttttttatttttttagagatggggtctcgctctgtcccccaggctagagtgttgtggctgcaagatcatgacctcctgagcccagttgatcctcccatctcagcctcccgagtagctgggactacaggcatgcatcaccatgcccagctaattttttagttttctgtagagacagggtctcactttgttgccartgctggtctcaaccttctggactcaagtgatcctcccccttcggcctcccaaagtgctgggattacaggcatgagccaccatccctggcctgttgaagactgatattagttaacttttgtataaggtatcagttgtgagctgaggttggaaatccaatagggtttggaggggttttttgtttgtatttaatcatgtgtattctttaaaaaataggatttaatttcaagagattaaaaagaaatattgtatagaaatgtctgcagttataataagtagttcaattttaaaaagaaaaagttgttttgtttgctttgttttgagacaggatcttgttctgtcatccagtctggagtgtagtggcatgatcatggctccctgcagccttgttctcctgggctcaagcaagtagctgggactacagactcacaccatcacacctggctaatttttttttttattttagcatagacgaggtttcactgtgttgcctaggctggtctcaagatctgggctyaagtgatcctcccacctcaacctcccaaagtgctgagattacaggcatgcaacactgtgcccagccaagaaaaaagttttattatgactactgtactgattttcaggaacagtcattgtgctttaattctctaagccaaaaatgtccaattctgttgggcaaaaagactatgttgttgattgcgctctctcatatggtcccttgccttcagccattttcataatcaaaacttgatggcagtattttgttacagggtaagaaactaaaaatggtaaaagccatttgtcagggtaaatctgaactaattatttagatcagctgaaataaaaagggttacaaagacaagttttctgtcttcaggaggggatgtggatactaaaacttcaatggaaatgaaaagatatggataaatttgcatctgccagatctgcttagggaaagcatatacatgaagtggaggaagtcttcccatatcccttacataaggattgagatctgctgccagagacacatgttgcaatatcaatagaaggtcgtcaaattgccttccatgagggagtgggtctgtttaatgctatcattttgtgacaytgagaacacgtgaggccacccacaccttctctgcccttcaccagagctggggccagcctcttccgataaatgctaaatratgactatcgctttgaaggtgcacttattagcaagggagtccrtgtgtctagggttcttttacgccattacagtgtatgaataatgtacatttgacgggggatgatcctctcaccctactcaagtttggaaccatttgacagataaactgaggagtcagaaagagatccaagcaccagatttgtactggggagaactcagagaagaaaggggatgcactgctgggcctcatgagttggcttatacttcaccttgagctaagcatactaatacccagtccaggcagcaytgaacagctccgcgcagatctcaccctccaaaaaacaggaagaaaaagccctctcactgcaagcaagatccaaagagagaagagcaagggaggggctgatgtgagcatgcccagatccatcccccacccatattcgccaccaagggcggagacaggcaaagagggcccctgtcctggaaatccctccatgaggaagcagtgaaggatgcagggcccactctgtcagtgtctagtgttccacygatcctacatagtaattttgaaagacgatagcatgatgttcctgaaaggaaaaaaaaagtttcctctatgaggtcattaacatatatcttgagtgactttattgtcttctggttcattttgacatttttgtaaattctatagatcttttatttactcctgtgatatattttaaagatcaacaaatgtccacaccaaagaaaaaaatcaccagtaagttcgtaacttttatatttctatacttttaactgttacattaatcctgtcttattcaaaaggtattcaccacaaaaatacttactaatcttggtttcctggtatgaactccttgtgcttctgagattagagawaygcttttctttacgggtggccacaatcaagagataagatcatgcctaaaaggacaagttaggaacagaagtgtgattaagtatattctgtattagttttaattaggactatagtcctttaacaatttcatcatatttaagcttgaaaatatacatgattgctgataccactatagtcatatacatgtatatatgcacacatacacatgagagatgagactgtgttactcagacatagaaccacgggacagtcagctacacattacttctaggcaatggttcatcttctctcttcagggaaaaagtaacccttgttggaacctgacagattttgaacatatcttttctttgttctttgtaatgtttatctgtattcttgttagaaacgactttctggttcagttatttaaaagattaagccttttagtgaaagaagttctcaccttggtgtcatcacttgagaggctaagagtgaagcaacctagttactactctgggctctgtyggtggcctcctgtgtggcactgcaccaaacgtacttattactcagctggatgagatgatcccggttccttccatccacatgttccatgctttcctgtgtatctcggcgcacagatactatacatacttcagtggctttttccgttgtttaaatcttaaaaagaaaaggcayattctggtgtatatactacttccctaaatgaagggccatctactatataagtcttacagtataatcatgaaatccagatgtggtgtgcaacaaacttcattatttacatgttttggaaaagattaataaagtacagcaaaataagctcaatactacagctgtacacactatactataaagtattcttcttttgaaaagcatttcaagattttgcagcatttttattgtattggaaacagtcacagataccatattatagaaaactctgtttgacagaacgccagatgaataactgttgactatacacagtcatatataaccacattggaaacttcatgtagctatgataaatttctctcattttttccttaggagtaattacattagataattgaactgtttcatctaagaatttattttcgtggttttagtcatttctcagggagggagcctcatttattacagttctccccaagacacactggatagacttcatccactgctggaaggactggtgctgccccctgaggggaaatggctaggcagcactgtcttcactgcatcttatcctttggcctctaaggaatgtcaaggtcagctggtcaaaagctaagaagggccaaagccatttaaaatttacagttcttttccacggtcacaagtctcttaattcatgctgctaggctgcatctcttgtgcttgccaaaacgcatttttgagctttttcaagaactttctccttcttcagaggagaggttgggaagggagtctggtgatcaggcaagccctgcattcacaccacggaccctttggcttgtatatcttggccattagcatttaaactatcaatggtagacttgtaagaggaaataaattgctctgagtatccagatccaactgtgcattcctcacattgattgcaagaccaaaatatgtagaaaatgttattggcaacattatttattcaaaaatgtttagttcttcagttataggcctatgttaatagaaatttgaaaagtcgtctttatagtgttgttcaccatrtgatataatgtttctaaattgtatcacatttagtgatacagtatctcaagagatggaacagcataacagatgagtaatattagtgatattcagatgttcaaatgtacaatcttgaaagactaaagaatgaatttatagcatgggcacattttaaaaatatttaaaggggactatttaaaaataatcctactatactgcaaagatatgaaagaaagaccgagaatgatttagtgaaggccacacagaaaattggtggcacagtcacttctacccgggaaagtactaagtagcccagtggcagcagatgctaaaaaagggctgtcggtgatttaaaaacaaagctatttaggccatgtgtggtggctcacacctgtaatcccagcacttggggaggccaaggtgggaggactgcttgagcctgggcaacayagtaagaccctgtctctactaaaaaaaaaaaaaaaattccactgggtgtggtggcacacaccagtagttccagctgctcatgaggctgaggcagaaggatcagttgagcccaggagtttgaggctgcagtgagccaagatgacaccactttactccagcctgggtgacagagcaagaccctgtgtcattcatgaacaaacacataagtaaataccaaactatttttaagaattcaaatccaattattttggaaatgattctttttgtatttatttttttctaccacaaacgtgttcaaaaaagagagtgaaggacagaaccataagtatgtaggaacttccataccatgaaattctatggtagtatttattgcccttatgtgatatatgtctcttgatttttctcagaaatttgaattaatactatacttggaaaatgtgaagtaagaacctttatcaattggtttcatcttcctgttcacattttggatatacaatatttagctgtaaacacatgatgtttgtttagtagagaccaaccattcattagtttctcaatataatgaacgctagttgatggtacttacactgaagtaagaaattctggaagcaaatttaatttcttagtttcaaagtcagctcctccaggttgctttgtacattcttatagtttttccaagaaatgtttttaagtctagcatatgagacataactacctaacattatatgcatggaatgtgttcaggacatagcccagctgtctctatagctgttttgggtgccattgcaatatctgtatctcaataacaaagaaatagggcataggaggggcagacttagagccatagtcttgagtggagcccaaatcagaaaggtcctctgtgtctgaggaagtcgcattgcacatggtaaatataagrtaagtcgtggtgctttggttagagacatggtaacgtcatggtcatgagccagagctcctcagtttaaatcccgtctccacttctttccagctgcataatcttggacaacttactatatatctttgtgcctcaatttcttcatctgtaaaatggagataataaaagtggcctctctcctcgggtttttgtaaaaattaaatgagtttagagggaaaagtgcttaaaatggtgtttggtacatagtaagtgctctatagcagttagctctcatcactagatgtggtgacgctgttggtgctggcagtagtagtagcaatagtcatgcttgatgaaattatttggaaaaggcctcccctggtggctttaaacacaggaaatggatgaatggatacccttctcaggcctccaggatattttgttactgtctaaggcctccttttaagttacaaacttatggagttttatgttttaagagtctttttaaccactatactttttatatgcacatagttaaaaacagtcaaatagtatagaagagtataaaatgcaaaaataaaagatgtcccccctccacctcattctagtcttactttccagaggtgaacactttagactatttgtttttagcccttctggtggtttctttcacaagtttatgaacaatatatgaattcatccatttattgattcatcaactgccgatagtgctattagattaatttttatattgttcgtaccagcaagatgttcttgttgggcctttggtaccaaccagctgataacagcaatttcttgatctccctgtgtctccatctacatatcataaaataaggatattggacttgttggtttccaaggccactttctaaaaagtgttaagagaccatttgaactaatttaagtgaagagaaaaaaaaaaaaagaaaaaaaaaattctgagataaaactggtctgagggttatctggatccagcggctaaaatagtattccaattttaactgcgtctctccctttttcttttatataaggaattggctgctttttatgtactggcttcctttttgtagacccttccatgatggccaggaactctaggtgattctatscttctagacacatttcccttccatcttcagtacgaaaagtcccagggaaaggccctgcttggcctggcctgacctggattatatacttatccttggataatttgctgaagccatataccagttgactagtcctggatcacatgctcaccctgcaaccaagggcaagaggattgtgactggcagacccacaaggaatagggtagaagcgtatctgtaaagggagggaggagtgctattaccagatgaaagaagaatggtagagaataaaaacagatgtctgccacacttggagtttcaggaaattgactttaagaagaaactcattcaattctccacctactagtgagtcattacttgcttgtaagaatgcttactgccacrcattcaaccattggcctcattctccttccagaaataaagcatgaactccacctacacattctttaacttagtatcagccataagcgattcctggcagtacttcacaacacttgaaaaatgaatacagacatcagtgtgatgttccaggcagacatcagtgctttagcttctagcctcaacacaggcactcaatgcggccttgttagaaacactctgtccggtcttttatgacttgctacactacacaatggacacacaagggaactgtttcctctctctgtatagggaccaactttgttatctcaggatacagtctatgttttgaaaaagtggctgtagaacagtgcagggatgggaagaatgggtcctatcaaagaaaagaactgcctagagatgactgaagttctcaccaagtactgaaaatatccccaaggcacttctcttcaaggtaaacataaacttattgcgtttttgactgataaccaaatcaaatggaaaatgggcactggtacaggctgccactgcctggaacatgatggagcgcctcacagatgccagattaggagctgcattaccaggttcacaaacgttctcattcgggtttgggagtttcacattttggatactaacaagccagaaatatataagtactgttacttataagagctctgatacatatatatctcctttattagaagatgcgtttccctttcctgtattccacacaaaaggatgcctggcaatcttttgacaggtagtaagtgacatctatgtgcaaaacactgtaataatcaagaagatagaacacatctggctctgggcgatctgggctggtgtgtgagatgataatgccactgccaaactgacagtgccatgccagccttgtgggctggagtagtatggaggagggagtaagaactgctagatgttactagggagagcttcaagaagaaatgggcattgaaatgggcacagaaggatgaagacagtggatggagagaagttggtgggggtggccctccaaaagagagcagtgcatgagaagaggccaacaggaaggaaaactcaaaatgggtttggggaacaataagagtaacaaacttagaagaatgaaaaggtagagatacagcagcattagttggagataagattgttaggactgtttgaggccaaattatgggtatcttaaatatcagatattattttagggagacaagttagatcagggtgagaggagctctgtctagacataagtttgaagtgaagtagcacatttatgttacatggaagtggatagtggaattcaggactgagggctgggttagagagatcagggagtgagagtgatgcagctgactgactccttgtgcaaagaggagtgtaaagtttagatcttggtaaggtacccatatttagagagatggagaaccagtgaaggaagtaaggcacagtcccagaagtaagagaacaaggagagttgttagtgatgtcaagggagaagagtgcttcaagaaagatggagtgggtgagcccactgtcagaggctgcagagataccaagaatgaaggcagagaaaagccatgggactgctgagcatagcacaaccctatcttcatatttgaatgaaatgtcaaagccaaaacatccaaaagagtagtggcagaaagaggggaaagggttattaacagaaccttggccacttaccactgaaatagtttccatgtttcctttaagggaaagcattatagcagaaccacatccaactctagccccatagaaactattttgagacacacaaaacctaaaagctatttttgtcttgatctgggtagaatttatctataggtatatctgtcttaagaaaaaaatgcaattgaygttagctagttagttgacagaatattcacagaacagattattcacagaatattcttccttttgtaagatttaccatggaattgtttttatctgcctctcgaatgcctttaaaatcttcttctgttttccaaaaactgatatatacgtttttcaaaaacagtttaaataggtgtgaaaacagcatatgcataaggttaatatatgcacacacacaaataagtaccatacttggacttgtttagttgtccaagtttaccagtgtctttgaaatcaggttctttataatatttaaatcttacagggctaaagaggacaggtcataaaatctaaaagtttattaggaccttaaagttgaaaaactaccccagaaaggataaataaaatatccaaagtcataaacagaacgtggcagagcaggagccacactatttgaacgtttctctactgggctgactccatgtttttacttgtaaataacctgcatgatagtggctttatttctaagaatactctcttaggaaaatgcaattgtgtgttgctgaatgccatagagcttgatggaacagggagttttacattgtatagaaatctagggatttgacttcaacagatatttattgagtggcttccctgtgagtaaagaggaagatactgaaaatggagggctcagcgaagtgggaggattgctactttttgtaaagccatttggggagtagataatggttatttgtttggaaagagatgacactctgcccttagtagtaatcgactcttataaatactgactgcataccactgttttggatgtattcaacccagcaagcataagctatgatgggactgacacaagggatggcaccagccattgtgtgatgaatgaaaatgaaaagttggggaaacattaaccatatgaaaccttaaaatatgccaaattcgtcatttcattggaagacagaaagtgaaatatctgtctgtcctttcttccctaattcttcaaaatctcagagaaattttatacttaagaccttaaagtttctcaacatctgtctcacagggagcttttccttggtgtttcaattagaaatgagatcactgattttgcttcaagcattgaaaaaaaaaaggttgaaaaacagattttttcttcaaaaatgtactttgtctatgttaagaattgaaaccaaacattttctattaggaacagtcggtattaattcattttaatgtccactaaattagcatagtttttataagaatcaactaatatcttcctgctgttttcactggccttcrcatcagtagaaatgaaaatcattttgggcatttaactgtgatgcagagtcaactcttttagaagctgacttcggattcctcccccaaaaagaggctgggactgaagcgccagcattctgtgttagattcctcaggcacatcacaactgcaggcactggcaaagcctgtcccttatcatatgcaatttatgtcaggctacaaatcctgctcttctggtggggctataaattctttggaccacatcctgcagccctctcagagccaaagtgaccatttaccccacagagagttggatctccacagacctcctagatgagacatctcaacatctggaagccagcggcaggagtcaacttatgagaaacagttcacattgctactgacccttgaagagcaccatctcccctacctctcattcctattcttcatgttacatgagagactcagccatcctttgatattccagagaagttcccaggaggattaggaattggtcatcagttgctccttctctctctctctatcggtacgtggaatgacttcaaatagagatcaactttatgcattaagacatacaaagctactgtttttctgtggcagagccaaatatggctcttattctaagtacaaaggaaaagtctctctaaaagagactcaagtcatgtgctgatttcactcaggtcacttctcccttgagccctcctccataattgtgttcagttctggctttgtttggaaagtcagcacaatttacaaaaggttcagaatgcattaaaggtcaaaaaatagggctttgtaaagaaacctatgtccttttgcaatacattttaaacttatacataatcccaagcagtaatcaattttaattctagcatttttttgtttatggtactttgtagaaaatccagatttttatccctgccttctcccccaaccttaggggaatgtatttgaattatttttgcactcacaacctcccataagcccagtgcaatacattctcatttgtcttttattaatccttactgtgtaaataaatgatcattcttaagattgggatttatataccttttcctaaggggcaatcataagttagtgctaaacaaatcaagttgttagatattgaccttcatgcagtggacctagcttctgtgatatgaagatatcaattgagctctgagtaatagaattttaaaagacaattgaagcattactataataaagttatagatggaactgaatcggtactacctgagtgggaagcccttgtaggagttttattttctattttatacattcccagaattgatacattgaagtctcatgcatatgatactgagctaatcttagccagatgggaatatattgtggaaacacctagcagcttacccctaattcacttacctaccttcatttgaaaattcttaagatttcccagtccaatatgggaccctcctagtataggaatgtcctactgaatatgcctgatgaacccaatggggtacagaattgcagtaagaaatttatatcattgttgtcattgacagtgatgagtccaccatgtttagtgtttggccaggtgctgtgaggatgccgaaagttaccctccttacttttaaagtgcttataaatatcaggaccagaggagcttatggttcagagggtgcagtcttgcaactcttcatacaatggcttctgtcatacaatcaaatattaaagaaagcatataaaccaacagcatatttattcatagatcacaaatgtttttcagctttgtgatctcaagagtttttctagacaattacgaataccccatctttattatgagcaggggataaattacttgcaatccagatattgctccagagagacatatcaggaatttccaatttacataaaagttgttttccagaagtttactttcacatcatttattttaaacttgggttgcagtttcccagagaaaaagtggtatgtagtaataatagccaacattttaacaaacgttttttgtttactgagcactctatagagaatgatgtggcaccaggctttctgagccagccagcacttcacatccaggttctgcccttggacacattacttgacctcactaactgatggtgaattttttaaatggggataaccatccctgcctcctagggttggtgtgtgtctccagtgctaggcacgtgataagtgccctatggcttcgtgatgaggagaaggcggaggagcagtgctaaaaccagccatcttagctggtctcatgacagccccatctccagttccccatttgcccacctgccactgctgttcccctgccagccacttgcaatggacataggtgaagagaaacatcccctgcaataagtaaaacattgktcttgttttaaaagttctggtttgtaaagtaaccagaattgatttgattttattctgctatgaaagataatttattgagctcatactctgaaccaggcactgkgcccatttaattctcacaatgaccccacaagctagtagccggctgagctggggttccaagccagttcgatctaactgtgactctagccctttttgtcatgtaccattctgccacttgggacagtgtttttagtgtggktaactttttctgaacttgctttaatctagtggtaggagagatgactgaattasaaaataaattaggtcatacacctctccttatctctgtcaaatctaaatctttgccccatccaaccatctgtaaaattattcttgttgaaagctttctgcaaaccactggggtagaggagttattttctataatgtatgaggggaatctattgagttagcatgaaatcaagtttgaagtcagatattcttaaatatattcttaaatatgtatttaaaaccttaactgatgattcagatcctaaaggccctggatgttacagctgcagtaaggtataaaagtgaataaagtcctcagaaggaaaatatagccacagattttttttttttaagtcacattgaaggtcagggtccttttatgtgttacatgcctgaagtagtgtaaagagcagggacagacacaggttctaacctggctctgcaggtaacttgctctgtggccttgagtgttacttaaaaccagtcttcccatgtgtaagtggactgtgccaggtctagacggtcccctttccttcagtatcaaaacttttagaattgaaggatgggcaagagtggggaatcgcttagattttttgaattaggggtatggaggagagcggggaaaaaagaagctgggagaaatttgatggattacttgtgtaagaccaaagatttaaacacatgacactcaaagtacatttgcaactagggctatctagaacgcttaacttgtcatactatttggaaatacatagtatttccaaaatactatggaaatacatactatttggaaatacatagtatttccaaaatactatggaaatacatactagttggaaatacatagtatttccaaaaagttcagtttcatgttttcagagaaaagacagcagaaaaaaaaacggagaaactaaagaagtaatgaatttcttatgacaaataacttctaagtaatttccaaaagctataggcaaccttgcctttctggtacctttcattctttcggcctttttmtctctgtgaaaatcaacttttctaaaaatagcttaatgaggaagaagaaaatggtaaaattgtgcatttcatcacatcacagtccagatatgaaatccatttaactcaagtatttaaaagattatcatttgcacagaaataaagtcagacactttaaaattcgaaataaatgtttttgcgctccttttccccacccctccagtccctgcatattatattcttgatgcctcactgaaccacttaaaaatggtgaagtcaaaacgctagtaaagttcttcactacagtatatactagcagccaaatcactagaatgcccattcatttcttgtgaaatgctacgttaataatttcttaaactgtcacttcatactaaagttagcgcttccacagctttaagcccacttgggttagcaaacatgatggttctttttaatgcccgaatgaataagctgacccatggagaagttgagaaccaatatagtcctggtctgggctttcctgccctggtttctgtgaatactggctctcaagagtcactccctaattctggggccagggaatcctcacatcaggtacagagcgtgatatgatgtctgtagctacttcagcagagccaccacacacagcaatttgctgatgccaggccaagccttaaatacttaaaacacagctgtggctttggccattgtgagcccaggtggggacagagtaggggagcagcgcctttgaggagagccacacagatggcttctaatccagatgcagaggtcagctgaagggtgtggaagagtgttgataaacatcctgggactgggatgcatgctgccctattgaggaaatgtaagagagacagcaaaggcagggagatgaagcatttggggactcggaatggagagtgctggataatggattttagagctagtgggtggtttttatgagttctattcctgggccagttctaaatgcatgaatgccagagcacatgtgctggacagtctacccaaaccacacagacatctggaacttcagggcagtggtgaatcccagcagtgacatgcctacttttaaaacactcaagttcaataggaccccacaaagttctttgctgttcaagtatttgatgctctgtacatattaagaacatagaaccatctcctcattacacctttcagttcccaagaaagtgtgtctttgtcttctcatggacttaagtgtaatcactttactggataattatagaagggaacagaagacacaggacagagtttagaacttgctgatgttcccacagctcatgatacttgagaaaagacctagatattttttcactttttattggccacttcaattctttgtattgctgagtctctgaaggcttgatttttgcctatggataagaaagttttggggtctgatttttagttttaaaacgtttattgtctattcatagataacttgttttatctgcttgttacagtgccgccttctgttgaagtttcttttgacagctattggtccctatgtttacctcatgtgaataaaggaaaacatcctggatgtacagcaaagtttttgagtaaaagagtgagatattagatcattgctagctgcttactcttatttcagaaataaaaatttgaactatctcttctcaatggtaaatatttggggaattaaatatacatcattacaaaatttttgctattgtttattgaacacctacctgttatagaagtcacttgtttacatgtgtttgaaataacatacaatatcaatgtgtattaaggtttgtgtaagaaattcgcaattcagtttactactaaaattttgcataaagactttcttaggggacaaatgtagagattaaagtaaattttttaaaaaatccacctgtggtatttattgaatgtagagttgacagcactgaaataggcaaattggactaacgtaaatctgccaaatataacttcaaccaagtgtttttttgcttttaactttctcatttgatagaattcttttaccaaaaattggctacgaatgagaggactgagaattgatgtcgaaacgtttttctcttaatatttcttgatccgttaaaaacaaattatggctcctggaagtcagacaaaatttccatcaggatttgtaaactggttgggatcaccttatgtgaaacttaaatgagagtgaaatgggcgagcatacttcactgacttagcgcttggtccagaatgaactgctggccccacacttgggcctgctaacgtgtgcccgttccctgggtgttctctgcagctggcctaagtgccaagcgatgtccacaagctgagctcactcctggaatacacgttcctggccgttccatctctgaaggtgtcacttctctttttccccccagggaccctctgaagctccagcaactccagaaccaaatccgactggagcaggaggccggcgctcggcagcctccgccagccccgcgcagcgcgccgccctcgccccccttcccgccgccgcccgccttccccgagctcgcggcctgcacgccgcccgcgtccccggagcccatgagcgcgctggcctcccgctccgcccccgccatgcagtcctccggctccttcaactacgcgcgccccaagcagttcatcgccgcgcagaacctcgggcccgcgtcgggccacggcacgccggcctccagccccagctcgtccagcctcccgtcgcccatgtccccgacgccgaggcagttcggccgcgcccccgtgccgcccttcgcgcagcccttcggcgctgagcccgaggccccgtggggctcctcctcgccgtcgcccccgcccccgccacccccggtcttcagccccacggctgccttcccggtgcccgacgtgttcccactgccgccgccaccaccgccgctcccgagcccgggacaggcgtcccactgctcgtcgcctgccacccgcttcggccacagccagacgcccgcggccttcctcagcgctctgctgccctcgcagccgccgccggcggccgtcaacgccctggggctgcccaagggtgtcacccccgcgtgagtaaccgccgcggtcctccacttccctgcccctccgcctcgggtcgccctgggactcccacatctccatacacgcgctcccatcagcctgcaacccagagcgccccagtaacatttcacacatttctctccgtgcgatgtaaaaattcttaacggcaatttgactcagtgattcttgcgtagccacttaacattatcaaaatcagaactttttcctctgaattaatatgagattctcatcaggaactattcaaaatctatgcagtgccctctcttaatcattatgggggggggggtgcttagctatcatttattgagcactgtgctaagcaactcacatgtattatttcatttgatacaacattcctaagaggtagsattgccccagttaaagtactgaggagtctaggagttaaataaattgcccagggtcacatagccactaaaccgagacacgaatccatgctctcaccaccaaactatgtgttttattataatatttcatgccagcattacaatggatgtgaaggagtttggttattaagtatatacttagtgtttttgaaaaaccttaattaacagatttaagaaataagcctttgtgtaaatctagtgattgactggaagggggcaaaagcatgtaaatgtctttatgttttgatgtagataaatgagggtgtatgcaacctagtggagaaattatgatgccagttttgtccctggcctgtgacctcgagatacattacatgcctcctctatctctttctgtttgcaggtgatctaatatgtctctctttacatcacagtgatgatgtggcagccctatgaggtctttaaaatggaaaatctttgaggataaataacacctacagaagtacagtaaaatcctcaaaaaaatacagtacaggtgttaggcatgtttggttgaagagtaaaatgagtaaatgctagtacttactcattttactgaagatttcaaaaatgaggaagtgctcacaaaggttaagccagcacccatatctcaactcttccttctgaaatcctacttcagagtttgccagaagcatactattgttcagagagaaaaagaaggaactctactaaacagtaaaaaggagaagatcttagaattcaagttattttcattcatctataaaagtgttccattgctaggatacactaatgccaccttaaaggcaagcattgctatgtcgggcctcgacaaaggtgtaccaggcagcttcagttagcaatgcttcttttgttgggcacttcctaaatgttgattacattaatttgaaatgtggcttcttctcaaatccttattgggtgaaacacagtccaatgaatatataaagaaacaagtccaaaaaaggagccaaatatagtaatgatgtgataatggacttctgttgaaagttgtcagtcaacttgtctgaggagaacctttgtccttctcccttgttttttctctttgagcttttatttagctgttagaaaaggaagtgtattatcttggtacaaagaagctgttagagagacccaaagagccagagtttgttgcatgacactttttcatcctctctcattaaaagggtaccaagtcttgcttcccaggaagaggagtactgtgtaaataatctgttctaatatttctcttatagaatttgatcaaagattcgtttttcaaaggtggtgatgattgtgccatttatcatttgtagtagaaacagcagtttgtgctgatcagtgactttgaaaccttcttaagataagcaagttttaatggcttacctcaagtaacaggagcacttgcttcttgtcagcatctatcacagtgactcattttatggagtcaaaatagcttataattgttaccacaagagtccagtcgttcctgccatttcttaaaaattaatggagaagtcgtgccgattttgtggccatggaaaactgtacccaaagatagtgaagtgctgtgacatcaaagtggcaataccagactacagatttttagctccatgcctgctcagtaagccattattatgtggttaccgttttgtcctcaaggaattttcctgttgctaaatcacgcatacttgaagaattcattattttggtttgataaatgtgtcttttgaaacatgtttttcctctggcatactatgggatctgtcatttgcattctgaattaaaaacaaaaatgttactatttttgtttaccataataatccaaataatttgccaaagattgagtgtccctatcagggctgccatgactttggcatcctggaacttgcaggaactgccaagttatcataagatgtatatattcagtttcacttataagtgttatttctttagctggatagttttgccatatatatcaagtaccaacaaattrgttgattatatgtaacacaatgaagtagaaattcattaggtttttttcacttgccttgttttaccaaaatcttaaatgtaaatttccaatatcttagttttcttttcttttcttttctttttttctgagacagtcttgttctgttgtccaggctggaatgcagtggtgcaattgcagctcactgccacctccgcctctgggttccaacaattcatgcctcagccacctaaatagctgggattacaggtgtgggccatcacgtccgtctagtttttgtatttttagtagagatggggtttcaccatgatggccaggctggtttcaaacttctgacctcaggtgatccgcctgccttggcctctcaaagtgctgggattacaggcctgagccactgtgtccagtctctcttagtttgcttaatcatacttgtatacttgctgttttattctgtttgtttcacactgttcttattttcatctgtagacaggaaggttagtaagtactaagtttctaaacagtctgtggagataaggttctgtttttcatatgtttgggtagcagaggtcaaagcagggaacaaaggtcatggatgtcagtgataaaccacaaagccgaggcaaaagacagtaaatctggggaagaaaggcatttgaggaactgtatgtatagaagttccccagaccgcagtcaaccaactgcatgctgttctgtgagccggagagaggttgactgcggtctggggaacttctatacatacagttcctcaaatgcctttcttcctttatgctacatcttccccaaatttactggggtcactggcaaaatattgccctgcacaaagctgtcaacagatacaaatattaagttgacaaactcttttagatggaggcagtaaggagagcatgccttagagagaaatctgtttgcacttttataaaattaatgtattctattcccctcactattgctggtaagttggtgttacagcctccattgctgtaaccatgtttctccacatagtaaatcagccctaagacacagaagaaacccagaagatttggcagtgccgacaggcatagtgtggcagttctgctctgctggtctctgagtggccatactaagtctgaagggtgaatcagatcagacccatccctggaaccagactggcactgtttcttttgccatcttcacattcttggaatctgtgctcataagggagtgccacatagccacagtgccacaatgttgtatgctcttaactacctcttttatataagcagggctttggtttgaaatgttgccccatgtttgtcacaaagaagagcatgtgtcaataagagcttttatacagatgtattaatgacagcttttattatataggcccacagctccttatggacattatctcattgtcgctctctttctccctsataggaaacgggtaggtggggacactatcatcgttactcaagaggtgacgggatttcccagggttctggaagaaatgcctgagcaaggagagcatagcgtgacttaggttcatctcaaataactctaatgtctaacatttcttgattaaagaaagctgttgtagaagcagcaaatcagaatccccgagtcaaggaaaactttgtaacaaatttaactgtactttaagattcatgacacagggcattttcaccagttttcaagtcaagactgtggttagatagtaaccagtgaaaaagaatccaacagatacaagccgcaatgtactttgcagacatctcatctacctatctttctcctatttttcaggaaacagatagtggggggcttttcattctctgacctgaaggggttggaggtgttattactgggctcattagggtccagtatcttatcaagttgtatccaatcctggacaagtatttaccaacaaattagtaggcaaggcctccaggatctgctgcgactgggttattctgttgaaatgtctctgcccctggggcagctcaaaatcagacctgtacggctgtgtaccaagttgtacagaatgaatgaacagaagtaacccgaagccagtggatcacgaggtcaggagatcgagatcatcctggccaacatggtgaaacaccatctctactaaaatacaaaaaattagccgggcatggtggtgtgcacctgtagtcccagctacttgggagggctgaggcaggggaatcgcttgaacacagtgggtgaggttgcagtgagctgagattgcgccattgcattccagcctggtgacagagcaaaactctgtctcaaaaaaaaaaaaaaaagtaacccacgtgcctttgtcattttcttttttaaagaacccaaaatataatatgaggagaatttgatattacaataaagttatctattttcctttaaatatgagcttaagttacccattttttgtactttaacagcctttgctttaccgtaaaattcagtaaaaggaaaacagaattgatatacaaaagctcagtttgtatatcttgggctcttttatatattaatacattacattcttgaatataagtgatatttaaatgccaacatgttaatgagtttgctcactctgaaattttgtggaatttagttaccatcagatttcactgaatgtgagaagagtagaataagaggacttgtaatagttaaattctctggttgattctggtaccttatctctttaatcaatattgtgctctggaaatttgagtttctgaaatctgctcacagaattgacctgcaatagcatatcaagggaaggatgctttcaagattattcagtagccaaaaaaagagacctcttgggatttggtggtgattgaatctggaaaattttaccttccagatgcttgtgtatatgtttgagatgtttttatcccaaccacatgaatattgtttttaaatgacaaatgacttactgttaaagccagagtaaacagatcagtaatgttttttgtacagttgggctgagtgtgtatacaatgaagtatttagtgcaggaggcctgttacaaattgtttattggttaaggtttgcctctgagtatggatttttgtgaagagttctggttttggtaactactaactttgaatactattttwtttttttttaattgtgcaaaccatcaaaaaaaaaaaggagatcatgtctttgtcaccactctttttatttcctaatgagttgctactcttcatttatcaaaagaaggtgccacttcagggagcagaactacaaccatcttacattaaactctaacatagcattagttttataggaaaacaaactcagttgccaaatttttgcctcaaaacttataactgcttttctttcctcatgcctcccctttcaaaatactccacttttatttctaactctcaccttgcatgctacccctaaaccctgtcctcaacttttaatttcgtaaagtgtttctgaattacgttagtccagtgagatgctctgaaaaagagaagaggttccatattagaataagtgtgagaaaactgtattccatacctctttcctcagggttcacagtgcccatccgttggccctgccaggctggttctggtcacaggacctctgcactgccaagctctccctgtaggtctcacatagccagccacttcctatggtttaggccaccactgtagagtcacctcctcagaagtctgatggaccacactgtctgatacagtcatctgctcatacttctgtcctttcattgcrtttaccacctcctgatatgtcttgccttccattcttttctcttatctctttctgccatatccaccataaaaatmcaatttttctaactattgtgacctagttcaacattgtatttctagcacctagaacagagttgaacactgagaaggcaatcagtaagggttatttgcacattcttgtaaattctggtcaagaattcttggcatctttttaaactccttcccctcttccattctgtttatctcagccaatcttgtctctgtgacttacttccatgctgaatattttctgtttgccacttcagatccactcttactacaccaggcgctgttctaagtgtttagtacacattagttcatgtagtttacccagtgatcgcatcagatacgagctgttaatacccacattttacaaaggaggaaactgagacatatggtcattaggtcactagcccaaaccacacagcttttaagtggttaaaacaaaacaaacaaacaaaaaaacaggttatcacgtctgtttctttattcacgctgactctgaatttcttcttcttctccactctacttgtctacatccttgtcatctttcaagggcttataacttgcctctttcatggagtcttctgcagtcattctagccagcactgttttctgtttcttttttattcccattgcatctagaattggtaccacatggtttgctccttaacttattccccaacttggttattagcctttgtgatcaaggaccatcctttaggatgtgggggggtctttgccatctcacttaaataatgktgagtgcttgctttggcagtgtgartactaaaattgcaatgatacagagaagattagcatggcctctgtgcaaggatgacacacaaagtcatgaagtactctgtatttttaaaccatatagcctctatgaaactgccatttttgtaagttaaaaatgttcaaatattaatcgttgtaaataattgcccactggaatgttttcttattccccctcaagtttcaatttcaagcactgactgctaagattggcatgtctccagccacgtacatttgcaaaaagtcagatttgcaatgtaatatgtcatggagctcatgcttgttgaagagaatctttgataggctggacacattcattttagtaggaggcagaggtggcctaacagcaaactctaggttcaggatctaattttcatagccttcaaggatgaatgcaatataaactgtgtagtagattgtgatgctcattccaactagggaggcaagcatttgtacctgctatctacaaggcaccaaataatgcatgtgtcaccattgctataaattgtcctcttccaggacctaactatttgggtaaagaacctacagttcccatcaccacctatgtatgtatgtacaaacataaattagtccaaattctaattttctcttatttttctttgtggaaaaacagataagaaagctcagtaaaggaagatataagcaattaatgttacagttcttcaatataataatttgaattaaatgtactaagaagcaaaaactattagtgttgagactatcatgatgaagcttttggtttttttaatatattttcatttttatgcataaaatcttaatacatagaattccatgatgtcatcaggcattaacaatcacttaccttagaaaccaactctttttttctaggcttaacagggtttgtattaatgtattggcctagcactgggccctgctagatgctcaataaatatttgtctaatcactattagacattttaaaatatcttttggctgggaacagtggctcacacctgtaattccagctctttgaaaggccaaagcaggaagatcccttgagcccaggagtttgagaccagcctgggcaacatagggagaacctgtccctacaaaaaatggaaatttagccaggcacagtggtatgcacttatggtccctgctacttggaggatgactcaggaggattgcttgagcctcctaggatgtcaaggctgcagggagctgtgatcacaccactgcattccagcctgggtgacagagcaaaacccagtctataaaaagaaaaaacatatttcagtttatttttatttctgtgttaattgtttagaaccaagaaaatatgagtaccttaaattctgtaagtaaagaggaaaatgtctttaacattgtaggaaattaggaattaagtaactgcccttcatactggtaatcttgatatgttgaaggaagtgacttgttataagatagaggccaggtatggtggctcatgcctgtaatcccagcactttgggaggccgaggcgggcggatcacgaggtcaggagttcgagaccagcctgaccaacatggtgaaaccccatctctactaaaaatacaaaaattagccaggcgtggtggctcatgcctgtaatcctagctactcaggaggctgaggcaggagaactgcttgaacctgggaggcagaggttgcagtgagccgagatggtgccactgcactccagcctaggcaacagagtgagactctgtctcaaaaaaaaaaaaaaaaraaaaagaaaaagtagaataatcagtttttacttgagccaaagactaattgtaattataccctttgaaaggataaattacccttgtggcagggacacaaaccaaggtgacaactctatggaatgttccagagcagttgttctaagtccctttaagagtcaaatatactgagaaatgcttcccaaggaacaggacttattctacagtgaatagacaggtattttcttgtccaagggaacttgtggctgacttttaaaaaccagttctccgctcctccgattgagatgacctgttctgaccttgatggtctccctgtctcccctttctttytcatttgtgctgagaacacagctcttagtgtagtctacctgcagaaacacagtggtgccttctgtcattgaaggctgctcatcagcacatagttgttctatggtctacatcgcacaggcttagagtaataatgggaatgtgtgtgttcccagtccttgctgatgtaacagagagctggctgccttcagtttacctttaagatgacttcaaaacctagctcttctagttctcagatgtaaggctgtagtgaaatgcagagaacttcacttccaaaattgtataatttttacttgtcctgggcctgactttttacatagggtctgatttcacatggctctggcacaagttttcttgactgaggaagggrggggagagagaaatcagaagtagagatggacagtacatccattcactcatttcagaaatattatttgagtgtctgttaacagcactgtgattaacaaaggagccatggtaagggagagacaatatgaaaaaatagtagagtgatagatgctatcaggaaaacaactaatgggacaagcttagtcagggacatcctttccaaggagtcattaagctgaagactgatgataacaaccccagataaaggagtaggaggggagagaggttccaggcttgggaaaactagcaaactatgcacgtgtttgttaaaggattccatggtactagaaattgaagttataaataattcctatggttcttactgtctcagggtctccttaaatatcaaaatgagtttgtaaagtctagtgttaccttatttgaacttcagggcaaatgactaaaagggacaaacctagaatagcaggttttaatcagttagcatattttccactgtaggtatcagaagactcaactacaaggagattcgatgcacagggtttactgacttatgaaacaagtctggggtagggtagttccatggtaggttaagacagtgcccccaaaacattatcagggcccaggtattctccatcttttcagtctatcatcattggcacatatgggttctcctcttacagttatggagtgaacaatgccgcttttgacattgcatttctgacacagtgatatccagtgaaagaagaggggcatttcttccttctgtttcttttcagagatgagagaattttaactagagcacctccaccctctgactaccccccactcctccagtctcattggcccaggctatatcgcatgcctttggccaaactaatcactctcgaggggattgagaccatttaaattggcgtacattaattaccccctgagtctggggagggggatcacatttctataagcacattgaagggtgaacactcagcaaaattaggaaaaaattcagcaaggaaacaaaggggagtggccaagaggaaagaacagctgttgggaagaccaggagcacaggcctcaggagtgcatggcatcatgacttaggagggacggtggcagagtctttacaggatcctcagagtttctgctgcatacttagtgactgttttgttcccagcactggtgggtgaaaccgtgaacccagtgtttaggtacattcttagccttacttgtgctttctactgtatcagtgaagtgacatgaggcacacagtgccttgacgctttggcagtaaagttttgtttgtttgctttattttgtgtgtgtgtgtgtgtgtgtgtgtgtggtttttttttttttttagacggagtcttgctctgtcgcccaggctggagtgcagtggtgcgacctcggctcactgcaacctctgcctccagtgttcaagcaattctcataccccaacctcccaagtagctgggactacaggcgcccaccaccacacccagctaatttttgtatttttagtagagacggggttttaccatgttggccaagctggtctccaactcctgacctcaggggattcacccaccttggtctcccaaagtgctgggaatacaggcgtgagccaccacacccggcctgcagtcaactttttaaactttgaaatatcttatcatgaactatgtaatataaataaggaagtatatacaatttatacgtatacctyaataaaatgaaattcttatccatttctagtacctttgaagcccccatttgaccctccccaattgcatccactactctccctgagaggtaactgctaccctgaatttctgagttaatgattctcttctcttcatggttttaccatgtatgtatgctcccctcagtttctttctaaaacttttgcatgtaacacctagagaacttgttaaaacacagattgctgggccccaactctgaatttgtgattcagtaggtctggagtgatgccaaaaatctgcatttctaacaacttcaggtcatgctaatgctgctggtccagggaccacaccttgagaaccactgctgtagcagggggctgttttgcttttgcctgtttataaatacaagtatatcatatatattcttctgtgacttgctttttttcaccggaactttgtttttgaagttcagctttgttgatatgggtagcgataggtcaattcatttccccattgcttagtattctatttctcattaatttttgtccactgccctatgagggaagaggaagaaaaataggaagcaacttgcttaaggcaccaacagaagtgattctgtacccctcaagcatccagcaccaatgacccttggctcacacagctcaggtcattgttgctgcctttggaaggaaagaggcagtgagatatcacctgtcctaagagccctggcctcaccagaagttcaggaggctttgagacaccaggcacagcaggacctgcagacctcccagagccctcttgtataaaatagacctcaaataacattggcctaccctaatcaaatcaggatataaggggatggaagggaaggtaacaaacttaatattgatttcaaatgggctaggcactattgttgaataatgattacaaagcactagaagactgaataaaagtatgataaaaatacgttctctttcaacctctcaacattcatatgtggtatrtatttttttaaaacttgcccaaggtcacaaacttaatacgagatagagtcagattttaaacctagctctacttayaaatcatatcattctttcactttatgctgccgcctcgctaagacttaaatgtaggccttccccatccttggcatctacctacccactaaggcatactcccctaatgtatgtgaaccttctctgaaacctggatccaattagtgttacctgaaccagctttcatggttctttccatcatagttgcaacagatgtagcataaaaaatagtgggagtgacatgctgataccttgcactgtctttgttggacttgaacgtttgacttggatttatatgcctgacaactaactatactgccttgtgtttttatcctgcagaggatttccaaagaaggccagtagaactgctagaatagcctccgatgaggaaattcaaggcacaaaggatgctgttattcaagacctggaacgaaaacttcgcttcaaggaggacctcctgaacaatggccagccggtactgatagatttgggacctggacttggaatgttagctacccacatacctttcttcctttctctaagacttaggttcttgatatttgtccacaacatcatcatyattattattattatttttgagacagggtcacactttgtcacccatgctggagtgcaatggtgtcatcacagctcactgcatccttgacctcccaggctcaaacaatcctgtgacctcaacctcctgggtagctggaaccacaggcacatgccaccatgcctggctaattttttatttttgtaaagacagagtctccctatgttgcttaggctggtttcaaactccagagctcaggcgatctgcccgccttggcctcccaaagtgctggaattacagatgtgagccactgcacacagccacattattttattacccttgaatctcaacatttctcttgatattaggatttgaatccaaagacaaaagagaaaacgaaaggccttccttctattcagtcttcactgctttctcctatgcaaaaaacctttctaagagtgaagagagtaagtgggaaagaaaggaagaaggmagggcagatatctggttgggagaggaacaaatgagcaatgccaatggtattaaaaaaaaaaaaaaaggaacacagggattccattctggctgatagggttggggagggatggagaaggtgcgctttggaatggtttgtatctacccagaaacagcgaactgcaatgaaagtatcaaaaagagaatttgttttccatggtatgtactacttacacacgcacacaaatctactagagaaaccaytggggaagttctgttcttttctcccagactactactagatattaattcagcatctgaaagagtaaaggctgttccaaaatcttgttctggtttgttagagcaagataactaaactgtaggaaaaaataattattttacagctgcagaactgtagagtacctaaatagatttggtaaaatatatagataagatgttttctccactggatttaagtctttcctcatcagtttttgtttgttttttcatctcttttgttgatgctatccttttaaaatactcttttctttttaaaatactatttccagaatattttaaggggatgggaaaagcaaatctagaaaataagacttaccaggtaaaggagaggaaccttctgtagctttattaaggaattgtcactggaaaaatttgcctggctcttaagtacaagacaaggatctttttgtataaaatctccctttcagacacctttttcagagtagaaagctctctataattatgttttctgagaattttaattatcaaacattgataagtaaaactgtgagaacagaccacacttgaaagctggagagcagaggaggggtgctgaatgctgattttagtttattagggtatcttaatctgattaagaaagattaaaatttcaatgaagttttgtgttagttactcatttcactgagtatagaagattttcacaagaggaaaatattttctccctgaaataagtgattgcatgtgtaaatgtacatactctggaagttttccctggctctgtcaactaaatcttttaaaagattaaaataaatacatatgggaactttttcaagccaggtaaggcatcactccagcttttttttttttctttttggctgtctatgtcaatgttccttatgaactaagattctcttggttaaggtaagacttccttaagctattggtcaacccacattatatatattgtatgtatatttatattcatctgtttagcagtgaataacattcacagtaagttccacaggtatccacacttgagagcttaaaatgacaagtaaggtttccctttttagaaaatgggattctcaaccaactttttcctaatattatatatcattctctttcttatctttggtgtctgtagacacgggcttttatagccagatggcatagtgacttagaaaaaaaactgtgaagtatatttggcttctagtggtagcaggtgcattctggtgaaggaatagatatgaaattgatatttctgcttataaggaacagagtgaaaatcactccaggcctgcctttgatgtgttacaattctccgtgaaaagattagggaagctttttaagagatcaggtatttaagactctctttgaaaattgaattcactgattttttaataggtgtgagaaaattaatttaataacatagtggactcagatgcttcatgccgccctcagactcctacctctgcctcttcttgtcctctgacctttctttattaagtgaaataatttgaactgcaggactatttgtcatttggcacttgacttgtttcacttcccggtttcagctgggattgagatcagcaattactggaaattgtaaatttacccaacatattttcctgattagagagcwtccaatcraatttgcatttatatttagaagtttggaagtttatctgaaataatttctgtacattttttagattctgccttaccaattattctctatttctaatcaaacacttgcttataaaatgctcccgatgaggcaggtggtatctgaaagttccttccaaacctgtaagtctaaggcactttagaatgagtattcaagagcaggtatcaccccaacagtcacacaaaaatgccggcatttcttatgtataagaatggcataggtaaaacggtttgggccaattccaaagtgctagctgcgagatgcaagaacactaccactttctttgcctgatgggcaagcagtctgcttctgggtcaagtcaattgaggctgttagctttggcaagtgtcttgtgtaatcctgttgctaattcagccatgtgcatcattctctgtggattataatagttgccgccaatcccctacattacacagcagcctgggaaatgctcttagaggtaagaaccccatcactgccagctcatccacatcttcctttagctaaacatttactgagcacatactgttaaatgactgatagaattatttccattagcgatacctgttctttttttagtcagtttattctccttttgagtatctttgttttttctttcagtcagtattagagctgacttgggtgttctgaagctgatggatggctataaaaataacatttcttttaaattgtattttgctgtttaaatatctttttttccatgtttttcattaaggacatgacaaatcttttctgtgtggtttctkccttgtcgcttattgctcactttaaatttgtgctgtaccaattggtggctctctggattaggccattagtactagaaagggaggtaaaaaggtagaacaactgaagcaagaaaaagaaatatgcaggtatctgaagctggagagagaacacttacagaaaatcatgaaagtgtgttgttttttactctttttcatagggcagtacatatttgtgatttttttctaattttgtattttttgtgacttacgttgtttagaggttaacatacgaagaaagaatggctcgtcractgctaggtgctgacagtgcaactgtctttaatattcaggagccagaagaggaaacagctaatcaggtaccatgttgctctggacttcttagggtaacatttattctgtcccccttttccatcttccttatggatactgttcttgggatgagttctgtggaaagtagagggcaagtcacagaaaagcagtattaatatcatcagtcaacctcwcagctaatttttattgagcacatactatgttaagtgactgacagaattctttccatcagtgatacctgttctttttattcttcttcttgattattctcctttccagtacatttccattttcctatcctawgttttatgcaaaataattttgtgtggagaaacacattttcrcygacattgtctgaaataactagtgaatatttcccattagagttggaccttgaacaacacgggagttagggggaccaaccccaagcacagttaaaaacccacatatggccgggcacagtggctcatgcctgtaattgtagcactttgggaggctgaggtgggtggatcacgaggtcaggagatcgagaccatcgtggccaacatggtgaaaccccgtctctactaaaaatacaaaaattagccaggtgtggtgacgcacacctgtagtcccagctactcgggaagctgaggcaggagaattgcttgaacccgggaggtggaggttgcagtgagctgaggttgtaccactgcactccagcctggcagcagagtgagacttcgtctccaaaacaaaacaaaactaaaaacacatatacgacttttgactcttcaaaaacttaactaacagcctactgttgaccagaagccttactgataacaaagagttgattaacacgtattctgtatgttatatgtattatagactgtagtcttaaagtaagctagagaaaagaaaatgttacaaagaacatcttaaggaatagaagakacatttacaattcattaagtggaagtgggtcatcataaaggtcttcatcctcattgtcttaaattagagtggtctgaagagaagaagacaaggggttggtcttgcttatctcaggggttgcagaagcggaagaaaatccatatataagtggacccatgcagttcaaacctgtgttgttcaaagatcaactgtttagtcttaatatctagtcaaaataaaatagaaaatattatctctttatcttctttcacatatatacagatgttcttcaacttagtatggggttatgtcctgataaactcattataagttgaaaatattgtaagttgaaagtgcatttaaggcggggcrcagtggcttacgcctgtgatcccagcacttkgggaggccaagaccgggtggattacctgaggtcaggagttcaagaccagcctgaccaacatggtgaaaccccgtctctactgaaaatacaaaaattagccgggtgtggtggcgtgcgcctgtagtcccagctacgcgggaggctgagacatgagaatcgcttgaacccrggagacagaggttacagtgagccaagatcgtgccactgcactccagccaggtgacagagcgagactccatctcaaaaaaaaaaaaaaaagtgcatttaatacacctaacctactgaacatcttaggttagcctagtctatcttaaatgtgctcacaacacttacattagcttacagttgggcaaaatcatctaacacaaagcctatttaaaataaagtattgaatatctcatgtgatttatggagtcctgtaccaaaagtgagaagcagaatggttgtgtgagtactcacagcaccgttactaccaaacgcatattgctagcacaaaagtttcacttaaggaaaattagaaatcttgctgcattcttattatttctattattagtcttcacatctttttttctaccattacaggacattggttctcctcatgcttctgtagggagtcctctggatggtcaaaaggttaagcttttcacctttcttctccttccagtctttctctgtgtctgttttcttctgttcttcctgttttacgtgtgtttctatcttttctgccatatattaattataaatgctatgaccagtgtctgtttcatttaatatcagatacacaaaattactgcaacatgagttttcttgtcatgtatttaccagcttgaatttatttatttatttttactttatgtatttatttatttatttatttattttgagatggagtttcgctcttgttgcccaggctggagtgcaatggtgtgatcttggctcactgcaacctctgtctcctgggttcaagcgattctcctgcctcagcctcccaagtagctgggattacaagtgcatgccaacatgcctggctaattttgtatttttagcagagatggggtttcaccatgttggtcaggctggtctcgaacttctgacctcaggtgatccacccgccttggcttcccaaagcgctgggaatacggcatgagccacagtgcctggcctctgacttgaatttaattctgtcattagtggatactctgaacattaaatcaagaaaaatttttcatttgttatatatacctttctatggggaacaaaagtgctaattcttcaagggattaatttgatagtaattagatgaagcaaaacaacttgtggtataactcttgcagttttattcatactgttgtatttcttccctcaaaccaacaaacytgttttttaaacactgagtaacttctttaagagaaaacatagttaaagttatctttcatttaatattaaatagggaatatttacatagactcccttgtcttcattgcacttttttgttttggagacagggtctcactcttttgcccaggcttgagtgcagtggcacaatcacggcccactgcagcctcgacttcccaggctcaagtgatcctcccacctcagcctcccaagtagctgggacaacaggcatgtaccaccatgcccagctactgttctttttaaattttttgtagagatggggtctcactttgttgcccaagctggtctcaaactcctggccagaagcaatcctcccacctcggccttccaaagtgttgggaattacaggcatgagccactgtacctggcctttaatgcactttgtaggcaaggaaattgtaggatccaccgtaatcaccacaggaatgttgatgggttgttttttttttttaaagcaaaattttggctagactgtcagtcctattttttcttctaaagatggtgggttcctaacagctgcagagctgaggaggmggcccttgcaaggcagggattgttagaggtgggggaaaaaaaacaaacatttttttttttctattattcttttactattttttctattaccattttttctagtaccattttttctattatycttttactataattgtatataatatggcagctgcttgccacatgtactatgtggagagatgtaccaccctgcatcagcttttaccctacagaaggaaatcagcgttccattatattttattgttatcaacagtttaggaatacatagctttgcttttgcctttttctttccttccccttgtttcccctcgcctcagagaaaagaaggaaaaaaaaattcatctttcctacccccctctttttggatgataggacttgaagacaatctgaaataccacataaactcacttccagatgttttttgtttcatatgcaattgaattgggctcagactgtgtttttaagctgtatggtaaaaatatcactgtcttctagggccttattggggggcagggagagacrtgacactttgtcagaagggattgagtctgctaacttaaactttccttgattcaggaatacaaagtctccagctgtgaacagagactcatcagtgaaatagagtacaggctagaaaggtctcctgtggatgaatcaggtgatgaagttcagtatggagatgtgcctgtggaaaatggaatggcaccattctttgagatgaagctgaaacattacaagatctttgagggaatgccagtaactttcacatgtagagtggctggaaatccaaagccaaaggtgagctgggagatggaggctttttaagagtcattctctgaggaaaggtttagcttccaaaacatagcatgccagtaggagaaagagatacaaatgatctttctcaatacccacgatataaagggttttaaatattcttaagttctgggccatcttcaggaggcattagaaaccaaaaaaggtggtggggggagtggagtttgggtttgaagaatagagaataactaacagggagctcttcacacacctatatcatttattcctcgttgttattcccaaatcacaaataactaaactgagttctgtgaagtgagtttccaaggtcagagagctggtgagtggccaggcctgcatatgaacccagtgctctgtaccatacagacaagtaatgctcaccactggttgtaaaaacttccaatctttaatcaaaaaaccaaggctgcttatattaatatttacagagggaggtggggtgaagaatattgtttagaacggataatgacaaattctgataccatgcaggactaggatgacctggatgggagctctctccatacaaacatatggaaatgctggataaggagctgccctatctttaaaggaaggactagaataactgtttactagcccagcaaggcagtaaacaggagtacacttttccctagagcttgagtgaaaagaataaaaaaaagggaaaaaattaaaacccctaaactacactatcacatgatagggagccaaaagctgagaaatgtgaaatttagtgctggatgattaaaattcttagaagcaagcaaaaagttgccttatataaaggtaataatatgtgaagaaataaccatgaggagagttgtgttaggccgtttttgcataaagggattcctgagactgggtaatttataaagaaaataggttttattggccaagcatggtggctcacgcctgtaatcccagcattttgcgaggccgagatgggtggatcacctgagctcaggagttcgagaccagcctggccaacatggtgaaaccccatctctactaaaaatacaaaaattagctgggcatggtggtgggcgcctgtaatctcagctacttgggaggctgaggcaggagaattgctggaacccaggaggtggaggttgcagtgaccaagatcgcgccattgcactccagctcagggcaacaacagtgagactccgtctcaaaaaaaaaaaaaagaaaagaaaataggctttactggctcacagttctgcatggtatacagaagtgtagtaccagaatcttctcctggtgcggcctcaggaagcttacaatcatggtgaaggcgaaggcgaaaaaggtgaatcacacagcaagagtaggagcaacagagagaagtggtggaggtcccagacttttaaacaaccagatctcatgtgaactaattgagcaagaactcacttaccaccaaggggatggtgctaaaccattcatgagggatccaccccatgatcccgtcacctcccgccaggccccacctccaacactgggagtcccatttcagcatgagatttggaggggacagacatccaaaccatattaagagtcatagtacaagaaacagaaaaacagaaggccaagtattgcacaatattgaacaatcttaagtaacctctaaaataactttaaaaagattgaaacaattttaaaaagaatggaaactataatgaaagaacaagatagtaccaaaaaatacaaatttataaaataagcatagagcaatgtactcaatgaaataaaaagcttaatagtggcataaaatgaaagagggaaaagtgataaaaaaatacctgacacttttaggtgttaatttcctatagctccatggcattgttttgttttcccaccatggcaagttttaccatcatgttcttttcttaaaactgaatcgcaacgccaaagtcaaagatcaaagaaaagagccttgaattttcaaaccctatatacttcctaataaaatggkatttttaaaataaactccattgttatagaaaactttttacaatattcttggcataatctgcattaacaactgtgtattcacaacatgttatcaaacgcatgtattaaaaataaatttgtagtttatgaacgaaattcaataaggaattatatcttgaacttccaagatattcacaagaagattccatattactttcaaaccttacacaaggcttaagatcactgatcaaattctaagrttattgattcttatagaatactacattaacatgaaagatgggcttttgtttttaatatgactgtacttttttcctaatataaatttaaatgtttcacagctagaagggacttaattgtttaaacttttcattgttaaatgttattctttcatccctccttcctctccctcaaccttcattctccttctcattgttttcttccctctctcatttattaaaggtctactttggcatatgccatataaattacattaggattgttaaagtatggaatattcatgtttaaagaaatacatgtttttttaggcttatgttttaaaaatattttattcctcccttgacatgcttgttctagttgagccataggaagactgaaaataatttctgatttaccctgttctcgtgcttgtgccctcccgaatttctccctccattagtacgcttggtaaaattttggaaatatttcttagatcttatttgaaagttgtatgccaagtataatggaggtgaaaaatatgattaaagaaataactcaagaactggcattgtggcaagaatgcaaaagggaagaaattgtatacttattacagcttcttttttccatcagaaatagtcaaccatagccaggcacagtggctcacacctggaatcccagcactttgggaggctgaggcaggcagatctcttgaggtcaggagtttaagaacagcctggccaatattgtgaaaccccatctctactaaaaatacaaacattagctgagcatggaggcgcacacctgtaatcccagctactcaggaggctgaggcaagagattcacttgaacccgggaggcagaaattgcagtgagccaagatcacaccactgcactctctagcctgggggacagagcyagactcatctaaaaaaagaaagtcaactactaaaaagtaaaataattatgaagtatgatactttacataatttaagttttacaactcaaagttattagtctagttggtgattactttttagattctagagtttaatacgtaatatagtttctgtaaatttggagctacctgaaaaatacgagtttgaaaagttagagcagtcatatcctgataattcatccatttatttagtgctatatatttctggtcttttcctttcttagaatgcaggtttcaaaaagatttttcagattcaaatactttgacagacagttgaatttgaatgtcagtttatgttaccaatttacatactgatttatattaaggaagaagtttgttttaacarctaaagggtctaaagtatatttgttttgttaggaatcaggaatacttttggctgcaaggaacaaaaaatgacaacaaataacttgctgtggcttaaaaaaggaaaggtttatttgcttatctartaagtctgcaggtggggtgatgtagctattaattcagcatctcagccatgttagggctgttggcactgtgattcattatgatgggcctatctttcaactgtgttgttcataacttaaatcgaaaataataatgaacttagccaggcatggtggctcacacttgtaatcccagctactctggaggctgaggcacgagaattgtttgaacctgggaggcggaggttacagtgagccaagactgcaccaccgcactctgcactccagcctgggcaacggagcgagaccctgtctccaaaacaaaacaaaaccttagaactcggacatccatggacaactggttttgtttaaaagtgagggaaggaaggaggaccctttggactacttaaaaatattgtatttaatcaaaatttacttttattttttacattgtttcttttgagacagggcctcagtcacctaggctggagtgcaatggcatgatcatggctcactacagcctcaacctcctgggctcaagcaatcctcctgactcagccttccaaatagctaggrctatagacatgcaccaccacacccagataatttttttattttttgggtcttactatgttgcccaggctggtcttgaattcctgggcttgagcaatcctcctcagcctcccaaagtgctgggattataggtaggcatgagccactgtacctggcccacatttaattttttatcaacccaagttacatatctgaaaattattatacttttcaatactactgtgttttctttaacataatggggataggtgacaaacatttaacctttgatcatatgcttcctggcccagaaataaagcagtagtattccacccatcaccaacccttagtcatcacctccctccctaccaacctcttttatttgtcaaacacaattcagtgaaatgattagagtttggggtctgcttttgttctccaaaacaacctttttacctttattttataaacaatacattttaattgctggtacatttgaaaaaagaaaaatggccttcatagaaggccacttcatagaaataatggcattctatgaatgccatgaagtaatgccacttcatagaaataatcattgccaaaattcaatatatcccttcatataaataatatatgaatgtaagtgcaatatttttaaaaacaaaaggaagatatataatttaaaaactcaaatagaatttaaattgttacctgccttttttcagtgaaaaatcaattccttagtcaggtatttggtttaacattttaacatgaaaactcagatcagctctgcaaaccacactgttactattttcagttctccaaatagagtaggaatacacaaactcctaatctttaatctttgtttctattcacagatctattggtttaaagatgggaagcagatctctccaaagagtgatcactacaccattcaaagagatctcgatgggacctgctccctccataccacagcctccaccctagatgatgatgggaattatacaattatggctgcaaaccctcaggtaaagaagggtataggtctgggctcagttctgtgtctagtgcttacaggcatttgattagacaaaggaactatttaaaaggtgaagttaagaagtttctttgatttatgaaactatttttccaaattctacatccatcttggtttcagaggatagaaaaattctttgtttcatgaatacttatttattccatcaggtgttattctactccttccacaaatattattaagggtctaatatgtacacactttctatgtgggtgatggggttgcagtggtagactggacaaagtcctatggtaaaaaataagcaattaacaaataatataacttcaggtaggattacatgaagaaaataaaggagaaaaagagtgagtggcatgcataggctgtataagaaaaactcaacaaagtaaaatattttaaaagaaacacatcagtgggatttaatgtgcaaatgtagacaaatgataattttgatagcattcaggtttatcagttttcatcaaaatgttttctcttgtatttgcctttagacttagggtcaaaaaatcagttgccttcttagaatttaataggaggctgctgggtatcatgttgccagttcgagcctgcaaattcttttttattatgttatacattttagtcactatgctggatataggggatacaaaaatgagtaaaaagttattttgtaccttaagagctcaatgtatgacaggtagttttactaaagtctgcaaaagtagtataaataacacacttttaaaaagaaaaaaaaaggcatggtaaaatgagcagttttctctagaagtcatctttttagaatctctgatctacttatatcattccatattatttcttttgaagaaaatatttagcattagaaactatataaataattttaatgacactacaaacttttaattaaagtttctggcccaggtgcagtggctcacatctgtagtcccagcactttgggaggctgaggcaggtggattgcctcagccccggagtttgagaccagcctggccaacatggcgaaaccctgtctctactaaaaatacaaaaattagccaggtgtggtggtaggcacctgtaatcccagctactcaggaggttgaagcatgagaatcacttgaacctgggatgcggaggtttcagtgagccaagactgcaccactgcactccagcctggttgacagagtgagactttgttttttgttttgttggttttttktttttttttttttttttttttttgagatggaatctcactstgtcgcccaggctggaatgcagtggcgcgatctcggctcactgcaagctccgcctcctgcgttcacaccattctcctgcctcagcctccctagtagctgggactacaggcacccaccatgcccggctaatttttttttatttttagtagagatggggtttcaccatgttagccaggatggtctcgatctcctgacctcgtgatccgcccgcctcggcctcccaaagtgttagcattacaggtgtgaggcactgcacccggcctgagactctgtttctaaataaataaataaataaagtttattcaaggtttattatattctaatattccatggtcatataaatatatttttctgcaataatattaagatcagaatgaaaacagattatccagctaatcaggttgtgatagagcacagcaaactcttcactgttaatgaaaagcttctatattaatgcacattcttaaagttctaaatgttttaatcaatgaatacatgaccatcaccctgaaaaagtctaaatcactattaagaagttgcattttaatgtttgtgttcatatttgatatatatgaagaaacaaaagcggaacttgcttttttttcttttttttttttttttttttcttttttgagacggaatcttgctctgttgcccaggctggagtgcagtggcatgatcttagcccactgcartctccacctcctgggttcaagcaattcttctgcctcagcaccaccacgctcagctaattttttgtatttttaatagagacggggtttcacctcaggtgatccacctgcctcggcctcttttttccttattatattttcagtgcatttccttgacattaacaaattctagcttttagtttagttttctgcctgtttaagaaaatggtggagaactgacaaaatccaaaatttttcttcgtgttgggtcatttattcctcttttgccctagaaaggctggggtatattatgggatggaattatctgtggtccttacgtatttgccaacactgggaacctgctattaatttcaagacatttttcttagcatgttttaaattgttattggaataagccattttatagaacaaaagaacataaacgtaaaactgcaattgtgagtccgcttagtgtcttcctcaaattataataatgcatttttacatgtggaaaagttctcagtgaggaaggactgactcagtgctcatggccaatggcagtgtgcagagtttaagacagcaggccagccttgggggtcagtagtctccagtcatttaaactctcttgacaaattattatgaagtcactagatgaaggtgagctgctgaaaatctcccttggatcattccatattacatacatataatatcacattgtaccccacaaatatatacaattataatttrtcaattagaataaaaaagaaatttttgtttattcatttagagacaaggtcttcctcagtcacccaggctggagtacagtggcataatcatggctcactgcagcttagaactcttgggctcaagcagtcctcccatctcagcctcccaaagcactggaattacaagcgtgagccactgccattagccaaaaataaatttttagaaaataaatgtaatcttacccaaagcccaatatataatgccaaaaaaaagaaacccttgttaacataggaaaaaaaggaaaggaaggaaataaaaaagaaatgttactacaaataccaagattgtagggcaacaccgatgatactgaaaaaacctaggatgaggccggcaggccatgcagtacaggggttatgagcatgaactttggcatcaggcaatctcagctggaattctagctctgccactcactacctgtgtgaccttagcaagtcacttaacttctctgtgcctgtttcctccctcgtaaaatgaggatgataataataataataataatacagatttaaatagtacatgtaaaaagcattcagtttacctggcacatactatgctttcaataaatgctagttactgtcattattttaattcagagacagtaactaccccatcttaaagcaacaggcctacaacagaagcctgtggaaccagatgtaaaggatcagttctgtgtctaggtactccgttcccacagtactgtcagaaagtaagcaagtcaatttgggatggaatttctacccagtatgttgttgctgtgtggtcttctgacctcctggcttttccattttatcacctccatgggaaaggacttaggcagcagatgtggctgtgccacaactgccacagctgtgggcttgggtggaggagctgtgagctagaggacggccacacccatagcacagctgacatcagccacacatgaagctgggaagctgctctctactctcagcaccctcagggccaagagaagccccaaaagagagtggttactgcccttattccaggccccagaattctctgctttgcaaatcccaggctgagccccatggttaaccctctctggttcttygctctaccctttggagagaagacaaagcaatgagaagtggaccaagaacagccctcctaatagaatatcctatccaacctgtgatttcagccaagggtaaaataactactctgggtctatcaaaaggagaaaaaaaaaagattcaaagaacccagagcatcacagtaaacagaccagtttctaacactacctattatagtattccaaccaactccaaagatcagttgacactcccarcatcttaaggggtagggctaagagtcttctttacctaaataacccaagacaggcaaaaggaagggaaactcatgaagtctaggcctcagtgtgtaaatgtatatatcccactgaaattgctgtgagagaattttgatatttatgccacttagcagtagtagtatttgttccaagtttctgagcatgttgcctagttgattttaattccaagagtaaaaccccttcttttctgtcttgggggcttcrgtaactggtatgtccaaatatggcagatataagttctgtgagtcatcacttaaaaattggagtgaacttcactatccattagcaaaacaaagtggcatttaaaccatgaccagtgacacaccatttttctacctaactcttggcataagttaccatttgttgctgtaaggatgccattctggaaatgtttaatgctcttagaatctcagctttacaacatctattaccgtatattaaaacttttttcttataatttatgaattaagacatgagtttaaatagtcatgtcataaaaggtggtgaaaaaaaaattcaaaatagctaaatctttcaagatatagtaatcccaaaagcataaagtgtagttgacagaaaactgaagttgactccttacttccttaatgccctttagttaccttaaattttgaaattttaaagttatttgagtttagaaaaaaaagtatttgggtttgaaagggagaatacatgtatgttttctagtacactgtagcccagatgaaatgaaataaccaaggaaaagaggaagactagagtggaaaaattagttcagtaatgaaacacagacggtagagctctcctgagcagtggaaaataattacagaaagcagccaagagaagggtgagaaccaaggagggaggaaaatattaaagttcagcagaatattttatagaatatgatatttttccacctgggttaatcttttgggaataagaaaaacattagatattgttgactgcatccaaattctacttgggatagaacacacagctctaaacatatactgggctgtgtatcacactcgatgtgtgtagctcaagcaattcataagagaccaaagcaatcacatagtttagcaaaataatgagtgactgtgcagttacaccaaagagaatgccaaaatgaggatcacaaatacagtttattttagactctaatcctatctttaagaacaacgacatctaaacacgaatgttttactttgttttgttgtgttgctaagttactttgtattgcacttggattttggaatggctattttgcagtctgatgtttcctcaaactgcattatgtatacaagtggcaagcttttatgaagacctgtgtgccacaagttaaatttcataaactatgaaatataaatgttatttccatattacataaataattggccttgcacaaggtatgaaataatctttacaagctggatgtttaatacagaatcacttttagaattcaaacttatttgtaatataagctttaaactctgtggatttgtttggaatggaaaagtaacacacaactgagttaaatataaaatgttagtttgttgcttgtgttttgttttagcattataaggtttcctggctcatttcaagcttcactctaaacattcccttccattattcttatgttcatagtaaagcagatagaaatgagaaaattaataaaagcaaatgcagcagcattaatgtgcatcagagcctactaactatgattaccagggttaataggcatattattattaaaatcacttattgctaattctatatgacctttgtcaaaaatagtatgttcagacttaaaaacctgaattttctattatgcacatggaaggcatcttttcaaaaaagcttcactgaactctgggggttttttcccccaaacaaaaatgacaaaattatacaacttcttagtttggatgctctctaaatgctcctggttatgtattggttagtaatatatttagccaataacactgtataaatcaaactaataattctgcctcctgaagaccacaccttcccctttcatgttcagaagtgcaggttggtatcagaatagagagattacaaatgataactattcctttttcttaaatttgggaagttaaggaaatattctgtggcaatatttgtatatatggttctaagcagtagcagcaaaaaccctgaaaacagtgtagaaatgtgtgacctttccagagtagtatgccaacctgtttactttttttttttttttttttttgagaggggaggaagaggcaggctaagcatatcaaggatctgtttagagctgaatagggcatatttttcctcctccacatcaaatgcagccatcacactaacaagtacatttcagtatgattgtgcttagcacctttcaagcaccagcagaagttaaaaaggttaatctgcttcccacatagtctgcctcctgtgccaaaggtattttgtttttcctttggagtaaattacattctaataccaagaaaaataaaattccattacataaacaattctaaaggatgcctcaaaactggttattataattatatccatagtgagtgctacaataatttaacattttgagcattggcttcatgcaaaacacaatgctgcccggtgctttacaagtattaatgcctttaatcttcataagaacccattaggtattaactatatggccttgttttacagagaaggaaacttagaaagattaagttacctgcctaaagtcactcacctgtaagggacagcagaactggtttacaaacttagactgattccagagctactgaatgcmatacgaaggtatttaaggctcattccaggattaagagcactaagtggcaggggagatagtggttaaatatgaaagaattttagaaggaggtaagcatatacctcatgtaaagtatattcacatggaaattcttgctggggtccgccaagctgctggggctcctaaaaaccatcttgatgcatgtccatgcataatgtctcagacccatgataacacagtaccagctatgaggaatttaataatgataattyatgatgtcacataccatttgatatttatgagagcatttaggttacatcatttaacccttaaaacatccttgtgagagatatatgtagcatccctatttgtacagaaaaagaaacaaaggcttgaacaaattcagtgatttgctcaaagttttaggaaaagtcagcactcaaatccaggttagtgaggtgtgtttgtttgactgtttgtaacaacccatacctccttttccaaattcaagtttaagtctgaatttaacttacattatatctttttctaaccgcataaatgattagttcattttaacttaccatggatcttctgagcttcatatcacaaggaaggatatatccaaattataagcatttcatcatggaagccgcaaagcacataataaggaagccatatcccacatcaggacaattggaagctatttgtgtaaaacaatacacacacttccttgtcctcaacctccaaaaagaatcattaattttaagtgttcatgtgttatcttgtatgatgcatcagttggatagttcatgatggaggtcttctaagcaagttacatctagattttctacagcaagtacagatctggagaacttggatgaaattaatttttagatttcaggctagtttagggaatcccaaatgtttgccaagagtttagcataagaatctgtatcaagtggcctgtgcttcaggtacagttaatctgagctagaaataattctccttcataatgttagacttcatgtctccttggaaattttcaggaaacacagtgttttaactatgacctcaatagcaaacaccgtgaatgccagacggagtcacatatgtagtggtataaaactagttatgtttgtttctttgtgatgacctctctttggtaattcctcattmttctcctgtctgtattacattcctatgtgtctttgccttttctgggtggttatagccctaaagaagtccaggttttaggagacctagagaacccccccagttagagtcctgcccttcagtgaatcttgctatgggatttttctctgcattccctccactagtgccctcaccctgacccccactccagtctactcacagttggaaagcagttcttcaaaacacacagaacactgcagcttctgttacctgtctctataggcagcttgcaataaaaatgacagccaatgggagaattttattctgagtgtaagtgcatgagggcttctcatcaactctgagctagaactcactaagtctaatcattgatggtacatctgcttcttgtttttcctctcttgctgttacctttggcagtcatcacaatttagaagcacatcttctcattcttctgagagagtgaaggagaaaaatcatcttttttgctactctgctggtaacagtgaaaaaaacaaattaagagaaagggctgaaacaaaaaccaaagtaacaatgtgtggcttatccatgtcatctgggtgccctgagtattacttgtctgttcacatatgacagcgtttatcaaactctttttttgcttttattatttttagttgacacaatgattatacatatttatgaggtacagtgtgatatttcaaagcatgtatacaacgtataatgttcaaatcatggtaattagcatatctgtcacctcacttatcatttgtgttggaaatactcaaaatccactcttccagctatatgaaaatacacaataaattattgttatcctacagtgctgtgaaacactaaaactttttcctcctatgtagctgtaattttgtatccattaaccaacttctggctatctccccgaccccaccaccccrtcaaaatttcaattgacaaatttaagagaacaaaatayaggtttttttaattacataggcccttatcatatgacccacatattttaggtatttaactgcttctagtttttaaatctcaaatatgttcatttcatgagaacatggcttcatttagtcatgaagctctccttatcatcccacgcatacttcttacataacactcattttatcatgctcattttaatgtatggtttggggaagggatgccactaacttttttttttttttttttgagacagagtcttgctctgtcacccaggctggagtgcagtggcaccatctcagctcactgcaacctccgcctcccrggttcaatagattcttctgcctcagcctcccaagtagctgggactataggtgcatgccaccacgcccggctaatttttgtatttttttagtagagacggggtttcaccatattggccaggctgggctcgaactcctgacctcgtgatccacctgcgtcagcctcccaaagtgctggsattacaggcatgagccatcgtgcccggccagccactaacatttaattagtatattactataattagtatattactaaaaagagaaaactgaaatcatctaggtttgatttcagaattggctacagctggtagatgaccatgaaaatggaatcttcacaagagactgatgtcctcctgctatattttacaattcaacatcatgtgttacggagacctttgcaggttacaattaatcaagggttgtcattttaaataccatcctagataaaacagtaaagcttatttaagagttccaaaaaaagaccttgtcaccttcaagttcttcaagtaaaaatagttttactgaggcacttaactcacagggaaagtgtttttctgaaaagggttagtcattactcaaatggcmtactgaattttttatgaaataatgtcttatagagaataggacagtaggcatgatagtgcttagtggttaatagttttaaatagsaaatcatttatttcctgatatttctacagggccgcatcagttgtactggacggctaatggtacaggctgtcaaccaaagaggtcgragtccccggtctccctcaggccatcctcatgtcagaaggtatttaacatgttccttcccagaagtgttacattattttatttattactataaatgtagtactattagaatcatcatatgaccacaaaagtaaacataactggaagatagaataggaatgcaaacctgaagcctgtggctccttgattatkatgctcccttgtgatgcagaaagggaatgggaacaaacattcgctaatgtgtgctaagcccattcacatatactattagtttgttaaataagacatattttatagacaaataaatcaagactcagcacttttaaatggcatatgaaaatactactaaatggtacacaaatgttggaaaccaaacttctgtaaccaacagctgtgtgagtggacgcacacattaaaagctattaccactgggtttcttaaaatcagctcatttgttaatgttcatttttcagccacttagttcaaaacataagaccattagactacaaatcttgtaggtaagatctgtcacattttaaatactcagatatctgctagcaatagagatgctttccattcctagtagttctgagtctatgcaaggacactgatggaacaatggtaggcagagatagagaaaggattattacttcttagtaacacatttgcacttaaaaaaaattcagtaagtcaaccatcctgtcaacttggcctgtttagatattttatagacagaatatcctcaaatagtcctgagtctaaattacaggccataggtgcaaactcctttagtgaagagaatacatagttagctcacagagagtaggcaggaaaactgagtaaacatcaaacaagtggtgtgtgactgcatccacacagacttttgttcaacatttggaagacagttstggcaccagagcatgtgtagatttaattctaacttcatcatggcaatacctattcacaggatgctagcctgtatctttgggtataaacatagcatatacaggattaggtccattgtcttgcattattctctttgcttctcttgttgtctgcaacacatttttaagcctttccttayatcagtgggtcctggaaagctttttttcccataaattagatctatacttagagaagggtaaactatattaaaaagctaataattattagcctagtatgcttctttcatttgttccactcttgcttttcctagttaagtgtttttaaacttatcttctagtcactactgacagaatttgtattcaacatcttttaagtcttccctgcgattactttcaactgtattcctcttaaaggtttctctggcaacctttaaaagtgacagagatgcacagaatctgggagatttgtacaatctcattttttaaagcaaaaaataatgcctctaggcatatggataactaatgcaaaagaaaacttgcctaaaaatgtaatttgttttcctgcttaatatgaaaaggaattttaattaaaaatatattgaatttttatcagaacttttaatttcctacaaatttaaaaatcacagtgtaaagttctagtaacttctgttgaaaaagatttggtaataaatgagcaataatgctacttttcataaatatttaaaaatatttaggaaaaatatgttaatatgtaataccccatttttttccatttccccttttatgatttatagtagcctgcaattggcagacaattaaatttatagtaaacttccaaactaaacaagagtttgcttttctgattttttaatgtgtaaatcttagctgtagggatcagataaggaaatcatattattaccccaygtattttaagaaaacagatgactaaaagtctggaagtaactactatctatatttctatctatctgkcatctttcttgtttcaaggcctcgttctagatcaagggacagtggagacgaaaatgaaccaattcaggagcgattcttcagacctcacttcttgcaggctcctggagatctgactgttcaagaaggaaaactctgcagaatggactgcaaagtaagattttgttattgcttgcatatcctattgccccacttctccctcacttgccatttctctatagttccttttggggaaattacataaagtataaaatgagagctgggcacagtggctcacacctataatcccagcactttagagtccaaagccgggcagatcgcttgatcccaggagttcaagaccagcctgggtaatatggagaaacccatctctaccaaaaatacaaaagttagccaggcgtggtggcgtgtgcctatagtcccatctacttgggaggctgagttggaaggactgcttgagcctaggagctgaagctatgtgagctatgatcgagccactgaattccagcctgggtgacagagcaagaccctgtctcaaaaaatgaaatgattctagcttaagggrgggaaaaagtgaaatacgtcggatatttatatattgtttactatgattctttaaatctraattaaatatgttctttactcagaaccctacatgacattactctagaaagtcatcaggaggttttatttatccctttaaatgttgaaataataaatatgataaatctaccatgtcttcattcttttttcatacaaattttgtatccatatatctactctgacttttattcctcccattttctaattctttttttttttttttgagacagagtctcactctgtcaccaggctggagtgcagtggtgcaatctcggctcgctgcaacctctgcctcctgggtctcctgcctcagcctcctgagtagctgcgattacaggcatgtgccaccaggcccagctaatttttgtatttttagtagagatggggtttcaccatgttggtcaggctggtctcaaactcctgacttcatgatccgcccacctcagcctcccaaagtgctgggattacaggtgtgagccacagtgccccgcccccattttctaattctaagataagttagagggacatctttctttcatctgttttgcagcagggctttttgtttttttggggkttttttttttttttttgagacggagtctccctctgttgcccaggctggagtgcagtggtgtgatctcagctcactgcagcttccacctcccaggttcaagtgattctcctgcctctgcctcctgagtagctggaagtacaggcacgcaccaccacgcccagttaattttttgtatctttagtacagacggggtttcaccatattggccaggctggtctcaaactcctgacctcgtgatccgccctcctcggccttccaaagtgctgggattacaggcatgagccaccacacccggcctacagcaaggctttttaacccaaggtccttgggtaggcaggcttcattaggtgtttgaactctgaaattacctacaaaattatgtgtgtaagataacgttcatccatttctcaaaggagtttagggaaaaaatatttaagaaacactgctctaaaattttttgtttgatttcttttttgccccctgtttactgatcttaaatttagtttaactcttaaatatggataaggttttaaaaagttatttgggctccctctgctggttctgtatggratatgagaacacaaatataggctgcttagaggatttgggcattgtttcttcagaaagtaaatctgggattatagaaatgtataaaaagaataaatataacaaaaatattttatttcttaggatcattatttattttttacagtataaatacacaaattgtgtttcagtctgtatatattttatatatatatgagtgtgtattcatttttggtctataattaagaattatacagtacagctaccatatgatccagttaattctactagtgcttatatatccgaggaaaatgaaatcagaggctgggcacagtggcacacgcctgtaatcccagcactttgggaggctgaggcgggcggatcacgaggtcaggagtttgagaccagcctgaccaacatggtgaaaccccatctctactaaaaatgctaaaattagccaggtgtggtggcatgcatctgtagtcccagctactcagggggctgaggcaggggaatcacttgaacctgggaggcagaggttgcatcactgcattccaacctgggcaacagaacaagactccccgtctcccccacaaaaaaaaaaaaagaaaagaaaatgaaatcmgtagcaatatctgcattcccatgttcattgcagcactattcataatagccaggatacgggatcagcctaagtgtcaacagatgaatgaataaagaaaatatgagatatatatatatatacatacatacacacacagtggaaaattataatcctgtcattgtgacaacatggatgaacctggaggacataatgttaagtgaaataggccaggcacagaaagataaatactacaggatcttacttatatgtgcaatataaaaaagttgaactcatagtagagaatagaatggtgattaccacgggctagacggggagagggaaagttggggaaatgttagtcaaagcatataaaatttcagacaggaagaataagttcaagagatctgttgtacaacatggtgactatagttaataacgatgtactatatacttgaaaattgctaagagtaggttttaagtgttcttactacaaaaaaaaatgaagtcatacatatgttaatcagctcagtttaggtattccacaacacatacatatttcaaaataatgtgcagaattacatacaatttttatcaattaaaaaacacttaaaaaaattcatacagaccacttgtaaaataacgttttgagttaaccagggaaattttattttaaatagataattagattataccaaagaattattaattttacgtgtaaaatggaattgtgattatggaaaagtcttgtttttagaaatgcatactgagctatatgggggtaatggtatataaaatctggratttatttttaaatataaaaaataagagagtgactaaatgatgggtatatacacacttaccatactggttatctctatttttaatcatatttaagaaagaaataacagtactgtctttcactggactggcacataactgtccttaaaacgcctgccattaaaagaatattggaaacaaaaagtaaactgcctattgatttcactatgatgatctgacctggataaagaaaatgtgaaaaatcggccaggcacgtgggtcacgcctgtaatcctaaaactttgggaggccgaggcaggtggatcacctgaggtcaggaatccgagaccagcctggccaacatggtgaaaccccgtctctactaaaatacaaaaaaatcagccaggcatggtggcaggcgcctgtaatcccagctactcaggaggctgaggcaagagaattgcttgaacccgggaggcggaggttgcagtaagctgagattgtgcccactgcactccagcctgggcaaggagcaagactgtcttaaaaaaaaaaaaaaagtgaaaaaccttgccacatgtacagatagatcaggaaaaaaaaaaagttagtgtatttaagctttgaaaggggaaaaaatcctgacgataagccaaacactaaagcagcagcttgcttttcctccaaaaagccccctccccttttagcccctgaggaacattcctagacactgattatccttaactggtactaaattttcaggaaaataactaattccactcccatagcaacaagcatcactattttcatgtgtgctgagagtacagatctagttacaytgtgacctgctggtggtgaccttcagctcctgagatcatgctgtctttacttagccaggagaactggggttagaaaaaaggtacaaggggcattctctttgccctagcatgagtaactatccactgggtaggttcactgtgaatcacgtggtttgagagtacgcgtgctttgggcatctctcctactaaacatactgtggcttcagtcagtagatggcttatctaggatctaacctggtaaagtaggaacaagcagtgccgctttgtttctagatgtgggaacaacaaggagcctgaccaaagatgtccactccctcttcctccacaccacttctgatgacctccaaacaggtcaggcagtgtacatggagagctggggacagcaagtggatagataggagaacacagagcctgagtgtctcagaagccaagctgcctaactactgctgtttgtttccaaaacctcttcatccttttaaccagtcatttaagtttactttaaatgctgtagccctttgctacatgtgtggtgggaggcatcttgcaggtamtatcagttgagtatcacgtagcaggaatggaatttgtgagtcctctggctgatgctggcaaagctagttcttcaaaagaactgttttacagtctaagtgacatctttttgtatataacttcgtactagtaaagttgggggtagggggtaaaaaggccttccttaacagtgcatttcttccattcaaaatcaagggcaaaactaaaaagctggcagatggcgaccatcctgaccctttgcggcacaacatgttattagcaattaaatgcttttatctgatctctggtccacacaactgtcaaggtctcaagattttatgatgtttccattgtgatggtaatttgttgagatggctttctgggtaatttcgtattgctcttgttattcagtttcaaggattataaaataataatagcagccctgtgtgctgacgaatgcattctccataactatggctgctccttgatgagaagctttacagtactatatataaatgccagctgagtatttgttattattgttggacatcttttttcaaagaagcccagagcctggtgctgatatcatcccattaatctccatagccctgggcaaggtaagaccatgacagcaattttttaaatcccatctcggtcttctctaggttgctctgtaagaattgtttagatgtaagctggtgagtgctcaggaagccaaagtttaaagcaaaagttttaagcaaaagagtaacatgagctgatactaaaagccatctcttggcccggtgcaatggctcatgcttgtaatcccagcactttgggaggctgaggcaggcggatcacctgaggtcaggagttcaagaccagcccggccaacatagtgaaaccctatctctactgaaaatactaaaaattaggctggcatagtggcaggcatctgtaatcccagctactcaggaggctgagacaggagaatcgcttgaacccgggaggcagaggttgcagtgagctgagattgtgccactgcactccagcctgggcaataagagtgaaactctgtccaaaaaaaaaaaaaaaaaaaagccacctcttgtactactgaaggaggaatttatgcagacttcttagctaccagtgatttcactctgttttaatacaaaaatttacatgtatttcttttatgatttaggtcagtgggttaccaaccccagatctaagctggcaactagatggaaagcccgtacgccctgacagtgctcacaagatgctggtgcgtgagaacggggtgcactctctgatcatagagccagtcacgtcacgtgatgccggcatctacacatgtatagctaccaaccgagcaggacagaactcattcagcctggagcttgtggttgctggtaggctcatctgtgaatccttgctctstgacagaatgaacatcagacttacaaatgtaaactaattctacattactaaccaayacggaaaataaagtattgaaaaaatagattgtatcatcaaaatagccaatgaggacatggttatawggcctagcaaaacagaaacagaaatctttcatttctcccactaacctggcaaagagagaaaaagattttattagctcttttgggtcattcgacctcctgtgtgtatagtggcccctagtgttacatagagaaatagtaacagcagcatggactccaagaaccaaagaatttgcttatatataaagttttatatttatatatatatatatatayacacacacacacacacacacacacacacacacacacacacacctggtttttaaaacaacactgtcatctaccctcatagtcattgtcaaactacactcagatttgctttttcactgattattgtgtaggtaaattctgtaaaagtgctgttacatgaagtcttatgctttgagaagcctaaaaggaaaacacatttatggaaaggtttttataccatccttaagagttaggtgttgagtacctgatctcttttaagaaagaacataacaaaacatttatttcttctacctctttatgcaaagtgcttcatgtacattatgtatcagttggccctcacatgagccttatgagataatcagagcaaatsttctctgaattttccagggtcccacttagtaagctgatgattagatttaacacaagactcctagtgctcttctaaacacactacgtcactgagctctttcaagaaatagagtagcaatgagaataaaacccaagaagtcttgacaaaactcttggattatgattctgataatggtaccaagatgttttcacataaaaatgtggtaaatatgtggactgtggtgctacaggttagccatgctttcaagttttgtacaaagtactctatattcttacatgctacaattgatttcattcctctaacctcaaactaaaacttcacttttctgctgttaaatatgccttttgatcacatagatacctcagtgcgcatcagctggcactcctgtcagaagacggtgatgcacagtaattggaagcaaagtctttggggtcagatctgctccagtcccggctcttgtcgattttactagtgtgacatttggcaaatagctatctctgcgacttagtttctccatatataaaatgggaatataatgcctcacagtgctttcctaaggattaaatcataaaaatgtgtatgaagctctgcataactagtaccctgcacagcaatgctgcaaagtggtagatgttattcttactgatgagttgctatgacattaagacttgttttatacattttatgttctttgcaaaactggagccccagaaagaatacaaagtgagcttctgttcccacttctcccagaatagcctaggatgggcaaccatgtaaaattcaataaaaatccaaccttctaactaactcgtggtgttggagagtattaagcatttgaaaagttcaggtagaattttcatcctttttgagctctttcctagctgctttgctgtgatatatctgtcactccagatgagggagtagtggtggaaaaggaatgcattctcagattcattgttggtagttcaaaagaaaataagtaaaccttattcattctctgaagtactttccaccactactacaactgatccaagaaaacaatttcccattggatggtattattcagagtgttattaacaatcagtcctgaatttttcagaatagtactaaagttgtcttttttttttaatgggttccttccttcaaggttatartaaagcttttttataaccttcaaagaatacaaagtggaatttgtaatttataggatatacattcctagtttacaggtaactatttaaagctgccaaatttagataaagatgcctcccctttaaattgccccctttaaattctatggcatgtctcacttaagagttacaaatattcagaatattcatggcaaacatggcaaacggcagtgagggaatctaagtggtcaaattcctagaaatacttgtcctcagcaccactaggtggcagtagttggttgaggctgtgaatgatcggtaacataatcactagtagtgaagccatcacagatgctagcaatgacttaggagtctcccacagctggtcagacaggcattctgtgaagcagatggccagtggacagtgtgagcctatcagacttgaattaattgaggaaataaatgagcggaatgaagtatacagacctttgcttggtaaaagaataatttggagaggggactagcatcttaccacctggagtaaaaaatggtatcataaaagatctattcaagcaatattccaaaagccttctgaattctttctagtgctccttttgtatatcattgatagagaattcatctcatgttttcttagctaaagaagcacacaaaccccctgtgtttattgagaagctccaaaacacaggagttgctgatgggtacccagtgcggctggaatgtcgtgtattgggagtgccaccacctcagatattttggaagaaagaaaatgaatcactcactcacagcactgaccgagtgaggtaagactgcacaatgagaacctgatccttaactgttcagtcntaatgatgtatcaaaagatacattttatatagcatggaaatctatgtgtaaaagccacatagatgttttgatttttgatgaaatcaatcaaagacaaaaaccatgygttacccaatgtaggattaagcttttagaaggaagctatgggtgtttgatytaatggtgatttcttaaaagtgtttatcattctatctaaaagaaaagatgaattcatttgctttagtgataaaagactattcagtggtttttgtaaaggcagatcctcaactaggaattaagcacacagatgtattcaactcttgacgtctgttctttctcccattaactttaatggagctagtaatctctacagaataagtatgaccctattatcagctacttgcacaattctgtttctaatgatctaattaaaaatgatgcttcatgtccaaagccacttttaaaaaatttagaaccctaatgactttatccttttctccagcatgcaccaggacaaccacggctacatctgcctgctcattcagggagccacaaaagaagatgctgggtggtatactgtgtcagccaagaatgaagcagggattgtgtcctgtactgccaggctggacgtttacagtgagtgccacttcatctcatttcaytgcgtttactcattaaattatgaaaaattagacatctggacagcaaatcacattactctttataaacaactattgtgttttatttgtcaaaaaaattcatattgctctctctctctttctatttgtagtttctcgacattaatagtgaaccacaccaggagaacaaatacccaagtatcattcaggaactttgaattattagcaaaatatgcatgttgatttctcttacattggctagttagttgtggcttccttactcaagcatccttaggagttaacagtaggcaaaggcataaccatgtttttcacatgttcttgttactgtgttctgcaaatgactgccttttaacatttcttcctatattctatcgcagkgtcctaatgcactctaaacgtgtgttccattgatcctggaatgcgtacttttgtggcttagtgcttttctcattaatatatcttaagcagccagcagtagacttgtgtttgtatatttgtgtacatgcatcccaaatttaaagaaaattattcctattgaatttacagtctagtacaatcagcattatgttatccattgacataaaaaaaacactagaaaaaaattaagaatttatttaagaatttatttcagattttgcctcttcttgaaataactatgtgagggtcatcaagaaatgtgtggcctcaaccttccctactgtacgattcctttcagttgattagtgttaaagcatccacatccagcagaattcctaagtgctataattattttagagaaaatattttttaaaaggagaggggggatgagaattaggaagcttatcagctattccaaaggattccctgtgctgcagtgtttacttaaaaaaaaaaagataaactacacttgacctttgtaatctagctgctttattcccactatcctgtatagacagtaaatctgcaacatgtgagtaaaatgcaaaagtgttcctaaattttccatgtttctaccatggatgtgttcaggtgccttgcatctatctagacattctgtatttatttgaaatatctaaaggctttccaagtatatcttgattaaaaatcttaatttactctttttctttgtagcccagtggcatcagcagtcacagagcaccaagccaaaaaaagtacggccctcagccagtcgctatgcagcactttcggaccagggactagacatcaaagcagcgttccaacctgaggccaacccatctcacctgacactgaatactgccttggtagaaagtgaggacctgtaatccagcattcttgttaaagctgaaacactgaaacagccattgccttgaccaacatattcctttgtcacattatgtaaaaggcagaaacatacctttgactataagaaattaaaaaaaaacaccaaaataatatttttcttacttgatataccaaacttagtttaagtagataatgctaatacaaatatacacattgcacagaaaatacacatttactgtccaatttaaaactttggaattgctgtgattaaagtgatcaaaatgccaaaatactaaaggaaatcaattgttcacaggtaactacaatttgtattatctacaagtgcctttaaacacaagatataggtgctgtgtagcctgatagtgtgaaatgtttaatgagggagttgtaccacaaacagtactacaatgattctgaagcacagtgtattcagacagatacagtgaaccaagtgcaatatgtaaggatgaaagaagaagagatgacaaagaaatccaagtaaatgccttgtctttgcaaatgtttttatattaaatcataagggaaggaactacttgccttaaatgttaatatcaaaagagttttctaacaaggttaataccttagttcttaacattttttttctttatgtgtagtgttttcatgctaccttggtaggaaacttatttacaaaccatattaaaaggctaatttaaatataaataatataaagtgctctgaataaagcagaaatatattacagttcattccacagaaagcatccaaaccacccaaatgaccaaggcatatatagtatttggaggaatcaggggtttggaaggagtagggaggagaatgaaggaaaatgcaaccagcatgattatagtgtgttcatttagataaaagtagaaggcacaggagaggtagcaaaggccaggcttttctttggttttcttcaaacataggtgaaaaaaacactgccattcacaagtcaaggaacccagggccagctggaagtgtggagcacacatgctgtggagcacacatgctgtggagattgcagtgtgtctgaggtttgtgtagtagtggaagattttaggtatgtagagcaagttgaaaatggattgagactgcatggtggcataaatgagaaattgcctgtagcatctagtctacttgaaggaagtggagacataaggagagacaaaaacaggtttgtgccataaagtattttttcaaagacaccaagatgtggtaaatgaaaattattagttcacttccctgctgccatgaaactttgccttaagaaggtgctggattccaaggtttgtaaaggcatctcggtaaagactgctttttgaatgcatatgattttgcatcagctagactgagttgattctgaccagacttgatggttttaagtcggaaccgataaattttaaaaaggagaaaaaataatttgacctagtagtataaaacatgaggctttaatggtactttgctatgaaaagaaaacactgtattccttatgcaaaacacatgtatctttcattatttataagtggcctctcttagctcagttactcaattcatacgtagtattttttaaaataattttatatctgtgtaccaccccatatatttcatattactgtttcacatgtacagctttctacttctttgtaagaacaccaaccaaccaaggtttaagtgattaatargcttgagcaccgggtggcagatgttctatgcagtgtggttcaagtttctttgaccgcacttatatgcattgctaatatggaatttaagataccatacacagtctctcatggacctatctctattgtagaattatgacttatgtcttacttgscaaatttttctgaatgtgacctttttttgctgatttgctgggtttgggattaactagcattattttgccacctttatattgtatttataaaaaaaaaagtactatcaatcaatcatactactttggattgttgtgctggtgtaatgtggatttaacatcaataaatatttgacaaataatagttgcagttttgtgaagcaaaataaatattcagttttagttttctgttgctgccataacaattagcataaactttgagtgatgtttgaggcttcagcatcactcatttattactcacagttctgtaaatcaagttcgggcaggatgtagctgggttctctgttcaggatcttataaagctaaaatcattgtatcagctggactgtattctcatctggagctcaagatcctcttcaaaattcaagtggttgtgatagctctgtgcaattgtagaagagacgtctcctttagtccctcagccaggagctctctctctcagctcctgaaggccgcctgtattccttgccatgtagcccgctccatcttcagggttagtggtgagaatctccttcacctcagatccctctcacactttctctttgtcaaaggcccagtcccttttaaattacgtcaggcccatccagataatctccctttcttaaagtcacctgactttgggaaccttaattacatctgcaaatcccttcaaagcagcagctaaatcgccatttgattggaataactgagagaaggtgtgtatacaccmgaggatggggatattaggggccatcttacagttctgcctgccacagcaatgtactgtaggtatgcatgtaaatacacaccagtgccatgacgtacaaggatacataaaatacagcaagatgatataaattaaaagtgaggggaaaaggaagaaagtaagtataaatggaacaaggaatgagatattacacacacacacacacccatattcatatacacatatagcattaatatctacatagttacaacagacggacaacatatttgggcctaggctttcctactacgggaaagagaaagctggtcatttatctaattcacagcctccataaggtgaaaatatttcatcttttacatatgcaatataatggagctttgaggatacatttgaattagactagaattgtgtatttcacattgtcttctataccccatgacttgctatgtagtttacaagattcattatatattttaatgctgaatttgtccttgattttcccttttatgaacatgcataacatgacaatccccttggcttgctcagtagctacaacctcctttatcatcatgtaaatttagtttgacccctttaaattatagaaatacaacttctatattatggtggtgaggaacttgagtgttggagttggccaaccaggatttgaatcctagctcttttgatcatgtgtgacccataagcaagttactttacctccccaagcctcagtttccttatttggaaaatggagattaaaatagcacccctctctttgtgctgctgtgaagattatatgggatgataattttgacatggtacctggcacatagtaagagctcaataaatttcagctattattttagtgtagttggaaactaaagtaaaatttcaattacaaaatgtgtacacacctaacaaaattccacagatggttaaaatttgtgaacttggatgggaaaaacattaccccctagctgaaatttagaatttccttcaattatgaatgtaggcaacaaaacacaacagtataaaatacctgggactgtcctagtaaaaattatattacaaatattgaaatatcttaaaatccatctaaattcagcattacttcaaaattatggcagttgttagagttaccaatagatgtaatttataggcatktgtattataaatttgtttttaatactttgataattacttaaaaataatttgttttatgtattttatgcctccatgaacattattttgagaagggatccagaagatttaccagagggtcaaaaaggcatatggcaccaaaaaaattaagaaccaggccctacagaagcttaaatacgtagaaaaggataaaaaatttgaggaaagcctaatttgtcattagtagaagaaggaacaaaactaattaattcatacaatgaaatattacttactattcagagttaaaggtaaagaaatggatttacttctattggcagggataaatatgaaaaacagcatttgacgaggaagggaagttacataagagtgatgtcagcaagatggctgactagaggttcctggcattcatccccccaagaaaggatcaacaaatgaacaaacagttaacattcaactgaagtgtcaaaggaagagcactggagtgcagtgggggtagctgcggtcactgaaagtccagaaggcagcatggagacaccttgtctctgctgcccatgcccctgcatcccccaactctgactggcctggagtcaagaggagaaactttcctttgctgggaaaacgtaagcagagccccatcagcccccattaccactgcaaacacctacaatccttactacaggagaattccacagtcctcacaagccctgaaccgactttagagagccactgtcgattgcacagctgcattcctctggattaggaacatgagatatgtactctccaccccttaggkgcctgctgtggggcccagtagcaaatgcacctctccagcccagcggctctgtcattccaccaagcacacatgggtggctgcaatgccacaaccctggaggctcagaacctgggcccaggattggctgtgactctggttctgcacagcaggaaaaccaaccatcattgcctgaacttccaggcagagaaacagtctagcaaattctcccaaagcatacatacctacccttgagctggccaaactgggcccctgagctgctaagcacctgacatgccctcaggccagaaccagtaccagcctatctcctaagcctgagaaacagcccaatgccccctacctccatggacatgcctccaggcctacccagtggaactgtgcccaggctagggtatgagaaacagtccagtgggcccaatcccagcatacatgtccctagaccttcccagcagccctgtgcccatgcccagggcctgagaaacagcttgggagattaacttccagtagacacacccctgggccaggtgagctgtcacatgaccatgcccagggcctaagaaagagccccatggggtcaacccccatggacacaccccctggctggctgagaggcacaccactgtcccaagcccaagaaacagcccacttggcccacctctggcagacacacccccaggccaaatgagcatgcctgtacccagggcctgagaaacatccctgtggccccaatcccagcaagcaagaccccaagttggttgacaccgttcacacacatgcccccaatttgagaaacaatccagtgagcccaccccagcaaagctgcaccaccactgctacaaattctcacagcctaggccactgggcacttacaaacatcagcagactggattacagctgaagaatctgcacagacactacagtactgcatccacctagaaccaaagccaacacaccccccctaactgacactataagatcctccaatacaaatacgtctttccctacaaaacctttcatcaaattagaaagaggtgactgttctaccagatgcatagaaatcaacatcaaggaacatatcaaacatgaaaaaacaagaaaccatgatacctccaaaagaacacaataatgctccagtaacacaccttaatcataaggaaatatgtgaaatgccataaaaagaattgaaaataataatcttaaggaagctcagtgaggtaaagagaatatagctaaactgttccctcaaatcaggaaagtaattcatgatttgaatgagaaattcaacaaagaacataaaaaaaaaaaacccaacagaaatcttagagttgaagaattcaatgaataaaataaaaaatgcaatcaagagcttcaacaacagattagacaaagcaggggaaagaatttctgaacttggaggtaggccttttgaaataactcatgcagacaaaaaaaaaagaataaagaaagcctacagaatgtatgggacactgttaagtgaacaaatatttgcattttggaactccagatggagaagagaaggaaaaaggtatagaaaacagatttaatgaaatcacagcaaaaaacttcccaagttttggaaaagagatgaacatctagctctaagaagcttaaagtccccaaagagattcaacctaaacagttcctctctgaggcacattatagtcaaattgtcaaaagtcaaatacaaagaaagaattctaacaacagcaagagaaaaacgtcaagtcacatataagggaatacccattaggccaacagcagatagcagaaaccttacaggccgggaaaaaaagaaataatatattcaatgtactaaaagaaaaatattgccagtaaagaatattgctttaatattctttattaaatataagcaaagctattcctcagaaatgaaagaaaataaagtctttttcagatatgcaaaarctaagggaagactagccttacaagaaacactcaagagagttttagatctggaagtgaaaagacaataaccaccaccatgatgaaaacaaatgaaattataaaattcacttgtagagctgatatacaaaagagaaagagaaaggaatcaaaccttatcactacagaaaaccactaagccacaaaaataaacaataaggaggattaaagagaaaggaatatacaaccggaaaaccatcaataaaacgacaagagttaagtcctcacctaccaataaataaccttgaatgtaaataaattaaattccccaattaaaagacgttgaatgaatgaatgaataaaaaaaccatgcaactatatgctgccaaataaaaactcacctcacctgtaaaagacacacaaagactgaaagtgaagggatggaaaaaaataatcaatgcaaacagaaacaaaaagtgagcagaagtagctattcttatgtcagataatacaggctatttaagtaaaaagtgatagagacaaagaaggacattatataataataaaggtatcaattcagcaagaagacataacaatggtaaatatatatgcacccaacactgaagcacccagatatataaagcaaatattattagatctaaaaggagagatagacctcaataaaataacagttgggaactttaacaccccactttcagcactggacagatcatctagacagaaaatcaacaaagaaacattggatttaaactgtactacagactaaatggacctaacagacacctacagaacatttcacccaacagcaatagaatacacattctttttatcagcacatggaacattctacaggattgaccatatattaggacacaaaccaagctcaaaaaatttttaaacactgaaatcatatcaagtgtcctatctgaccacaatggaataaaactggaaatcaataacaagaagaatattcaaaactgtacaaatacatggaaattaaacaacatgctcctgactgaccaatggatgaaggaagaaattaagaagtaaattttaaaattccttgaaacaaatgaaaacagaaacacaacataccaaaccctgtgtgatacagcaaaagcatgattaagagaagtttacagcaataaacatctatatcaaaaaagtaaaaagagttctaataaccgaatgattcatcttaagaatctaggaaaaaactgggcatagtggtgcacacctatagccccagccactcagaaggctcgggccaggttgctttgaggccaggaatttgagactacagcacactccaatttggcctgtgaaaagccactggcaagacccagtctccaaaacaagttttaaaagaaactagaaaagcaaaaaaaaaaaaaaaaaaaaaaaagcaagccaaamccaaaattagcagaaggaaagaaataataaagattagagtagaattaaacaaaattgagatttaaaaatacaaaagatcaacaaaaagttggttttttgaaaaaat

SEQ ID NO: 1619 - DNA, 30605 bp, Homo sapiens
aggcttgagagccactgtttgtggacagtcttcatctagattccataccctggcctaggcgaggtaaggctctctggttattgccaggatggagcccctctaccccagtctgctgtagggaataccctaattagttgaggcatgcttttggaatcctggcatgttggcatatggctggtctatcctttttaagatctctggttgggggtatctggatatggattaggagggacaaggagcctttttcttggctaatgttttccaatacttttttgaatggtgccagcccctccaggcatcccacccccaaatcatcatctttagtactaacagggtgtctggtcttagaagcctcccttcagatcccagctgaccctggtgactgcctggccttgatgttggctgcagccttctgatagaaccacatggattccacccacagctggccaggcttgttacatgggtcagggaatacaaatggcccccccccagggagcaggtgttggcctcagttttcagggacccttggtgttgctccttacctagagcccattaatctaccccatcaactctctgccatgaaagccatcttccaggagccctgttttttggagctgaactgcacagattatagctgctattgtacttaaataagggagaggaaaagaaggttctcaggcacagactttctatttttctcaagccaaaccagtttaaaatgtctagcagaatgaactgtatttccatttcttcatgtctacctgccttccccccacaccctaaagttgtacttgtttctagcaaactagaaggaaaagataggaaagcctggcactactaacctcacctctcatacacctctttgaaggccccagctcttytgttcaggcctctcttctcccctagactcactcagcttggtatccatcatcttgagcattcttcagtagattcatctagggttcagattccagactctcagctgaagacagggagccaatttcccccaggtccctgcaggtaatccagggaccccatagggagaacaggctgactggggcattaggaatgtttgtacctctctgcttccctggcagcctggggaagggtgcagggctcagtgcgctaaaccatggtaaacatcttcaatagaactaccctagaatttagtgagtgtgagactgagatattgctcagaataaatttattccatagccatttaggattgcatgttctggaccaaccttgtccagtatgttttctgtttgagctttttcattcttttgttaagccaacaagttgagaatttggccctgctgggatccatgtagtgggcactagctgctctttrgccaaggccttcataaatgattcagtctctcattatctgtcctctagccccacaccctgatttagaccgtggcaaaggaagaacttgaggtcaagaccaaccaaatctgtgaattaaagctgttatttttttctctgcaagggcgctttgcttcaggtctgggctatgtgcagaacctaagcaggctgtgagagttagaagaggcagtattacatgttaggcccagaacaccatgggaaaaggtttatgtagtgtatcttagtggcctgcctagctgcctctgggccaggctgacttctgatgtccacattagctcgtacctgaaccctgttgctgaatgccagccctgttctcctgtaactattatatacgccatggcctggggggcattgaaggaagtaagctctcagagatcctaacactggctgggaacctctgactcagagcatgtctttaaagagtccacatctggccaggcgcggtggcacatgcctgtaatcccagcactttgggaggccgaggcgggtggatcacgaggtcaggagtttgagaccagcctggcaacatagtgaaaccccatctctaataaaaatacaaaaaattagctgggcgtggtggcaggcgcctgtaatcccagctacttgggaggctgagacaggagaatcacttgaacccaggaggcggaggttgcagtgagccaagatcatgccactgcactccagcttgggtgacagtgcgagactccatctcaaaaaaaaaaaaaaaaaaaaaatccacatcttcagctgggcgcggtggctcatgcctgtaatcctagcactttgggaggctgaggcgggcagatcacttgaggttaggggttcaaaaccagcctgaccaacatagtaaaaccccgtccctacaaaaataaaaaaataaaaaaaataagccaggtgtggtggtgggcacctgtgatctcagctacgtgggaggctgaggcaggagaatctcttgaacctaggaggcagaggttgcagtgagccaagattgtgccagcctgggcgacagggtgaggctcttgtctcaaaaaaaaaagtccacatcttcatgaaccctcagactctggagttgggtgtcggcttttttagccagcttttgtgggaattgcctttgacctattaaagaaggaaagtgggtaatggagtcccagccactcaagagactggatatcccccgagaatggcttgggttaccagctatggacccttggaagatgaatctaatccttctcactggtttttctttgcaaattcatttgcttttatttttctaataacaataaactctattttccatgttctcagggcccctgggtagacagacacagcttgatttcagagcagacataggcgaagaaaacatggcattgagtgtgctgagtccagacaaatgttatttatatacacatccaaatttgaagagaaaatgtatttctttaggtttcaaacactgtaatagatataaagcaaaaataaaaacctgttgcaaagttctaaattgtcttctttggcttggagtgaccctagactggatttgggggaagagaatgaggaggtgtttaaatttgtagcttaacagtggaaataagagttgtaccaacctgcacctgctctaaagtttttttcatcgactttattgaaatataattgacatacaataaactgtacatatttaaagtatatacacgttgataaattgaaacacatatgcacccataaaacaaccacaagatagtgaatatatctatgaccttcataagccgtaagcttcccgcttgagaatccctcctttctgccccacctccagcaaccactgatctgtggctgtcactgtagtttagtttgcattttctagagtttctctaaatgattttgacttagtttcatcagcaccactctacagccctttgaaccttttttttttttttgaaacggagttttttattcttggcatccaggctggagtacaatggcgtgatctcggttcactgcaacctctgcctcctgggttcaagcgattctcctgcctcagcctcccaaatagctgggattacaggtgcccgccaccacgcccagctaatttttgtatttttagtagagacggggtttcacgttggccaggctggtcttgaactcttgacctcaggtgatccgcctgcctccgcctcccaaagtgctgggattacaggcatgagccatcgtgcccagcctgaacctcttaagatcaaatagttcacagactcctcccttcagtttagataattcctaaagcagagattacagacaagcagccagaaagttgattgaacccacaggaaggttttgcttggcagagcgtgtttaagtttgaattagttgccaacattttttttttaaatcaaatgtctgtcttgaaaaagactgtcctgaagtctccatttttaaaaagaggccaagcactgtggctcatgcctgtaatcccaaccctttgggaggccaaggtaggaggatcacttgaggccaggagttcaagaccagcctgggcagcaaagtgagatctgtctctacaaaaaaatttaaaagttagctggctgtggtggcacatacctgtaatcctagctacttgggaggctggggcaaggggatcacttgagtccaggtggtcgagtctgcagtgagctattatgatcactgcactccagccccagcagctgagtaaaacctgtctaaaaaacaaaaatacaatctggccctacccggcctgagtttctgcttgctaacaatgtgcaagagctgctgtattttactgcaatcaccacctctccctcactctggcaggtgctaatattgttgctatatattgtttatagcaaaggagaaagtaacttgttaacctatgtttctgtcaattattcttgcctgttctcattacccaactggcccctctaggctattgttgacccttctactacatcctctatccctcaccccatgcatacatttttatgttctttatctcacctagaacacccttgttatatggaaatctatcaaggcctgatttatatggtgccttctcaagagatttccagaatgcttttctagaaataatcagggccttggtttcaggacatctagattccaacctttctgagcctcagttccatcattatactaaaaattgaatatctcttatccaacatgcttgggaccagaagtgtttccaatttgggattttctcaaattttaccggttgagcttccccaatctgaaaatctgaaatccaacatgcacggctctgaagtctttcactgagcctttgggggaaatatttaacatcctaacagccctaaaccaacgctcaattagcacaacagtttacaatcttctctacccacagcctgatgcgaggctctgggactagactatttagccaacagttcttgcaaaattmactgacttataagtaaatagtaatttcaacacctcactgctaatgctgtaacaactctgcagacctagggagcaagtacggtttgcagagcactgggaaggctctgaagtgacctttgaactgggcctcaaaaaattttgggtttggcaaaagtcaaatctcttaggcttcaaattccaggcacaaggattgttgggtttgatttcattatccagaagcaatggggatacagaattgtgatctcatgtgtagggaactgtgggggttttttctactttaaccccagtgagactttgtagagtgtggggtagagaaaaggctcatgaatatgcctgaagcctaactcagcacctttctgaggaactgactgccaaaatggtaatggagaggggaaaatatgacctactttcacaagttaccttgactgcctcagggaaacctgctgtggtagtgtttcttctgggtgaaagaccaggtaattacctgggtgctggtctcagacttaccagttttgaatccctgttttaaccactcactatcgatatgaccttggataagttacctaacctttctcttactgtccttttccgtaaaatggggataacagatagtagttatttctatgagtggttatgagaaccaagctattagatagcgggaaagcacacagtaagcgttcaaggaactgctattgttattaaaagcctcctttggaagaaggacattgaggcccagagagagaacagaacgtccagccacacagcaaatccgtgatgaagttgggactggagtatgggtctcctgagyctcagcccaggactctatccctcttcccgagtcctcggagttcccggatggagtcacatttgttcacggccagggaggaaggtttgatggaggcctgcaggaaacaacagccaggcgcaaggctttgggagttgaagcatagcttctgcgagatagaaacaaggttgacatgggcactcgtgcagaatgacgggctccttttggactcccaggactacagtcccttatgcaccttgggatctgcggctagcccctgcgtaaagagggacgcgtagtcttttccctgccccgccctgccggggcgcccgcctccgaggccgccctcgcttcgtccttcccagcaagctccgcgccggcgccggctattgattggctgaggcgggagcaggcggctggccggcagcagttactcggggtttccggtgcgaggccagaggtggggaagccatcggacgtcggcggtgaggtacgtgcagcggcggccggtgggcgagactatttgagagtgtgcgggccgggatgttctcggccygtggggamatcacgccaactccccgcgtgggccgggggctgtctggggatatgcgcatgcgcgggcgtgcctcgcggcttgagggcgcgcggggcgtgggtggctgcgcgcgcsgggggcgcacgtggggcctgaggggcgggggcggtgccgggagtcccgccacgtcagtctccggccctgagccaatcccgcgcccggcctgccgcgagggggccggttgtgccgggaagtggctccagggagaagaggcctcttccctcacccgctgtgggagctgcgccccgaaagcctgccccggcacgtcgggctctcctgacccgccaagaccagagagccgttggcgccctccgcccgggcctgccggtccgtttattttaagaagctttgtgcgcctgctgtggggatttctgatccaggytgcgaagaatttcgaagtctggaaaatagcaactgtgtttgtttctaaaggatcttctcctgacccagcatcgctcatcacaatgaagaaccaagacaaaaagaacggggctgccaaacaatccaatccaaaaagcagcccaggacaaccggaagcaggacccgagggagcccaggagcggcccagccaggcggctcctgcagtagaagcagaaggtcccggcagcagccaggctcctcggaagccggagggtgtgtgccagctctgcgttgccagcgggcagggggaggagctgtggggtcggcctcgcttctggacttasaggccgaggccaggttgtccgggaggaggagatgtagaatgagaggacagtgctgggggccgcggtcccccctgcgctctggcgagttggcggagctgccccctctaagcacaggaacagagttctggagagaagctccgacgggattaagtcaggtggcagccaaacgaggcacccagtcaggaaatccaggtcccgttagaaacacctcagccaccagcagctaactgcccttcctgtttgaggcatttctagaatgatctgaatggcaagaaatggttttgtgggggggaaggagatggactagaagttgctccgtgccatccctgtgtgctgatgctttacatacttttatgatctaacaaatatgttcgggtggtagtgagaaatagttgtgtcattttacaagtaaacagacttaaagaagttaggcaacgattactataatttcttgatttaaaagatgtttcgaatctaaattctgacaggaactagatttgctgaatgatactccattcttgcttctcagtttccataaaaaaaaaagttaggcaacatttaactcaaactgatgagtttggctgggcctgaaaaatcccaaccagtggtataatcgtcttctttctcactctacccctcatcctctcctgctgtaggggctcaagccagaacggctcagtctggggcccttcgtgatgtctctgaggagctgagccgccaactggaagacatactgagcacatactgtgtggacaataaccaggggggccccggcgaggatggggcacagggtgagccggctgaacccgaagatgcagagaagtcccggacctatgtggcaaggaatggggagcctgaaccaactccagtagtcaatggagagaaggaaccctccaagggggatccaaacacagaagagatccggcagagtgacgaggtcggagaccgagaccatcgaaggccacaggagaagaaaaaagccaagggtttgggtgagcagagggcggctctttgtgaagctggtgaggagagggagtttggacttgacgttctctgggccagtctgttctgccaggattcaaaggaaaayggtacttctcagagcagcaagtcactctagkctaatcaaagccagggatgtgggggccacggcatagagagatgcaggagttaccagcacaaagccttctgggttttggagcaactggagcttggcatgggacctgttctctctttgagaaaatggagacgggaggctagggtaggctcctgtgccagccagtactacctgctgtgtgaccttgggtgtgtcccttctcctctctgggtcttagtttatatttctctttacagtaagaaaattagactaggccagagttgaaaacccaaatatctgcataagctgggctggccatggggccacctgaagatggaggctttactgcttcctgattagttgctctcagctagccaactgagagcaggcaaaactacaggctgggtgcagtcaggctttttttttttttttttttttttaaataaagaaaagccagaaatctagagttatgtgagaactctagattttttcatagttagcagctaaaatggtaagakccaaacaaaacccatccgtgggttggatttggcacacatgcctgcgaattgcagtctccatgctgatctcttgggcccttctggggaggcagagggaaggctccctgactcagtcacaggcaatggggaataggcagtgacagtcattttacagcagggtatgtatgtttaagagtctaggccgggtgtggtggctcacgcctgtaattgcagcactttgggaggccgaggcgggtggatcacctgagggtcaggagttcgagaacagcctggccaacatgatgaaatcccgtctytwctaaaaatacaaaaattagctggacatgctggcacacgcctgtaatcccagctacttgggaggctgaggcaggagaatggcttgaacccgggaggcagaggttgcagtgaactgagattgtgccactacatccagcctgggtgacaagagtgaaactctgtctcaaaaaaaaaaaaaaagaatctagaatctaagtcgagtgtcattatatccatgttttattcctattcccttttccccttatgtatcctcttactttaaagaggaactttaaaaaatcttagggacgactaggcagagtggctcacacctgtaactccagcactttgggaggccaaggcaggcagattatgaggtcaggagttcgagaccagcctggccaacatggtgaaaccccagttctactaaagatacaaaaaatcagccgggcgtggtggcacgtgcctataatcccagatactcgggaggctgaggcaggagaatcacttgaacccgtgaggcagagttttcagtgagctgagatcatgccattgcactccagcctgggtgacagggtgagactccatctcaaaaaaagaaaaaggaaaaaatcttaacgtcacatacatggaaagtatcatcttcttcaccccccacccccaactgagatggagtcttgctctgtcacccaagctggagtgcactggcgcgatctcagctccctgcaagctccgcctcccgggttcacaccattctcctgcctcagcctcccgagtagctgggactacaggcgcctgccaccatgcccggctaatttttgtatttttttagtagtgacagggtttcactgtgttagccaggatagtctcgatctcctgacctcatgatccgcccacctgggcctcccaaagtgctgggattacaggcgtgggccaccgtaccctgccttttttttttttttttttttttgagatggagcctcgctctgtccctaggttggagtgcagtggcgcgatctcggctcactgcaagctccacctcctgggttcacgccattctcctgcctcagcctcccgagtagctgggactacaggctcctgctaccatgcccggctaatttttttgtattttttttagtagagacggggtttcactgtgttagccaggatggttttgatctcctgacctcgtgatccgcccgcctcagcctcccaaagtgctgggattacaggcgtaagccactgtaccctgccttttttttttaattaattaatttttttagacagagtctcgctctgtcaccaagctggagtgcagtggcgcgatctgggctcactgcaacctccgcctcstgggttcaagcgattctcctacctcagcctccggagtaactgggactacaggcgcgtgccaccacaccaagctaatttttttgtgtatgtctttagtagagatggggtttcaccatgttaggatggtctcgatctcttgacctcgtgatccgcctgcctcggcctcccaaagtgctgggattacaggcatgagccaccttgcctggccgaaagtatcttcattttaaagttcactgtttggctactctgttgacaagagtttagtatttctcaaggaggctaagatacctattcctttttggatcctacctctatcaggagggtgggccttccttgcattgaaacagtatgaaacagtagccctgaattcataagtgggacacctttcttctattggtagagcaggcagtttttttctcctgccaatggtgcctactaaggagatttcactagggtacagtcgttcatttgataagcatttgttgagcatatcctctgtgatggtactatggacagtactggggctatagtgagggcaggattgagttggtccttatggcaaggaaggcagctaatcaacaagcaaaatataaagtatgatggggagggctgtcttcagcactcatgagtgtgagcccaggcctggaggggacacctggagaagagggtgcatgtctttgctcctgtgcttttcagggaaggagatcacgttgctgatgcagacattgaatactctgagtaccccagaggagaagctggctgctctgtgcaagaagtatgctgaactggtcagttcccccctccgcgggcaccttccctgcgttgggaaaatcagcatgccacctggtgtaaggttgggggtgcagagtcaagtaggtggcttaattcctgttcagcttttctctgaactatctgttaaatggggaatcacttccagccagcctcttcagggctgtgcagcaagaggagaaactgcatattccttgaaagaaatttctcaaagaatgattccaaggtggtagagcccttgttcctggcctgagtccaagacaccttgtgatcttgatgcttcttcctcaaatacagatgcatagagccattatcacagttaataaaactaacactagtcacttgatactttttccttttactccagagcagtcttcttgtcactgcctcctcatattccccatgacattgacttttaacagaaactagactagctgtcttgtaggatgcccccttctagctttgtcatctctgtggtatcattttacttctttacctcctggtacatgtaagtgaagtagaagttagctctaaagcttgatccaattcagcttcaactttttgacaagaattcttcataagtacttcatgttccatcacaataaatgcaaagcatgctcttcccactttgttgtaacattgttcagtgggttgggggtggggcagccagattcttccatcatcaggtcccttgtcagaatttgaactaacagatttatccattgatggtcacagcctgtgtatgtatgtatgtatgtatgtatgtatgtatttatttatttatttattttttgagacggggtcttgctctgtcgcccaggctggggtgcagtggcacgatctcggctcgctgcaagctccgccttctgggttcatgccattctcctgcctcagcctcccgagtagctgggtctacaggcgccygccaccatgctaggctatttttttttttttttttttttttagtagagacggggtttcaccgtgttagccaggatggtctcgatctcytgacctcgtgatccgcccgcctcggcctcccaaagtgctgggattacaggcttgagccaccacgcctggcctatttatttatttattcagagtcagagtctcgctctgtcaccagrctggagtgcagtggcgcgatctcggctcattgcaacctccacctcccaggttcaagcgagtctcctgcctcagcctcccgagtagctgggattacaggtgcatgtcaccatgcctggctaaattttgtatgttttagtagagacagagtttcagtatgttggccaggatggtcttgatctcttggcctcgtgatccgcccgtctcagcctcccaaagtgctgggattacaggtgtgagccactgtgcctggcctctaagtatttattttaaaattaattcattccacacacatttattaatattttcctgtaaggaactttactcatctttaaaatggggaatgtcatacctgcctaatgacattcttgtaaggattaaataaaaggtataaggaagataagcacccttttggagtgatccagccaggggaaaattgctgatgcaagagaggaaatgagttgctagagtggtgttgtgagtagaggaggggagctgaggcctgcccaagaagggggcttggctgtggtaaccacatggctaggtctgtgtgactggaggagaggacggggcaggtggactggtagatgtgcagcttgtgcccctgattctctagtttcttctgtgttttgagatttgatgagaacgatgaaatagttgtctggaaggagaggagtgtgaatagcatatgcattgtattgggattgctggtcttcctgaaattggtggccatgaatttaaagtgagactcttcaagtagggttgttatagtactggtgtaaagcaggaaggtgctttactagggttgcagtactactggggaagggccaagagagttgagggtgtaagaaatccaagccaggtaatgtagttattttaaaggagagtggaaggatggttgagtcaatggattggaggtcctatagggtaagagactttctgaggatcacagatactgattggaatgagctaaaaagataggtgatggtagtcctggactgggatgctggaaattgagatagtgggtgtgctctctggtagtgacaaagtctagatctgcgctgtccaagataaattcgtctctagctaattgacatgtggccagtttgaatttgaacatgctataaatgtaagatacacatcagcttttgaagacttaagcaaaamcaaagaatataaaacatctttttgtgagagagtgtctcagtcacccaggctggagtgcagtggcgtgatgtcctgcttccaggttcaaacgattctcctgcctcacagcctcctgagtaactgagattacaggcgcatgccaccaaactggctacttttttgtattttttttttagtagaaacggtttcaccatgttggccaggctggtcttgaactcctgacctcaagtgatctgcctgcctcagcctcccaaagtgctgggattacaggcatgakccaccactcccggcctcacttttttacattgattccgtgttgaaattgtaatgttttggatattaggttaaatacatatattactaaaattaatttcacctgttttttacttttttagtgcggccagtagaatatttttaattacttatgtggtttgcattatatttctgttgtacaggcctggatagggtcatgggaggggaactgagctggggaaaggagtgggtttgtggaagaggtgatggactgtgaggccagggagttagaaggattatctgttgatactgaagtggccacaaatgagaaaagtaattgtgttggggagagcgctgatgaacgcagcgctaacgttttgaaggaatgcgagggagcgatgggggtctgtctgttaataggcacaaggtacggtagcaggtggtctcatcctcgggcatgagtgtccagcaagttggggaaatgcaacagcttgaagtggctctagtggcccagagtcagagctggaataggaattggcatctgctggctgtgtggcccctgcttgccctagtgagttaccatttctctgtccctacggtggagcctttggggttattgtgagttcatgggaggagcgtgtaagcaccggcacagcatcagcccatgagagtgctcctggcctgagagggtaagggtcagggcagctcaggagaccctagacctgcatagtgatccccccaccaggaaggccccacaagatgctcacctgccctccctatccctgtcyccagctggaggagcaccggaattcacagaagcagatgaagctcctacagaaaaagcagagccagctggtgcaagagaaggaccacctgcgcggtgagcacagcaaggccgtcctggcccgcagcaagcttgagagcctatgccgtgagctgcagcggcacaaccgctccctcaaggtaggcctgggccccctggaacaggtgactctggtttccttgacttccacttaatgtttctttcatgggctttcctcttaaaaagtagtgcargctagggccaggcgcagtggcacacataagtgattaaaaatcttctggccactaaaaaacagaaattaattttagtaatatacttaacccaatatccaaaacattacaatttcaacatgaaatcagtgtaaaaaagcaaggctgggtgtggtggctcacacctgtaatcccaacactttgggaggctgaggtggatggatcacttgaggccaggagtttgagaccaacctggtcaacgcagtgaaaccccattctactaaaaatacaaaaattagccgagtgtgctggcaaatgcctataatcccagctactcaggtggctcaggcatgagaattgcttgcacctgggaggctgaggttgcagtgagccgagattgcatcactgcattacagcctgggcaacagagtgagactcagtgtccaaaaaaaaaaaaaagtagtgcaggcttgtggcatagaaatacactttctcaataatgccttacgttaagagagtactgcttgtaatcatttgacatgtattagataaggtgaaggataaagtactaagagaatccataatgcactggcgttagtatttctcaatgaaatgacagtcccctggtaagcggaggcctggctctgacaagcagctcttgtcccagacgttggtcagtcaggaacctgggtccttcccatgttctgctgcttctatggtgaggtcagtctgtggttacaccaagtttaaatacagccttttaactttcttttttatatgtaaaatcttacatgtagtttttagaatgaaattattatacatgtaccatttcatatcctgtgcctttttttcactttacataacatttttccctatcagtatgtgtagggctatcttctcattatatggatatattatatcagtgccctagttaaagcattttgggggttgtttacaatttttcattattacatatagaactatagtgaaaattcttgttatatttatcactggtcagttatatagaacttatctgtaggataagtcatggaattgaaatggctaggtcacagtatatgcagatttttcattttaatagattttgctggattgccttccagtgagggggcagtgtgccttccccatcaaaagtgttgagtgcctaattctgcacaactttgcaaaccctgggtgttactaaattttaacagcttggtctctgggggtacagaggggacaaatgcacattaatctgaaatctggaagaataggccttaggagatccgacttgcttcagaatggcacttagcacttacatgtgtgcatgtgtgcctgcattttttcttccttttttttttttkggggacggagtcttgctctgtggcccatcgcccaggctggagtgcagtggcgcgatcatagctcaccacaacctccgcctcccaggttcaaatgactcctctgcctcagcctcccaagcagctgggaccacaggtgcacaccatcacgccggctaatttttgtattttagtagaaacggggtttcaccatattggccaggctggtctcaaactcctgacctcgtgatccgcccacctcagcctcccaaagtgctgggattacaggcgtgagccaccgcgcctgccatgtgcctgcatttttctagggggagaatctcacttgatgtcacctgatatacagaggggcccattggaacccgcattgcacaacatcctggagtctggctactccacgctttgggagcagggagggctgttggcagagaccatctgtggactagctgggggacccttgtgaggtagcagtggatgatggctctcgggctgacttctttgcccaggaagaaggtgtgcagcgggcccgggaggaggaggagaagcgcaaggaggtgacctcgcacttccaggtgacactgaatgacattcagctgcagatggaacagcacaatgagcgcaactccaagctgcgccaagagaacatggagctggctgagaggctcaagaagctgattgagcagtatgagctgcgcgaggaggtaagggtatcacggacagcagtcatggcccagaaattgtgaggttttgagtgtgtgctaggcactgggacagtaccttttcaggcttyatcccattctccctttcttcctcctcctcctccttgggaggagagtaatgttattcctcatagataaaaaacaggtgtggagaagagactcacttacagccacacagccccaggtccacagtgccttgtcccaaatgactgggccaggcatcttttggaattagaactatccacattttagaatggaggtacatgtatggactgtgtgttatatagcaccctcagcagggccttggggaagccagacacattaatgtatttatgcagtagaacttccaaatactcacctacattatgggcttacaatgatgcaggtcaagtctggctgccagcttatgacaatttccattttcagaactttgtagaatttggaattgcaggggaggggtgtacctgtgatcagtgatggactccagagactgtgtccactgattccttgctgctcctgccactcaaaaggcagaatttatcaggctgggcgtggtggctcaygcctgtaatcccaacactttgggaggccaaagcgggcggatcacctgaggtcaggagttcaagaccagcctggccaacatggtgaaaccctgtctctactaaaaatacaaaaaattagccaggtgtggtggtgcacggctgtagtcccagctactcaggaggctgaggcaggagaattgcttgaacccaggaggcagaggttgcaatgagccaagattgtgctactgcactctagcctgggtgatataccgagactccatctcaaaaaaaaaaaaaaaaaaaagcaggatgtcactccctttgtcactgcgttggctgccaccccaggcacttgaatctttggatcttccctgccagtcacctggctgttctgggcgcgttctcatcatgagaagggagacctgcagcccccttacagggctggcagaggacctgctctggattaggccctttcctagcccctggggtgtggcagtgggtgagaccgggaagatctgccctcttaggttcataggccaaagtgatgatcgtgtgtgcaggacctagagggcgctcccctgacccacccctttccttgccatacttcatcctctgggaacaaagctgcttgtttggtttgaggggagttggtttggttcttatccctcagcgctgagacatagaggcttcctgggccactacagtgagacacgaacttcaagaatctgaatacccccgttttctctccccgccaaggcaaaaaaggacttagtactacctgtggagaaggaggtgcaggactaccaggccctgctgctttgcatttacagccctccccagacagacacaggcaccctcatcatacccaaactggacttacctgctaggcaccttcccttccccatccaaaaaaatggagttattttcccttatttcagcaagtccagttgattttacctttgaagtagcacctgagtccttcaccttctctccatcccttctctctcacctgacacaggtctgcagcgctcctctagtaggcaggacagccattccttggggatgcacatgtctagtctttgcctagatatggcaagtctttgccaactgagctaggctgttatgttcttagaggcattgtttttgcccattcytcccatttacaagagaatcagggacacagaagtgagggcttccagccccataggtgatcaatcctggggtcagagatttgagtgtgtttattgcttgccttcttgggagcagattccatccataaaccatgtgcttaccaaggtctgactcactgggagagaaacgacgtgaggttggaaagctgaccttccagagacttggggcccatgttgtgtggtacacatgggagtccatcatatcagattgagatggggggctgggcaaagtgccctggtctgtggctgtggggctaccctgagaaagggagcgcctgacaagccgactrctcccaccatctttgttgcagcatatcgacaaagtcttcaaacacaaggacctacaacagcagctggtggatgccaagctccagcaggcccaggagatgctaaaggaggcagaagagcggcaccagcgggagaaggattttgtgaggctcaggccccagggttggggtgggggkgkgggaggagrcaggctgggctctggctcagctcatagccgggttatatgggagaagtctggccagaccaggcacagattccttgagtaccagtctgagagcaggaagcctcagtgggtctggtgcttgtggctaaaaaccaaacatagcccctgggggcttctgacaggatctggggttctgtcttggaaatagctcctgaaagaggcagtagagtcccagaggatgtgtgagctgatgaagcagcaagagacccacctgaagcaacaggtgagagcatataacctgaccctgtgccttcaagtttccctcactgggccccatcctgggggtagtgaaatgggaccctcattctaggactggctgtgtcctggctgctatgacgccttggttgagcctttgttctctccggacctgcacagtacctatgtggtggtgaccaggtagttaggtgggctcasaggacttcatttgtagctcagaaatgtattgcttttgaggaggtaggaacagaagagtttgaaaatcaacataaaggcaarataaaagtcaccctaagtctcctactttccaggcttagcattttggattatatccttccaaatayatagctttgctttgttttaaggaaaaatagtatctcaatagaattactggtcagagagtcaaggacgggtctgagtgtgttgaccagagtgcctcccagagaaacccagtcttatctgtgggctgctttctccccacagcttgccctatacacagagaagtttgaggagttccagaacacactttccaaaagcagcgaggtattcaccacattcaagcaggagatggaaaaggtaactgtggtccaggcyaggcatggctgctggggcataagctgcttcattcaaaattgttgggcctgccttcaggaagctcccatctggggtgtctcaagggcagggctgttaggaaggttcacagcctttcccctcttgaggcagtatcagtggtatgtatacactccaggttgtcccagggaatggggcagtcttttctgtttgtttggtttttttggggggtttgttgttgttgttgttgttgttgttgttgtttgagatggagactcacctattgcccaggctggagtgcagtggcatgatctcagctcattgcagcctttgccccccgggttcaagtgattctcctgcctcagcctcctgactagctggaattacaggcgcgtgccaccatgcctggctaattttttctttcttttttttttgtatttttagtagagacggggtttcaccatgttggccaggctggtctcgaactcttggcctcaagtgatctgcccgccttggcctcccaaagtgctgggattataggcgtgagccaccatgcctggccccttaccattccttgttattggtggtggacacctctgacttcctggtggtgaggtggcacagagggcattgactgcatcctgtaatgccttgcgccttgggatcaatcattccccaccttggagacacaggtgcagtccccaccttggagacacagaccttggagaggccagctctgaccatttccttctgtctgtcacataacctagatgactaagaagatcaagaagctggagaaagaaaccaccatgtaccggtcccggtgggagagcagcaacaaggccctgcttgagatggctgaggaggtgggctgtctgtgatctgcagccagggtgggggtgtgcacttagcrcatatcaggccctttcctgtatgttctacccatcagtgacacagctagcatgaggtagaggtgagatttgcacacaatgtccaagtccaaagttaatgctgttctctccccatgggaggtggtgagcccagtggtaggtctccagtgggagtgaagggagcaaatggaagaaaggaataaaagagcagaaaaaaacgggtgccagtgatgtgcctggtttacatgtaaagcagcccaggtagtttgtgatttcacagcttgtaatgtagaagaaaggaactaacgatggagcagcaactgcaagccagaccttgctgaaagtttttgggttttttttgtcttttttgctgctgaatgtttttaggtacgttgttcattgaaccttctcttgagctctgaggatggtattagtagtcctgttttatagatgagacaggctcaaaagtcaagtcctttgccaaggtcacgtggtagataaatggaggaatacgttatctccaagccgtgccccttttctgcaccatgctgccccacctgacagcctagtcatggcttcaactaggactgtttcctagagggggccagctttggactcggtctgctctcagccttgttaaagtgtttgccgccaagtggtgatggtaagtgggaggttgatggggcayggcactgaaggtctcatttctttccctagaaaacagtccgggataaagaactggagggcctgcaggtaaaaatccaacggctggagaagctgtgccgggcactgcagacagagcgcaatgacctgaacaagagggtacaggacctgagtgctggtggccagggctccctcactgacagtggccctgagaggaggccagaggggcctggggctcaagcacccagstcccccagggtcacagaagcgccttgctacccaggagcaccgagcacagaagcatcaggccagactgggcctcaagagcccacctccgccagggcctagagagcctggtgttgggtcatgctgggaagggagcggcagcccagccaggcctggcccataaaaggctcccatgctgagcagcccattgctgaagccaggatgttctgacctggctggcatctggcacttgcaattttggattttgtgggtcagttttacgtacatagggcattttgcaaggccttgcaaatgcatttatacctgtaagtgtacagtgggcttgcattggggatgggggtgtgtacagatgaagtcagtggcttgtctgtgagctgaagagtcttgagaggggctgtcatctgtagctgccatcacagtgagttggcagaagtgacttgagcatttctctgtctgatttgaggctcagacccctccctgcccttcagagctcaagacaagtaatacacccaggtcttgactgcatttgtcttgtgagcagggcttgcttggtcagctcaggccctcctagctgctctggaggctcctttgattctctagacctggaaaaggtgtccctaggcagagccctggcagggcgctcagagctggggatttcctgcctggaacaagggacctggagaatgtttttgcgtgggatgatgtgctggtcaggagccccttgggcatcgcttcccctgccctttggtagtgccaggaccaggccaatgatgcttctcagtagccttatcattcacaggtgcctctctagcctgcacaaatgattgacaagagatcacccaaaggattatttctgaaggtgtttttttctttatttctttttctttttttttttttttctttttcttttttttttgcacatgacagtgtttgtattgaggaccttccaaggaaragggatgctgtagcagtggtgcctgggtgcctggcctccagtgtcccacctccttcaccaccccacttggctcctttgccatcttgatgctgaggtttcctgtttggtgagatcaggttgtttgtggtaaaagaaaggaaagggcttctgatggctttgccacaagcttacctgtgggtttcagtcctgagaggccaccaccagttcccatcagcactgtctccatgcagcagttgctgggtcccatgtccagctgcctctttggcttcatgggtttttctgcttcctgcccccacccccacatgtgcaatcctcaagatttgtcctgattctatttcctggcacctccctgcctgtccttggggattctacttcttcctgtgtgggagcccatagctgttgtctaacaggtaagaaatgaaattgaactattgactgggccccagaaatccataaaatggctgcagacagttgtttctgtgtcctgttctacccccactccagtacataactactatgtactgtgtagagccattctatatgctgaatgttctgctgttgcaaacttgccagggtattagccagtgtttgtgccaagcagttttctgggacaacagaatgactcagaccaagatggataggatggttagggctttgcttcttgctgtttttctttgaagctagttcattgtcctgcaggtmccttcatcttccatacctagcccactcttttagcccttaccttaaatctctcagataagttggttcacaaagaatgttaagtactgaatcatgtgtgactgagaccagagatggcaaatgaatggcacaccatttctccttctcctgccccagggcaggtaccactgatctgcatcagagttgcctgctattctctggtgtatccttcacatctaggtgccctcaagcagctgtgtgagtgttgagatctctgccatctctggctgagatactgctgtcctgtgaagtgtttcccatgacctttttcttcccctttgaatccctctgtctggagtagtccttgcctcttcctgctccagtagggccttttccctaccccagcccctgtgccaggctaagctggtacaagagctgccaacctcacagagtgtttgctaggcgagagaggtgcagggaagaggcagaggtatgcaccttcccccttgaagagaggggaaaggcctacagtggcccacataattgcctgactcacacttcagctacctcttaatgcctgtggaggractggagctgctggatcccagtgtggtggtgtaggaggccacagtgagcaggtggccccagctgggtttcccaggtcaggaatrtgggccccaggcaaggtgcagcctttgctcacagctccatccatgtctagaccttcaggccagtctgcagatgaggttccctacctttttcttctcttcattgaccaaatcaaccaatcactacagctgctctgcttctgctttccaaagtagcccaggtcctgggccagatgcaggggaggtgcctatccatgagtgaaggccagtgtcttcctcacctgggtgggtcccacacttgtgacctcagttttaggaccaagatctgtgttggtttcttagattgctagcttttcctccaggggaccacagcaggtgaagctcaagagcgcatggctctgctaatagtaaattgttttcagggccttgtccagctgagagcttcatgtccaccagattctgagaggtgtcagcagcactttttttttttatttgttgtttgttttccatgaggttatyggaccatgggctgagctcaggcactttctgtaggagactgttatttctgtaaagatggttatttaaccctcctccaccccatcacggtggccctgagggctgacccggaggccagtggagctgccwggtgtccacgggggagggccaaggcctgctgagctgattctccagctgctgccccakcctttccgccttgcacagcacagaggtggtcaccccagggacagccaggcacctgctcctcttgcccttcctgggggaagggagckgccttctgtccctgtaactgctttccttatggcccagcccggccactcagacttgtttgaagctgcactggcagcttttttgtctcctttgggtattcacaacagccagggacttgattttgatgtattttaaaccacattaaataaagagtctgttgccttacttgtttctctcctgacctgtgtattcctttgtttctggatctgatccattcagccccttccatcatcactgacttgttcaggtctgctgcagagcgcccatggtggttccctggtatcttacatattccacagtgtctttgagcagtcgccacagcctcaggatgctggcatattcacttgagctgcctgagtggagcccttggcaaagttggcaagacccttgcctcagagaggatcacacacacacaaaaaagttttccctgacctgggggctcacaggctagtgaagggaaaaggtacttttagctatagacaggtcaatggtgctgagagcagagaggaggcccctgcccccttcagcaaggtgagggggtgatacctggaatggccttctgaaccacagggcaggtagaagatgaacgtcatttagtgattaaatggtacagctgggaagcaggtccatgggactgggagagggggtgaggctgggcccagagtctgggtaccaggttaaggaatgtgggctagatccagagggcagggggggcaactgaaggtgtttcaataggaaattgataggctccagcagtaaggcaaaaggcatggagccaggcataggccatttgaggcccaggttaagaggggtggacactcatcactgctatttgggtctgagctgtgggtaggctcctatagccctggcctgcccaagggaattcacaggggcctctaattgtatgcattccttaaggagagcacattctctgttcagtttttacaccccccatttacccacctcaagcatgggactcctatatgggagacatgctgctggtggcctcacccagcaccctgttctctctgggtcctgggttggtcaggcacaaaggatgatatgtgctgaatgcccaggaaatggcagagacaacccacctgcccttccctccaggcctccacaaatagatgtgcccacaatgactgtgacagtcccagcagagcctctgacccttctagctgggtcctgatacatgttttccatgctggccatgttatttctagtcgcagatcctctggagggtgtggggggggtgccgccccaactcttggagattccaagcaaagcagctctgagaataatgaggtttctgaccccccagtgaagcagctgaggatgggaaccacaggggtgctccctctgtcagcagcattaccactgtctactctagcagctccggtggggaaggagagggatttctgttgtccccagtctgggcccctggttattgaaaaagttcggaattactctttacccttgtggagtgttctgagtgttggaagtacccaggaagaagccctgagcaggtgccctcaggagcagtgcccatggctccccacatcagccaagaggcccaaccccagraagccactcctgcccggggatggggaaggtgggctgggtggctgtgtgcactgccctgggccagctcacttgagcctgctgagccgcctggccaaacatgagcctctctcctgttgtatcagatgctgttctggggacctgcgccaggagcctctgccagggctttaaatagctgcccccattgatctggctgcaggcagcagcagtcacactgggtcagcctccatcaggtgctcaggtttccctgaggactggagtcaggtgccagggaatcgcgtggtctaccttatgacctggtgctccccacacctgtctcctaggcctggggggtggggaggactcctgtcacttcatctgcggcaaaatacagcccccaccacttaccagagaaaactgtctggcattgtagagagaggggttttgccctcaaaagactgttgcttactttcagtagaatggggaatgacactggtatcttccttaagggttgttatggggatgaaatgtatgtaaagtgctcaatagggcactggactcactccattgatggctgtctttgctcgaagtgtcttcctgatgctgctgctgttgctgcttgtgcttcttctgtgcttacattctctctctctcactcactcactctgtctctcctctcccccgccccaccccctttctgacaaagccaccaccattttgtaaggaactgtagcttctctctgaaactgccgggaaagggaaaatctttttaaaatagacatcacacaaccaacagggtcccctaggttcaggcggggaggtgaggtcgagtgagaggaactgcttagcatacgcggggatgctcctcccatctcaccccaccgcgctaaggagaaggtcactttctctttaaatgcaaatgaactccctccagcttagctttcacccggtggtgttcccgggaggagagggcggagggcggagggaacttgcaccgaagcatcactcgagaccccaaacctccaggtcagtagccccctgagggagtgagggcgggggcggaatgacgcgggtctgacgctctgtcttcgagcgcggctgcggagctgagcgatgagtttggcacatggctttggagcccgggcttgggaaatagatccccggtcgccccagccgctcctggggagcacaggctccggctccagttcttctatcaggtccctaattgggtcaagctgctgcacggagaggcagaggatgcgctcctatctcccctccccacacccgcagaccccgtcagtggcagccagctatgtgtcagtgtaaatgcttaagcgccacccacccccccaacccccccagtcccagaattcgaagttaggctcggtagcagcagcctggaatgagacccccagaggagggaaccccagccgaccggaggcttggggggcgctgctggaccggggacctcggagcagcccagccacaggcgcagcctttgtcggaggcccaggcagccagcggccaaccacccagtccaccctggctgcagctgaagcccagcagggactttccgactgggaaaaatgaagcagctgaaagcacacccgcgggacctatagggagtccctaatattttcggttgggggtgggtggaagtggagggatgccggtgtctatgtgggggaaacccacaatgaaccctgccctgtatgctgcggcttctcctacaattacccacacgctggggctttcccaggcgcccctacctgcaccttgtccccctcccatgctgacagggtttgttagcatctgcttaggcccctgataaatagaatagggtttagttaagacatccctaatcttcggctgggcttctgcagctcacctccgtcttgtctcccactacatttcctctgccagccccgccccccagccaccgtgacaggaagccccagtagcgccaagatagttgtgactggtcccaccctttcaggaggggcmtargttttcaggcagaaggggaattaggttgggccttakaaggtccttcaagtgtacatccacgatcccagcagcagacactggcatctggctctgcccctaccgtatagatgaggtgacaagctggaaggtcccagggcccttccttggtgcagctctcagggatttctgggtgaagggctaactttgcccctggctatctttgtggggttgcttccctcctaggcctgaggcccagccagcgcccaatggatgacaaaaagaagaaacggagtcccaagccctgcctggcccagccagcccaggccccaggcacactayggagggtccctgtgcctaccagccacagcggctccttggccctaggacttcctcatctgccatcccccaagcagcgggccaagttcaagaggtgggtacagaagggaaggaaaggaggagggaccccaactctgggttgcactgtagagaggaaggcaaggggggcctccgcctttagttcctaagcaataattgatgcctttctggagcagacccctgagaactcagagctcactcagacccagtccctaccctcaactgtgtggcaaaaaggccaggtgggtcactgggatcacatagcgtgaggattcgcctcagaggagggagtgagcaactctgcaagaaagtgaatgttccacgctgagaggcttacctggtataaatatggaagaaagctattacctgaaaggtttcaggaaccacaggtggtttgggggccctggagtatcagggaacaggaaatggtgaggaaatacctgggggcacaatttgaattctctgttgaattttttttatgattgggagtttgcatgctgccttataatgtgtccatgtttgttccccactaaatacaatgtattctttctccagttgctccagataagaccactgtgtttccccctggttttgcacaccacttgcctaaggggcatgaagctcaaggctgtggggagagtagcaggaaaggcaactgggaaggcaggagggccaggctggcaggggcattcaattttatcctgagagcagtggaaattttaagacagtttttttggtttattggtttggctttgttttctatgtatttttgtttttgtttaraagagtttttaaatagaagagggttggctgggcatggtggctcagcctataatcccagcacttggggacgctgaggcaggcagatcacctgaggtcagaagtttgagaccagcttggtcaacatggtgaaacctcatctctgttaaaaatacaaaagttagccaggcgtgatggtgggtgcctataatcccagcaacttgggaggctgaggcacaagaatcacttgaacctggaaggcagaggttgcagtgaaccgagattgtgccactgcactccagcctgtgtgacagtgagactctgtctcaaacaaaaaaaaaawtttttttttaattaaaaaaaaagaagagggctaggggcagtggctcaggcctgtaatcctagcactgtggaaggccaagacaggcagatgacctgaggtcaggagttcaagaccagcctggccaacacggtgaaaccccaactctactaaaagtaaaaaaaattagcagggcatagtggcaggcgcccataatgccagcaacttgggaggctgaggcaagagaatcacttgaacccaggaggcgaggttgcagtgagccgagatcacaccactgcactccagcctgggcaacagagcgagactctgtctcaaaaaacaaaaaaaaagaagaggggcagaaagatattttgggaggaggtaagacagccctggtggcaataagggagtagctgtctctatatacgctgaagactagggaggataagtgactcattcagggtcataaaacaaatgagtgaggcactcagacaggaacccagggaccccctttcaggcactgctctggctgtgttattagcagaaaagacttmtttttgacctcttcacgcctcctcaccccttcccagtgcccaaggggaaccataaagttacccatttatgctagtaagtagatgggcagatgagttagtgcagatagacagataaactggtgcataggcagatggcacaaaagatcrggaggtgcctgactgccccctaccctgtgatcatggtcatgtccaccccacccagagtaggcaaagagaagtgccgcccagtcctggctggaggtggaagcggctctgcaggcacgcccctgcagcactccttcctgaccgaggtgactgatgtctatgagatggaggggggactcctgaacctgctcaatgatttccactctggccggctgcaggccttcggtgagtcctgggggctggtttcagcgggtgtgtggatagggctgtagggcccagtccatggggcatggctgggaccatggttccagggttccagggttccaggactctttcccagggttcagacaggggyttcgttccagggaaggaatgctcctttgagcagctggagcacgttcgggagatgcaggagaagctagcccggctgcacttcagcctggatgtgtgtggggaggaggagg

SEQ ID NO: 1620 - DNA, 33732 bp, Homo sapiens
gataaccaagagtggttcttagaaaggggaggggtgttggtttaaaagtaaaataaaaattgtatggaattataagttcataggtataagccagatgctccctatgtctttcagctctcctttcttcaatgtctgcacatggtagctcaagtgaagagctttcgtagtggcaagctgagcactgcacatacacacctccccaccacaaacctgcacctgctctggaccagccacggctcgctccatgccatgtcctggttcctgtggctctgcccattatgccttgatgtttattggacatcactccaccccactcagtcacccaaagagctacttacctaatgctgaccaaacyggatttagtgacaaccctggggcaaaatatagaatgagagccctggaaattgagagctaaataccactttccyagagcttaagaaaagacagctagagcgagcaagagagaagccactggctctagcgccatcataaatgggggcacatccaggtcctcctccgtgtttctaagtcctccttggttcaagagttttcttctccatgtcctcttgacagcaccgtcccattccttgggtgttctccctacttatttaaaaagatgtctgtattagtttgctagggctgccatttaaaaatgaccacagactgagtaaaacaacagaaatttattgtctcacagttctggaggctggaagtgtgagctcaggtgttggcagggttgatttcttctgagacccctcatcctggcttgcagatggtgtcttctccctgcgttttcacatggtctttcctctgtacatgtctgtgtcctcatctcctcttaacaaggataccagtcgtattggatgagggtccaccctaacaacctcattttaccttaattatctctttaaagaccttgtctccaaatatattcacactctaaagtactggggaattagggcttcaatacataaattggtggaggggagtgcagttcagctcatcacagtgacttactcaacctagactgtgcccaaaagttcatgtctttttcaatcaagatatacaaagatgtttttctgaataaaaaccctgcaaacttatgagatgaatgttgcctttccccataaaacttagaggtaagacagatatgttatcttcaaaacattaatcctcccaaaattgtaagcatcccttctaatttgattttaatttgattctagatgtaggcaaaacacactyccgtaaacattaagcagtaaaaaagcacaatgcattttaaaggactgggttttcacactggatagaggtggcatggaatcccagcccatcatcaccacagggactttgagcgcgttgcttagccaggttgagctgccttcttttctcctgtcaactgggtattgttaaggtaagaagcttctcatctcaaccaggcttccagttaaggtgaagaaaataaaagctcactctcctcctcttctcccactaataagaaaaaaattccggccggtcgcggtggctcacgcctgtmatcccagcactttggggggccgaggtgggcggatcacgaggtcaggagatagagaccatcctggctaacacggtgaaaccccgtctctastaaaatatacaaaaaaatasccgggcgtggcggcgggcgcctgtggtcccagctaccggggaggctgaggcaggagaatggcgggaacccgggaggcggagcttgcagtgatcgcgycactgcactccagcctgggggacagggcgagactccgtctcaaaaaaaaaaaaaaaaaaaaaaaaaagaacaaaaactcctggacataaaacagaaagcaacccacagaaggctctgaaatgtggagattagaagktgtagcggctrgggrcctcagaattccagggaagaggaaggatgctgtttacttttgcatcctaaacascctggccctccaacctaggaccaccaaggagcacaaagacaaaaagctccaagaaaatgttgttctaggtagacagccgactgggaggagggaggcgctgcagattgatctcttttaactgtaaccactcctctaacagttaaggagcgccgcttcctcacaggagcagctgggccgatgcccctccccacctgagtcctccaccaaggggcgtggggggctgggcccagtcaaccagcctttcccagaattaggcaaagaatagaaggaggtggtgccccgccccccgccaccccaccagatactgatcccaagggggctgaggggtgggaccttgtccagccaccaagctctacactaagccccccagkaaagggggcaggctccaccctttcctaaacagcacttcctgtagcccaggagattgtggggtccaaccctggcccctggccccaggggcaccaagagaaagccagcaaagtgatggggacccgcctgggcagagyctgacagccagccctgcccagccctgagcaaaagttgcaaagagagggtttccccacaaagcccctcctacaggagctgccgcctgcagcccgtgaattggaggtctcaggaggacaactagcctctcccagcagagcaaatgccccacagagagggtaccttcccctaccgcgccctgcccccggggagcctagtgaggacccctgrccagttttaagaaaaaggccacactggcgtggggcccctccccttcttactgtgggagaggtctctccgttggccacgcccatttctggtaaacgtcacaaagaagtgtgcccctcctcctccctagaagcctgtggggccgagaygcccggacctgcccggcccgaactaggcaaagtccagcgaataggtgaagaggtggtgcctcctcctctcacagggctctgcccctaggagtccaggaaacgggggygtcttgtccgctgatggttcccgctaataggcaaacaccakgaacgtgcagcccctcccctccgcytcgcgctctttckgggaggagcctgggggggagggtcctgcccackggccccgccctgcactaggcrgaagcccccaaagtatcagcgccgcttcktggagcctggcgactgctttgggaagtcctgctggcaggcactstgcccctgggggtgtgcaaagagttgtccagttaccttgatcttctcacagcctcctccccagggcaccrggagagaccaggattggaggacggtaaagaacacacttcccagaggattcttggaggtagagtcaacaggaaggggtggtgagacctgcacagacctgctctgtcccctgggcctggtgacagatgacctggatgttgggtgcagctgggcagggactgcaattctgtgtgtccctttttctgggagccacaggaaacccatgccctaatccacatcagactaccacttgtccttatcctccaaacgcagcaaaatattacacaaggtccagggcaaggcaggatggccacctcgctcactcatcacagctgtcctctgacctgagcagggccgttctgtctcagacctggagaccccgcactcagggcgttcaggaactccccgacccaccaggagcctctcctggtgtctcccagggattgtcaatagttccattttccttgaagaacttgttttcaggtatgcacttctctaaacacgtawgcattattttttctattttaaatttaaccaygttgttttatttttaatcacatctacaytttgtaaatttggaaacggrgtgattttccatgttcagtaatgatagcaagcttccttttaaaatacgttttactttttatcttcttttttttttttttttgagatggggtctccctgtgtcgcccaggttggagtgcggtggccgatctcggctcactgtaacctccgcctcccgggttcaagtgattctcctgcctcagcctcctaagtagcaggactacaggcacacgccatcacgcctggctgatttgtgtatttttagtagagacagggtgtcaccacgttggccaggatggtctcgatctcctgayctcatgatccacccgcctcggcctcccaaagtgctgggattacaggcatgagccaccgcactgggcctaaaatatgttttttaaggaaacaaacaaaaagcaagtcagtgtgatgaggtggtaaatataggacaaaaaatcatgaaggtgtttctcaaatgagaaaattagaaaaaaactgtatctcacctttccccctaccttacacatgggcgagtggcaaatgtttattgaacaattgcacatgtaagcaccctgccaggtcgtctttacatccccaaccacgttacaaggtggatgtgatgatccctgttggtgaggacacgggagctcagggaagccagcccaaggctacagagccagcattgcacagtcagatatcagtgagggagaaggaaaagaaaaatcatttgggaaaaagtcagactgcagaagcagtcggcctgaatagtcacagcaacaggcagaaataaaacaacctgggaaaacactcaggctgtacctggacagataaacaagcaatgtccagcccagaatctctttgttctttgtaattagtgagctcccaggaaaaatttcctccccttttcaggcatatacatgatgagaacttgcacargggggagggagcttacctaaaacaaacccacagttatacaaacaagagaagctgtactttgtgcttgcctagagacatacccacggccgcataagagaaggggagttgcacagacacctttactgataagaaaagttacccaaataattacagggaggagagcagtttcttgtaaaaagcttttgaggctgggtgcagtggctcatgcctgtaatcccagcacttcgggaggccaaggcggacagatcacctgaggtcaggagttcaagaccagcctggccaacatcgtgaaacccagtctctactaaaaatacaaaaattagccgggtgtggtggcacgtacctgtaatcccaactactcgggaggctgagggaggagattggcttgaaccggggagatgaaggtggcagtgagccgagatgacgccactgcactctagcctgggagacagagcaagactccatgtcaaaaaaaaaaaaaaaaaaaaagcttttgaattcagctgtaaactggcagtccacttgcactcccctctccactgcagagagttttcttctttcacttattaaatttttgctccaaccccaagtttgtgtccaagttccttaattttcttggatttaggacacagaacccaggatactagttyagacaatgaggaactgctaggttaaggtgcattggtgagactgcaacatcaggacctgggttttcctgaaggttggagggagagaaaagccagttccctggcttartctctgtggttggccaccacccacttaagtttcaagccacataggatcaaatccacagagacgacgttcaggaatagaagcctgagctcaaccacagcagtgtggtgataggaatgagagagtggggagatgccacaatatccagttatatgtagaaaaaggctattgtgtcagcagatkttataraaagggctggaatgaacaggctgccacacactgtctctgcaggaacaagattcgcaaggatacaaacaaatgcatttataggaactcactaggcaacagcaataccattgcattgataggtgtgcagacatgtttgtgcagggagtagagagagaagatgggtagccaaggagagagagagaacagcaaatcccagtgtttctttcagcacaacctctcaggaactcataattaatgcattaattctcacacccctgtttctggacttttgtgtgtttcctcacacttcctttgatctcattttccaaaggataaatgaagtctaatggagataaagcactgacatttacagagggttagagactaatgatattaatgacattcttgtggtttgtccaacattatttttgtgcagatttcaattcatgctgcactcatcctgggggcaaaagttaaaggttttctaaaaagctamttagtgaatgtcttagttaatggaaaagaaaataagtcaatccttttttttctaaccttgaagttgcaaagattgacaatgaactctgtaatggtgcattctcctcttgtgtggtttttgaaagctgagttatccttcctgtaatgattctgcacctgcaaactatacgtacgtgtctcattttgtttcataataagaaatcataaacaaacccgaaatagcttagaaataaatgtaagcaattcatgactagaaataaataacatctctcacatttcttccctagaataaatatcrttgtttacccaaggatgccaactatttgcatggtggtgtttagtcaaattcatttgtttaatacatgtatattgggctagtgtctggagacacagtgggctacaagggaagggtctcttccattttaaccgaatatcaacgttagagacaaatattaggtcagatatttgtcttctgtaaagtggcagcacagagtcaaatctatgtttccctagaacagkgagtacctcctaaaattgaatccatcatcaacatttaaatatcagaatattgcatgtaaaaatagtgtttccttcttccctttgaaacaaagattaattcacactgggcctatattactgcatgaaaacagctgactgcaagtgctgtggtttggatgttccccccaccsccvcccccccggccccaacaacctcatgttgaaatttgatccccagggttggagatggagcctgttggtgtttaggtcctgggagcatgatgtggtttggctstgtccccacccaaatctgatcttgaatactagctcccataattcccacatgttgtgggaggggcctggtgggagataactgaatcatgggcgtggtttcgcccatactgttcttgtggtagtgaataagtctcacgagatctgatggttttacaaaggggaaccccattcacttggctcgcattctctctygyctgccaccatgtaagatgtgacttttgccttccaccatgattgtgaggcctccccagccacgtggaactgtgagtccattaaacctctttttctttataaattacccagtcttgggaatgtcttcatcaacagtgtgaaaatggacgaatacagggcatatctctcatgaatagatgaatgtcctccctgggtggtggtgagtgagttctcactctcttactttccgggagagtctgccttcctcagtttctctctcttgtcatgtggtctctgyacacaccagctccccttcaacttcccccatgaatagaagcagcctgaggccctttccagatgcaaatgcccaagctttaaccttccagtcatcrgaattgtgggccaaataaacctttttatcctttataaactacccagcctcaggcattcctttatagcaacactaaactaagagcaagtgagcgccagccattcttttcagttgggccacacgactttcagttcactaccatccctaactgactgcttctttcactaaattcacttttcaaactaatattatatttagatagcaatttctgaaaaaaattgattgcacaaatttgtttaattatatcagcaatccgcattgcaaaggaaaaattaaagaacatgctacatggggtggagagatcttccctagtctcaggtcccagcccctgagacttctccaaaatcaggctgcaggattcagcactgatagggccagccaggtaaagcttctgacccgcactgagctttacagattgaagtcatttcaagctccattaaatagctattcatgtttgcctgataatgtgcatattattctggctaaatacatctgttaccaggagctggtctgcttcaaaaattcttggccagagaaagggccaagacaacatcttctagttattaggaagattatttaagctgttgaaaaatggttttgtggctaagaatcatataaatcccgatattttaacttgaagcaaggtgctgagctattacagtattcaattatctaaatgctacaatgctacaaggcaaatgttcccaggtctgacatattaatctacttgacatttaacaaattacactgtgtttttatagagtgacagctatttgagaaggccagaacacatgtcacccagcctgtcccctgcctgccctgaccacctccattaacgcacctgttattgatataaaggggacacacttaaatgtttccagaagaaaaagcacctgcagcttttaggaaagatacctcaaggtcagggattgtgcacataaggctaaatctgccatgcctttcatcttgaacgatgaattttggtacaataacakaattacttcatcttcagtaaaattccagcacatagtcacttctcagctaagtaaaccttctctgttaactttcccttatgaaaacaaaggagcaaggacattggtacctatgatccgtctttgccaagccacatatgacaatctcatatgacacatgcaaaaggctctatctcataaccacaatctgttaaacaccttctccatgtaaggcacagcaagaggtattttgaatgtattatcttgttgtcatcataacaaaagtaacaacagctaactttattaagggcttaggatgttcgggcatgtacaacccatggatcattgtgtttaacatttacaacaaccctgcaaggtggctgctcttactattctatttattaacttttactactcatttaccaatgaagaaactgaggctacaagaagttaatttgccccaaacccaaacgtttataaactagaactagggaataaaacattgtaggagcacgggtcagcatcaactgccatgtctaagagccacagtggacatcaacccagcccagccttcagatgaaggcagacttagccaccatcagttaagaaatatctgcaattgagcttgcagtgagacacaatcacgccactgcactccagcttgggtgacagagtgagactctgtctcaaaaaaaaaaaaaaaagaaaaaagaaaaagaaaagaaatatctgcaatcacgtaagactcagactaaagaagaatctgggtggctgagcccagacagcccgcagaaccaagggagacaataaatgatcattttaagccgttacattttgagcagttgaataaactagatactactaatataccagttttacccataaggaaactggggctctggagagttaatttgtctaacatcaaagacttgtcagtgaaagacccgggaaacggtttcaggttcctctgactcaatggcccttattcacacaggtgcaacctacgggccactcttctttgccaaatgtatttgaacattctatgccaaatacatgggatgtgtctccaagaccatcagccactaagcatgcattatatgtaggcatatgataacatacacataagagttttgatatgtggacactttaatccagccttatataatttctaactaggaatttatcacacctgtgttcatgtaaaaaaaatgtaaaatcagcttattaatgataatgttcaatgaagacagcacaaacactatcttccatgaatctccaacccactgcactgattaaaattaatttttaaaacatccatgcatcacagaagttgtaatctgcagagcaggggattatttttcttcgttgggtaaaaatcatgcctctctccagttatcagaaggaacagacggtgcatagcacagtaaaaatgagcacaaaccacagcctgattgccagctccaaatccaagaactgtcactgcctctgtgactttgaacacgtttctttcatttttgagtaatgactttattgakatataattcatgtgtcataaagctctcccccttgaagtatacaattcgatggtttttgttatatgcacagagttgtaaaaccatcaccactaattccagatcattttcataactcccaaaagaaaccctgtacccagtagcagtcactgtccatttctgcagtcccccaagaccctgcaagcactaatctsttttctgtccgtatggatgcggttattctgaagtttacatataagtggaatcatacgatatcattctgtgtctggcttttttcacttagtgtgatgttttcaaagttcattcatattctagcatgcatcagaattttattcctttctatggctaaataatatctcrttgtgtggatgattatccaggccatatgggttgtttgcactttctggctatcgtgaataatgctgctgtaaacatttgtgtacaagttttgtgtgaacacgcttttgattctaccacatgtagtgctgggttgtcgctagtgtaggcatgtttcttactctctgagaacctccatttccttgtctgcaacggggcacaatagcagtgcctccttcatgaggttgttgtgaagattaaatgcattaactctagagaaagcatgttaggacctttttctatgatgctaaacattgtagcattttctccccagcaggtctagcatggcctaagctgtgcctccacttcacacgcttttgtgcctttccccgtcggcacacacaagccacactgactactggaactttccagttatctctagtctctgggctcttttgttattcccttgtcctgaaatatctttttttactgctctattcttggctgaattttctcatcctttacgtctcagactaaagaactaactgcctcctaggtgggcccatctctgagcaccctgagaacaataggcttgtctttcctgttctctgattattttcagtatagccctataagggctgtcatattcatttcacctgttctcccrtttattgtcgacctctccactgcaccagaagcatcagaagttagaatatacgcctttctcactataggccttctagccaaggtgaggacacatatttcatgctcaagaaatatttgtcgaatgagtgaattagtgaattaaaaattttaggtggccgggcacggtggctcacgcccrtaatcccagcactttgggagactgaggcaggcagatcacgaggtcagaagtttgagaccaacctgcccaacatggcgaaaccccgtctctactaaaaatacaaaaaaaaaaaaaattagcctagtgtgatggcgggcacctgtaatcccagctacttgggaggctgagacaggagaatcgcttgaacctgggaggcggaggttgcagtgagccaagatcgtgccactgcactccagcctgggcgacaaaagcaaaactccgtctccaaaaaaaaaaaaaaagaaaaacaaatctagtgactgcatattgcaggatctggccagcagcccgcaatgcaacagggctctctctttgttcccaggcggatcggcaggttgagaaataacagacacacacaagatagtgaaagctgggtcccgggggatcaccgccttctggtcccgcggtgccaacaatgcactggatataccagcatttattattaagtttagtgagggtgggggtaggttagtgagggatttagggtcatttgattatgaggtgagatggtcacatgcggatgaagtaattctttaacataacatttgtatgcagaagtacagtatacagagataagaatttacactatagtgtgtgggtcagtaatttctaacagagccttagaacagaaacacagtctttccataacctaggattagcaagatattaatcagcagtaacaattgcaacaaaagctggttacaaacaatccatggaaacaggacatgaagctagacaaccggttagaccagaaattctcagaagggagtatgccttaaccctgaagaggcctagaagagccgtggcaagatgagggtgtttatagccctatcttatccatatggacaggcaccccccatgcgtccgtttataggctccccacaagggtcgcattccattcccagagctatgaacatctgcttttctgggataggaatcttggtgatgtgaaacctccctgactgcacgtccattcataggctctctgcaaggggaagcacatcacgcgctgttggctcattctggcgtccaacctsgcattgtctttacacaatcctgcatgcaattttgtatttacaataatcaggagcatttcatcttttacataacattccatagcaatagtttcagggggtctccctacaactgcataatattttgttagatataaggtcttaccaattttaacaattattttacatttattatggctttttggtgattctaattttatctattataaatataacaaagtatttcgaatggacctgtgctgagagtcatagaggtccatgcacagacttgggtatcacacaygcactcactttagtgattcacagagaggtggaagaaagggaaaaagtctaagctcatgcagcatgggargkgtgagctatgggctcactgcacccagggacaagctggtcctgggacccacaaactcatgggacctcagagaagtttctggtatacctgtaaggcctattagaaattctgagaaataactgagtcaccctagaatattggctattattattatattaaccttaagccccatgggtctatactaatgctaaattaacattacccaagtagtggcttttctcttttttaatataaatattgcctatatatggaataagctctagaaaagtgaatttcttttytttttttttttttttttgatatggagtcttgctctgtcacccaggctggagtgcagtggtgctatcttggctcactgcaacctccgcctcccaggttcaagaaattctcctgcctcagcctcccaaaataggcactggccaccgcacctggctaatttttgtatttttagtaragatggggtttcaccatgttggccaggactgtctcgaactcctgactttgtgatccacccacctcggcctcccaaagtgctgggattacaggtgtaaaccaccgtgcttttgactagaattcagagtaagaaattcatcttacgttacacaagtacacacaaataattcaagtaacatttcaaaaatctaaatttatcttagtacctgtaataaggtagtaaggtattctaattctctgagctattctattccatcctatcccattacttttttttttttttttgaggtaaggttctgctttgtcacccatgttggagcacagtaacacaatcatagcttactgcaacctcaatctactgggctcaggtgatgcttctgccttagcctcccaagtagctgggactgcaggggtgcaccaccatgcctggctaatatttcaaatttgtttttgtagagacagggtctcactgtgtttcccaggctggtctctaactcctgggctcaagaaatcctcctttcttggcctcctaaagtgctgggattacaagtgtcagccaccatgcccactacattttttttcttttaatgttagtctcagcatttatttcataccacaaacgcatcatgacttgcagcttattaaaacactgccttgaagacagatcccagcctagaagctgtacaagcctttgcataaacatgcctaaaagcagatcttcctagctgagggagcccaggaagagccctcctcactatgtgttggacacacccactacccaaaaaacagactattttcctggcacctttccaaccttgtggattacatagtaaagtctcccttagacacataccacctggggggtgcgtgtggtggctcatgcctgtaataccagcgctttgagaggccaaggctgccagatcacctgaggtcaggagttcaagaccagcctggccaacatggggaaaccctgtctctactaaaaatacaaaaattagccaggcatggtggcaggaacctgtaatcccagctactagggaggctgaggcaggagagtccttgaacccaggaggcggaggttgcagtgarcggagatcatgctactgcactgcagcctggacaacagagcaagactgtgtctcaaaaaaagaaaaagaagaaagagagagagaaagaagaaacaaaaggaaggaaggaaggaggaaggaaggaaggaaggaagaaggamggaaaaaggaaggaaggaggaaggaaaaaggaaggaaggaggaaggaaggaggaaggaagaaggaaaggaaaggaaggaaggaaggaaggaaggaaggaaggaaggaaggaaggaaggaaggaaggaaccacctgggaagctgggcgtctagagccttcaaactgtgcccacctcattaataatactacatacagcaaaagcaagttccaaaattagaaataacacaaagaaacaaaaagatttgtacacaacatttattacaatttataatattaggagaaagaacaaacagtattggccaaagatctgaaccaattttaatgtgatcaataaaaataattcacagatgagctgatgttccccttatccttcaccactcatcagttcgatcacccttccaaaaaaagaatggaggaaaggcacgaaaaccctactgtaagtgcaacatgcctgagttcctatgaagcctgcagttgagacaacaaagcctccctggtctctccaggtggagtacggcactggttcagaggaaactgtagcagcctctctgggggcagttacattgagaagtcccttcctgctggaggttctcagcctgaatctgctattccagtggcttggtgggaagcaggagacaccatgtaaacatatccttaaaaaataggagaggtgaacaaaagacaggcaggaaagacacagatggaggcagtgtgagtgacaaaaactctgaactctttctgttttttaacttctacaaacttttctatatactctgtcccaggtggctgggcaaatacttgagccttgaaatgaaatcttggagtattcagtaactcgcaccagctaaatcaatcatgaattgtgtaataaactttagcctttggcatttcagaatttcaagacttttattgcggcagctgttcttatagtttatcttctaagttatttgtgttttctttataatctgtgtatactttttataaaaggagtaatacatgaacctctgagtcagggaatagagctagaattgtatgttttttgctatatgcaaatgataatttactttgtttcatatttttactttcaaaattatttttaaaaggtagtatttcagatagatgwtatagtgtttaattactgtttaacaaacatcattgctgtgtgagatctcccaggaaacttgtaatcacgcaaacattgtttttgtaaacttttaaaaatcaaatttaccttcatacttgtctagcaattatcaatatgtggcaaaggactcacacagaagatctattaaagaagaactaaatatattgaacaaaattatacaatagaatcagtctttcaacaatatgactactccaaacctcaatattactaaatttattgttttgctaatcttgttccacatatttcaatttttttaaatgagtttctctaaggacttctgtgagcgagaagagtttgtatgtttctttaacattttcatttctcttcttatgttcaaatgctctgaccatttttctttgagttgtctatattgttatttctgaaatatattagttctttagatatgtgaattttaatcatatctggtatatatactatagatataattcctaatttatcaccattattttaactttattgattcattttaatttttaatattcaagtttatgaaaatatttagtaataacttttatacctcattaattactaagtaggaatattcttcctcgtatctaatatatagtctgatataattcttaaaaatatttttgcagtcgcattgtacttagctctgcatttcatcaggagtttatttttctaacgcatggggtagaaacctaaatttttttcctgaagtagcaaagcatcatttattgaactgtcatcggtctattcataccacatttcccactgatttgaatattgtcttaattgtgtgctaaatttatgagtatgtggatctgctgaattctgtgatattgaccagtctatcaagatcaatattggcatgatactgttttaattgctataaatttatagaaatatatgttatgatatgtagcaaatcaaccatccctcactattatttttgtattcttaaagtaatgctggattgcaagaataagtatatctccaaatttcagtgtctgaaacaaacagaagtttgtttctcgtccatgtraccaaggcaaatgctcctggttggcaggtggcttcctccaggcagtaaatctacagcccaggctccctgcatcttatggctccaatcactttggatctcatcgtcgcctgcacattgccatacacagggaaggagaagagatggagaaggcaaagactttctgaaagccgtggctaaaagctggcatgtgtcacatcagctcacattccattggkgagaacatagaatatgtaaggcaaagagaaacccaggaaactatcgcgtgccgttcttagatctctccatccctagctggtctgccttcttctctccacatttctgagtctttcttctttgcttaatttacaatgtccagggtgttttagtgaaagtaatcttctctgtcacactccgcacagcagtttctccatatccttttaatatattcctttttttgtggttagaattgaaataatggttactactaccgaaacccctaaataataagtaccttgatggaagggaaaaatgcaaatgacagacttctagcaaaagttaaaaacaaaaataagaaagaaagaaagaaaaaataggaaagaagaaagaaagaaagataggaaggaaggaaggaaggaaagagagagagaaagaaaggacaaaagaaagaaagagaaagwaaaagaaagaagaaagaagaaaaaagaaagagaaagaaagaaaaaagaaagagaaagaaaggaggaaaggaaggaaggagggaaggaaagaaggaaggaaggagctgtgtatagtggtacaaagaggaaatcccatgttgggatgagaatttgagagtcttaattcactcccttatagaactaaagtcacgagccctcagtggttaaactttgaggaacgtgatatctaattatcaaggtattagcattccaggtctctcttgtarctttaacaactacaaagtacagacacagacatggcccastattgtcatctgagagcaggtggtgcatgagtgtgaactggtaacttgggaagaggagccaagtagaaccgtacatgaaaaggtgtagcatctcctgtaaccatgcacaaggcagaatgtggcagcttcattctctaccaccattctttaccctatttcaacaatttctaaggctggtgkgccygtgaggaaaatataagatctggacagatgggatgaggacatctgggaggagccccaactctctgagattacccctatacctcactccgtgcccccagccacatcagtgaggtgtttcttctcattttcaagcycatttaactaggacatagtttagatatcagggagagttttctaaaccagattaaagatcctctctgcctgttatttccaatctgtgctctgaggacccaggattaattggagagctgggcaggtggcagatctcagaattagtgacgtcacagcaaacccaagaattcacagagcaaagcccaaaataatttttttgcactgcttatcagtagattccaagtgaaatgaaattaacttagttgattaggttttcaagggttttggtgacagaacccaccccctcctccatatttactgatgaagagcccataattttttagcctctgaggatttagcctctgacagggaccaggtgtaggaatcaacaggaaggatgcatgtgtgtgatgtctctaagggtgtattttgaagaagtcaggattggagttccccaaccgctcttcctctttttaaaatgtccaartgcaatggccctgtcagtactggctaagtaaaggaaatttcccttgcaaggtgaagccagattagtgaacgcaacacttctaggaaatatgaacaaatggggtcccacaatctcaatgatcctagtatttatctttctagcctaataaagaataatgtgtaccccagggaaggagaccctagatgcttataaataagccaaatagaaggtgagatcctcttccttcgtgagaccgaatgaacagctcaagattccacagccagccacatattcccaaccacctgcggcaagccagaatagcagcagaatatataatttaggtaaagagagagagaaaaaaagtcaaagagacagagatagagagaattagagctatataaatcaccaagatatttagtataattttttttattggagaggtaatttaaccyttttcccatttagaaaaaaaagaaaagtacagctcactgccagcactcatttaattttacataaacacattctttgaggctgaagccaatctgactgattttcaatgtgaaaatagaatataaaaactgttattgaagctatttctaaacagaactaacatcagaatcgtctgaataatcagaatcgtctatttcagaaaactcggattcatcaaataatattcggccaacaactgttccagagtgatgttaacatcacgtgtagaattgctacattttctgggttttgatattttccgtgatcaagaattactatattttgtaaatggaaataccactactaaaaacggaatgctatgaataaatgatgtcttttttccccaaagttgatataccagagcaatgcgaaaataataaaagccagatattttgtggcacttatctcggggtaaaggctgcagccgcaagcaccaccggcaatcattctttttttttttttttttttttagtagagacggggtttcaccgtgttagccaggatggtcttgatmtcctgacctcgtgatccgcccgcctyggcytcccaaagtgctrggattacaggcgtgagccaccgctcccggcctggcaggcattcttgaggcaaacgggaaatggggtaagttacacaatcgatacagctccgtcatcgtggtttaattacttttccacgtaccatgtttcctgacaggtagaacgatcagcctgggcctccgtttttcattctacaaagaatgaagtgcatgaactgtcctctatagaattgtggaaaaagttgtttttattgagttgtggttatctttgtcttcatggtctaattacggaaataaatgcttttccgagtctccggggatggtctgccctagtccagctctctgcagtgtctttctgggtttttcctcagtgaacgggaggaacattggcagcacttgtggtctgcaccaagaactgaatcgaatttccatgtgttattgaatgttcacaaagaccttgtacagcgagtgttactacctctggtcaatgattcawctcaaggctcagaaaagtcaagtgtcttgtccagggacacttagtcagaagtgaatccaaggtttaagctcaagtctgcctaactctgaatttcacagccttttgctacatatggcgaataatatatccctgagcactaaaggcagactccaaggatcttgtctctgcaatcatcattctggccataatttatgaaaagcaacccaaagtatgtgatgtaataaaaagtactatctatgagtttacccttccaaaaattgaactgaattctgagctctaaatttggaatcaaaagaacttttctctgcactaatcatttggaacatcacttaaagaaaacaacgaaaaactggtgtcccctgagagaaagcaatacaaaacattatgcataaagaaatccttccaaaaaataaaccaaatccagtcaaatctctagttttgactcctagcttaccggaaatacgtgatgggaaaaaaatgaaatgacaccactatgattcaatcagccaaatccagcatatgcaaatttctaccagataaatggtttagtttcttccccaaacaaatggcacaaggaaacggaggtaagaatgggatgctgttatagatttwaaaagatttaagaaagtataaactaaatacactatgtgcatcctctckgaacgtgcttcaaacatatcaaggggtcaatgagcagttttgaaacaataagggaatttgaacactgaatggttgtcagaagatastaagagatcattattaattttactagacataatgatgttctgattttgttttttttwwwaaaaaaaacagtgttatttcctttatagatacatcatatagtattaactaatgaaatgctttgatatctggaacgtttaaaaaatattcccgatggagtaagtgcaaagaaacaggtaagcaaaatgctgataattgctgaaacacaggatgtgtacctggggcttcatttactatctcttcattttctattttgatatttgttggacattctcataaaaaggaaagttatgttttattttctcataagctagtaatgaaatagccctamgtaactgatattgtagagacaagaataggtgtaatagagcttaaggttttcatttaaaaaactatctgtagacttcaatggatcttaggtggcatccatgcaataacactcgtggaacatgcaggacaggtgtggagctccatcttcacacagtgacattttttatgcttctgttttccctaagagtggagtgagaggatgattattttatatcatggactycttccctgctatactttttttaattattttactttcacttctgggatacatgtgctgagcatgcaggcttgtttacataggtatacatctgccatggtggtttgctgcacctatcaacccatcatacaggttttaagccctgcatgcattaggtattcrccctaatgctctccctcgcctttccccccaccccctgatagcccccagtgagtcatattcccctccctgtgtccatgtgttctcattgttcaactcccatttatgagtgagaatatgtggtgtttagttttctgttcctgtgttagtttgctgagaatgatgttttccagcttcatccatgtccctgaaaaggacatgagctcattcttttttatggctgcatagtattccacggtgttatatgtgccacattttcttaatccagtctgtcattgatggacatttgggttgtttccaagtctttgctattgtaaatagtgctgcaataaacataygtgtgcatgtgtctttgtagtagaatgatttataatcctttgggtatatgcccagtaatgggactgatgggtcaaatggtatttctggttctagatccttgaggaattgccacactgtcttccacaatggttgaactaatttatactcccaccaacagggtaaaagcattcctatttctccacatcctctccagcatctgttgtttccaaatgttttaatgattgccattccacctggcgtgagatggtatctcattgtggttttgattttcrtttctctaatgaccagtgatgataagctttttttcatatgtttsttggccacataaatgtcttcttttgacttttatgtggaaacaaatttaactgcacagagaggtgaaaattaattaataacttttaaagtaattccctaagtttctaaggatctatatgtttccatctgactttattttatttaagctcttgattgatgctgcatttggagcaggttcatgaacatgaatagagttaatctgggacagatttccctcatttgattttttcactgtttccatcacagaacttatttcatgctcaccatgtttgcaggcattgagcttggtactggagccacagagctggatcagacagacttgtgcaaatatttcaggttttttttgtgggggggtcatatttatagataaataacagtaaagagtgacrggttcttwtgaaaatgcatacacagtgaagtagagggtgaaaaggagggatgtgttctatgaggaggaagagtgataagaaagtgtaaggggatgtgtctgtgtctagacatatgtgtgttcacgtgtgtgcgtgcttgtgtgtactgcatgtgtatatgtgtggccatgcacctgtgtgcatgttcatgtgtgtgtgtgtatgtgtctgtgttgaggactaaattaattgggcttatggaagcagggagccactgataggtttaattagagactgacatgatatgatagtttaggtggatttctctgggggctgtgttgagggacagtggggaggagagctagaaggaagaaaaggacacatgcatarcagaagcaatatctgtctatgggatggtggaaagaatcagaaaagacttaataaaacatgtgacactttaactgaatcttgaaatagacaagtgttggaggagggagttggaccagatacttcatgcaaagggaagaaaagtgcacaaacaaaatatgagaaacaaggcagacaggcatttttttwaaattttcgcacccactgatrgaccagtgatgcattcacatcgtctgcattcatgatcaacaraagtgctttcctagaacatgaacctcaacccaagtgtcgcctcaagtagtgtatgcatgaactcaagcattaaattagaattgattttttaaaaaactcacacaaacagatgtattatttaaaaatctttaaagcrggtttaaacagttttcaggattaaaagcagccactattagaaagaacaaaaatacatttgacataaatataaggagcctcaatagaacctcctgtacccagtcattgtcamtgccacatccattcattcaccagcccttatatcaatgcttgctgggctcacttaccacgatcagcacgtgcatgtccttayctgaaagcttgccactcaaatgtgctcagtcttacctgtgtggctgggagtgttggggatttaatgtcaagggaaagaatcttccatcaatgaatgatgaaagttagttttcacaacttccggtccccttggccctcatcaaagggctccaggtgaggtttgggctccttgctatcctccgagtttccacgrtagttttaagcaccattgcccgtggtaatggctgacattgatactgcactttttttttatttaagatggagttcccctctgccacccrgactggagtacagtggcgcgatcctggccatygcaacctccgcctcccaggttcaagcgattctcctgcctcagtctctcaagtagctgggatatgggcacctgtcaccatgcccagctaatttttttaaaatttatttttagtagagatggggtttcaccatgttggccaggctggtctcgaactcctgacctcaggtgatccacccacactttttattgtttgcctacactttctagacttgcttcatcagcctactccgtttctggttgatatggtttggttgtgtccccactcaaatcttatctagaagtgtaatccccaagtctcaagggagggacctggtgtgaggtgattggattggggggtggttcccgccatgctgttctcatgatagtgagtgagttctcatgagatctgatggttttataagrcagttttccctattcttgctcactcttctctctctttctgccatgtgaagaaggtccttgcttccccttcaycttctaccatgattgtaagtttcctgaggcctcccctcagccatgcacaactgtgagtcaattaaacctctttcctttataaattactcagtctcaggtcgtatctttatagcagtatgagaatggactaatacactggtctatccttcatccaaattaactacctgcactgcagtccttgtctcaggctctgctttgagggaccccaactgtgacagccgcattagaatgcatcacatactgcagtgaaattctagagtgggtgttgtcaggtggtgatgattgttagatatgtcagtctgttttcaggctgctgataaagacatacctgagactgggtaatttataaaggaaaaggaggtttaatggactcacagttccacatggctagggaggcctcacaatcatggcagaaggtgaaaggcacggcttacagggtggcagcaagagaggaaatgagaaccaagtgaaaaggtttctgcttataaaaccatcagctcttgtgagacttattcattacaatgagaacaatatgggggaaactgcccccatgattcaattatctcccaccagatccctcctacaacacatgagaattgtgggtgctacaattcaagatgagatttgagtggggacaaagtcaaaccatatcattagataggacactggagaaaggcaagaaagaaaagacatctgaagaatgaagggagccaaagaaatgccaacattttgctttttgaagaaaagctaaattaaagtcaaaatggatttatcaatttccttgggttcgtgaatgtacagaactttattaaggtaagtcaaaacttctctttttatacttaacccaactcaaattggcttatgtaggggaaacaagaaatcaaaacccaaaggaacatgccagttcaggaatatacagttagctaagcttcttactgaacaaataaaatcacaaagcatgtatgcagatagaccacaagtgactatagtgaggtagtttatttcagctctatttatctggaattaatgctacaccatctgacatattaagcagttatgcatcaggtatcagtagttacatcttccagtgcctcttacagttgcccctgatggtatatctactcgaaagtatgtaagtgcactcacattcttcaacatttcctcattaaagccagatggaattgggcttcttatacttgctattcattcatttaatattattagagtgtctaccatgtagtaggcattttctgtaaatgctggggatatcttgataacaaagacaaaacctttccccacatagatcttaaattttagtgcgaagagaaagacaatgactattttgaagttacgaaggggatttgctgatttgaatgcctacttaggagattcagaagtggttggatttaggtgcttagattaagtcatcaggaatttccaccttctacccataacagtgagcatctgaaacttacaaaacaatatttcctattttacttcattttattttagagacagggtcttgcctgttgctcagtctggaatgcagtggcacaatcatagctcactgcagcctcaatttcctgggctcaagggatcctcccaaagtgctgggattacaggtataagccaccatgcccggccaagatactctatttttaatttacagtttatatcaagacactgagccaggggaatttgaagtcacccatccagtggtcttagcatctttgctcacacactgaatgacttgatgtaaatgactgaatcagacttgtttgcttatagctgacaccaccgagcaaacatattctctctttctctgggacaacacctgatatggtctggctctgtgtccccacccacatctcatcttaaattgtaatccaaattgtaatccccacatgttgggggagggacctcatgggaagtgattggatcatggtggtggttccccctgtgctattctcgtgaaagtgagtgagttctcatgagatctgatggttttataaggggctcttcccccttcattttgcacttctgtctcctgctgccttgtgaagaaggacatgtttgcttccccttccaccatgattgtaagtttcctgaggcctccccagccatgccaaactgtgagttaattaaacctctttcctttataaattatycagtctcgggtatttctttatagcagcatgaaaatggactaatacagcacctatctcccagtattgtattttcacaatggaagttttaatccagggatgtytaatcttgtggcttcctaggccacactggaagaagaattgtcttgggccacacataaaatacactaacactaatgatagctgagaagctaaagaaaaatcacaaataaatcttacaatgtttcaagaaagtttacgaatttgtattgggctatcctgggctgcgtgcagccatgggctatgggttggacaagcttggtttaatccatagatggagcattctacacagctcccttaaagatgttccagaagtgctgactctgtgtcaggcaccatgttcaccacttagatgttcgtttaatccttacaaaagrgccatggagcatggactgttactgtggcagatgtgttagcctcctgtggttrccataacaaaatactacaaactgcgtggcttaaaacaccaggaatttattctcactgttctaaaagacggaagtccgaaatccaggagtcaacagggctgtgctcctttttgaggctctagggaagaatacttcctcccctcttccagcttctgctggccacaggtgttcctcggcttgtggccacatcactccaattgctgcctccatcccacatagccttcttccctatgtgtgtgttctcacatggtctttgtataaggatatcagttatgggatttagttcctaccataatccatcatgaactctactgcactaattacgtctacaaaggccttattgccaaataaggtcacattctggggtttcaggtgaatataaattttggaaggacactattcaacccagtacaacaagtaaaatttaaaaaggcacccttttaccttggcatgttatctcacttgatttttataacagccctgtagattaaacagataatatgttatattcccacttctagatatcatcacccattatttgagagaatggaaatgaagttcagggctgttaacactcctgccactgaaacatcccaggccagtgaccttttcatgtctgacctaacaggtggtttccaaccacagttacttgtgacatcattccatcactccccatacacattccctgtagatcaacttatctggccctacaattayagttacagggarttttacattcttcatcttccacaggcaactgaatcttctgggacaaaaagcatatgttctcccatagtaataaaatttcccttttttagcctggcatgtgactgccaataataacacttcccagactctcaggtgtccacgtctatccaaagggaaatatagtcagtgataacttccagacatagatgaaacatgccacaccttatagtcactttatggggttcattctctcttcccatagactgtcatgctgtcatcatggctggatctgatacggccaccgtggaccttgaggtgacctcgggaatggagacagtgcatgggagagaatcacattggaaggggcctgggtttctgaagaccctgtaagacagatctccttgcagccctgactgcccacattagggcttttatgttagggtgaagttaccttgcattgtcatataagcaattgctatttgtggtgtcttgcaaataaacctattctgatctagtatgtttcctaaaaaacaaaagtttgaacccagctctttacgtgttacatgttctgaatacaaaaataagacccagtttctgccccctagcaggacccaaaacycctcagtgaaggcatacaccataggaataatctcacaagtactttagccccctacctaatgcaaacctactgttcataactggattttctgagagtggagaccaacccaactgcaccctatttaagactggaaccaacggacagtaaaaacaaagttaaatttgtmtcaaaarcaatacctttattgctgcctctgcagaattgaagaaacatgattggatctgaggtaaaaattgtcttcctgatacttcacacaaaaactcgaactgtgggtccgctcatatggcaaactgagctgtcttttatctggacaagcaccgagagcagaagtctgccaacagaagccacttgtgaccccaacatacagatattaaccctgcctaacaggggaatatgggcaaatgtctgtcatcatcctgccctcccctcaatacacatccctcccctacctgcaaggatgaatgaccataaaggcagttggatgctggcaagtctgtggagaaataggaacgcttttacactgttggtgggaatgtaaattagttcaaccactatggaagacagtatggcaattccccaaagacctagaaccagaaacactatttgacccagcaatcccattactgggtatatacccaaaggaatataaatcattctgttataaagatacatgcaagcatatgttmattgcagcaatattcacaatagcaaagacatggaatcaattcaaatccccatcaatgataaactggataaataaaatgtggtacatatacaccatggaatactatgcagccacgaaaatgaacgagatcatgtcctttgcagggacatggatggagctggaagccattatcctcagcaaaccaacacgggaacagaaaaccaaacactacrtgttctcacttataagtgggagctgaacaatgagaacacatgaacacaaagagaggaacaatacaygtcrgggcctgttgtaggggcagggagagagagagcatcaagataaatagctaatgcatacggggcttgatacctcggtgatgggctgatgggtgcagcaaaccaccatggcacactttcacctgkgtaacaaacctggacgtcctgcacatgtatcctggaacttaaaattaaagtaaatttaatttaatttaatttaaagaaagtttgagtttaaggcaaaaaaaaaaaaaaaagaagaggcagtcgatcccaacactcctgacagggaaaaacttcctattttcctggtccagacagaataagctggagctgctgttggggaggataaagcagaaatgatgtctttaataaagatgaggccaggcaccatggttaacacctgtaatcccatcactttggstggctcaggtgggaggatcacttgaggccaggagtacaagaccaacttaggcaacatatcaagaccctgtctcttacaaaaaataaaackaaaaaagttatccaagtgtggtggtgccggcctgtagtcccagcaacttaggaggctggggcaggcggattgcttgagctcaggagttcaaggctgcagtgagctayggctgcaccactgcactccagcctgggcaacagaactagaccttgtctcttaaaagataacataaaataaaataaaaataaaaaataaagatgagcaaaccatgggacccatgatttgaaatggtgaagtaatgacaagtggaggaaggagtctgaataactacaatgagattgatscatggatgagttcacaaggaatatggtccttgtctgtgtctcctactccccattattattaatattattatatgaattgatgacatgtctcttctcttcctcctcctcattattattttattggtgacaaggtctgtttccatttcttatttaatataataattccctgcaatccaagcaagcaaaatgtacatattttttaaaaaagctaaacagcccagaagtcacacacacatttctttggctggggtgtacatatgctctgggggacaccactctgccatgtgtcctgctgtcagcaacaccaagtgcacttctcagcgccagtccacaccgtgggcatctctctgggcaaagagctgtatctaacacaaaaggggcttccatcagggaaacagatgagcttgttaatgaaggggatgaaaatcggagccrtaatgagttactgtatcataaatgaatgcaaattacattgtcagtgctatttacaatttcacacggcacagagtcttgtaattatgtctattcaattattccattcacagaaatgttcagtaagggcttctcaccatggccaaaacccatttggaagctccggttgtacacggaagttagaactggctctgaaaggattaatcaccacatactcagtaataaaaacatgggtgaagggtctaagatgggtctgtatctgagaaatagacgcttaagagtttagagacagcatatagtgactgtgggctgtgtggtcaccgagttgaagcactgagttgaactctaaatatcaacgtgggtcaggtcagcaaaagcttctgcagaagtaaaacattgcaaataaacygtgacgacaggtttctgcaaggtttaaaaatcccttcaggctgggcgcggtggctcacacctgtaattccagcactttgggaggctgaggcaggtggatcatgaggtcagaagttcaagagcagcctagccatgatggtgaaaccccgtctctactaaaaatacaaaaattagctaggcatggtgaggggcacctgtaatcccagatactcgggaggctgaggcagagaattgcttgaacccaggaggtggaggttgcagtgagccgagatcgcaccactgcactccatcctgggcgactgaacgagaccctgtctcaaaaaaaaaaatcccttcaaaggtagattttttttttcataaaatctgtaagagggctgggtgcagtaactcatgcctaaaatccctgcgactctgggggctgagactggwggatcccttaagcccaggagttcaaggttagcctgggcaacacagtgagacaccttcttttaagaaaataaataaaagtagaaaacaatctgtaaatattttagtttatttctttgaaaaggacgatttttcaaacatgatcacaagaccatatcatgtctaaaatgataaaaaaatttatattatcacaggcctaataagcacttgtttttgcaagtatgtgaacctattttaaatctcttctatacatgtgggattttatattttatattcataaatcattgtatcagcctttcatttcactttgcttcctttaaacccagcaaatcccatatttagaaccaccttcactaaactgtccacagctccttctgattgggcttggtttcctgcaagatgtaagctaaattgctcagcagacagaagaagacgtagtttgtcctaaaagcggagtttagttaccatcctggtggaaaattaaagcattgactgacataagtaaaatctgcttttgctatgttataaataaagcttttggctaccataacgaaggtcagaattgcaactgcacagaggacaatagtaagcaccaggattatcttaatctatagaattttcagggcaatgttggacaactccagatgccatcaggcattttttatgtagaagcacagatgtcacgtgcctgctctacaaaagctccaattctgtcctggcactatagcgcctgtgcttggaaagtcttagcagaatcatgactggacatagcggcttcaatccttcattgatatgagttggggcacaggggagcagcttacttcctgctgggagaggtggttggaaaagagctataaaccgaaacatctccaaaaaccatccttattcttcagccatttggaatcagaatttagactctgttgcttccaaacctgccttctatggtcttgttgccatgcggccacttagtaaacactcgcacatgctggccacccacatccatctctgtttctgaaacaagccaagcccattcctgcctgcgggctgtgccctggagtgtcctgtgcctggagctcctcctcctgttctggctgttttggatctttcctccttacagaacagcaccccatgccttaacctagaggagccttccctttcctcactgtctcaggcagctctgtcacttccattctagtctccctccatcaagccaccttgtttagtacctttatagcattttatcacaacttgaagtggtrtgtttattagttgccttgtgcgttgtctaacccctccattgtatgtggctatcctgaaggcaggaatttgattgtcatggtcaccatggtgccaccagggaccacatcagtgtctggcatgagggaggtgctcatggacaaatggtacatgaacgagtgagtgaagaccctgcactggggtcaaggcagattgatatagtttggctgcgtccccactcaaatctcatcttgaattgtagctcccataattcctacatgttgtgggagggacctagtgggagataattgaattatggggataccttctcccatactgttcttgcggtagtgaataaatcacatgagatctgatggtttcacaacgggaaacccctttcatttggctctcattctctttgcctgccaccatgtaagacgtgccttggttttttccccaccttccactgtgattstgaggcctccccagccatgtggaactgtgagtccattaaacctctttttctttatgaattacccagtctcgggtatgtctttaacagcagtgtgaaaacagactaatgcagcagacctaccttcatcggatccmcyagtacaacccacaccatggggaagttccagaaaatttgtcttcaaggagtcaggtctttgacttaaaatcagtgagaacatggggaaaccttttctctttgatttccaaccaaggacgtgttaaaatagcagcagttttaacataaaagtagggtggactttgaatattaaggtgacccaagagctgagctacgtgaaaagggcgccaagcagtgtcttattcttgccggcactgatgacgtctgccacatcaaaatgcagggattgtgacaatctcagtatgttcgaagtagcaacttgctgcatttgaactctctctctggcctcacacatgtaatattcaggaatatctgtgttcataaggggagcatgatttgtgtcttctggaatccttcttcacgtctgttccaactctgtggtgtctttctgaacaattgtcctcagtccttcaaagactcaactctgccaaactcctaaataatgtccttctggaaacggcacttattcccatcatgatgacagagaaaaataaggggaaaaacaagatccacatggaaataaggccttcatcaaaaatgtgtgatgccctttgattgagtttcataatgacgtttgaattaaaaatgcttgagcatcacacatgtcgtcaatgaagtacatttcttggagaggctgtgttggaaatagatgctcgttatggatctcaaaatgtyttattttgtcagaattggagctggggtcacgtgaaaatcaccacaggcttcctcacgttatcacataggcccacaggtgtgctggtagcatcaatttccctgtaggtccatacagataagttctctccactccatgtgtgtggagatgggtcctcacaaaccacttccccactttatggaggcagttgtgctcaggcactaagctctggggtccagcatcctgtgtcctggcagagctggccctagagcgtggagaccagaagtggcccatgccacttgggcaggagacctgtctgctggtctccatctcactatcctgatgatgcta

SEQ ID NO: 1621 - DNA, 17197 bp, Homo sapiens
cagcaaccctgcattcccttccccagggagcctgtaaagatgggaacaaaattagggcaatatcgtccaaatgaggaaaaagtgcatctgcacaatagtctgatgaatccaggtgctggccctagtgaggtggttaagcttatgccaagtgcttcttaagcagaaacaatatccaaacaatctgtggagcttttattgctggccccgccttccttttattaatatttttagtatactatctagatcccaccttcttaagtctgataggctctatctgttctttttcatatttwaaaaaactcccaaattgtttctgacaaggcacgacatctcagaactacagccctatggggatggggmttaagcaaaatgggtggagttaagaaactcaaaccccaagcttcctcctcactaggggtttggtggttgccatggtggttgagcgccggtaaggaggaaaagaacaaattatggctataaaaaattccataaaatgctgataagacacagaataatccacctagatagaagagagagcaccatcttccacaaggtctgggtagttcacgccacaacagaacatagactagaaacccagaggaagaaccatatcaacttaaaaacaaattcagacaaggaagaatttgtcagacttcacagcccgtaacttccaggccctcaaaattattcgcaccaaatcagagtctcctcactccaaggaagtcaaaaagccgtacaaaacagtcaaggtcaccaagtgatagcccccttccacccacccactacacaacacgattccactaccagttccccctgtagcaccaactccggacaccaaacgctaacagtggttcatttacagtccctctggtgctcctccgatcagtctttcctaccacctaagaattaaaacatcatatgggaatctcattgtttacatcgcagagctgaactaggaaccttagctctaccctcctgccctgaatcaaacttttaatgttaggaaaaaacaatccctgcaccaacaaacaccacacacaacccacccacccaaakaaagcaaaagatttaatgacatrccctgggcattaggaacctgcacacacgggagagtgatccctttacccttctctgggaatcccsgttgccagtcccttaagcgctccgtcaccatggcaaccctacagggcgctagaggtgtccgtgaatcccccctaaaaggctaacagaccgccgctagataccagacccaccaaacgccaaacctgctgttcaacctcactccactccaccgtcaaactagctctgcctgacycggttaagactgggccacggcggcattaatagcgtataaattgacaacctgtattcccctccacgagcagtagccgagccgccaccaccgttccaaaaccgtcgctcaattccctccgcgcgaccgagtcgacagctgcrccgcaasagcrgcgcgccggggccgctcagtactcccaacacggcgccccacacccctgtgccgccgccctgcaacatccccttcccacacgcggctcgcggaaacgtacttattgtggggagtcacgttttgcagcatcttgaccgcaaggaaccggcgctgccctcagccgcggaaagtccgggtggcctcrgttyccctcaccgcccggtccagcataacccgctaagttggggggaggccgttcctcttgggcctccaggcgacaaaccccctgcctggccggcacgaaagcagtctctttggggcctctcggagagctccgggcagcttggcgcgctctgcagacggcggacagcaagaaaatggcggcggcctcagctgaggcgggcaactaaggagggactgactcttcaaaagacggtccccgatctcagacaccgtcgtcaatatagcccgctgttggtctgcagggattccctcttcttgtcgggcycctacggggccgacgaggtcccgtttcgatctcggatggaggcggatgaacacgmaaagtggtttagggagccgccgcctccatctttgaaatcctcttgagggcggagtagagggggtggacagactccgaggattgggcggggcccgaaaaaggggagctccaggggcttctarggggtctgtactgcccgctgggaccagtcataggccgggacgaaggccatttccaagcggatggaggtggattgtaatggcggccccggacgactcgaaggctctgtatcggtaggcagaatcytccagctcgttctagaggctgctccactccagcacgaaatggcgccgccgagccccgcgccagccctttatatataggcggggaggaggagcttcgccgctcatgcgcgccaccctgcttgagmttttccccaccccctccgcgcgcgcgcgctcgctcacgcgggtgaagaagctgagtcgaaggggaaggaacayctctccgcgggagctttttctattggccagccgcarcgatgacgtcataaacttcatttccaaggtgtcagtcaccaggcrgaagagtgccgcagagacccacagggaagtggcaacccgccacatctccaagccaattggctgagctgtggtccgccgactccagggaaagagggtggttggaagaggtgcggaagccatcgccccagagcctccagcactctctccccgcctccccttccaacaaagtcttcccaagcttccatgcacagcccaactggagactgccaagctcgagcaggtcgtgccattcgtagctcctccattggccaaagcagggaaacgggaggggtcgcgtgggcgtagcctgcctgaacccgccaggggtgtggccgcaagacgcctggcgggtggtggttctcggcggtaaggcagcagcagcgaagaatctgaaacgaggaaaaagacgccatcttagaagccgcggcctgctcctctatggcgaacagctacgggcttcagaacggcgatgaggggatctaacgttcccatgccccacagtctaaaacagtgttgccagagtcttataatactccactccctccctcaagccaaacgatggaaagacgagcaaaacattatttactactgtttagtcccaaagaccacaaaagctaaaatacgtctcccaaatttgcacgtccaagcacctttctaatccctccccactcacacctacagttaccaatacatttctgctcgttcgaaaaatcctcggcaaccctaaaagtgggattaaaatctccaaacgcatccatctaccctatacaatgcaacacacctcacctcttcctcaaactccattccggcgtccggctcagagcagaaaaagcaagtcctgggagggatgacttaagggaaaaaccctccccykccaggcgagctcggacctttccccccacacgccacatcacccccaaaggcacacccgtatccgcctctcaggggccctccgccacgggggcgaaagaacccccccssccccccaccagggtccggagtcctccccacggagcggctggtccatcggtcagcgccagggaggagggcgagcggaggaggcggcggctgcggctcagactagccctccccctcctcccctcctcccctccccccggccgtccgcctccgaggaggggcaggagccattttgggagctcagtttcgccccctccccccaacttactcttaagtcttcctcctaacttggttatctaaataagggtgcagactctgtgaatcaaccagagcccagagtcaggatctccagagcatctctggggccgtccccgcccccttacaagagagtgaaaggatctcccccacccgagaaaacctgggctttggtggggcgtcccctcccccgtttcccctttcttcgctaccagggagaaaacaaacttgtgtacgtatctgggaaaaataatcaacgtaggtgaacaaatatacgrtaagattccccctcgcccsggaagggctcgtaagggcctaggtccttgagctgcaaccacgccaccctccctcctctgcagtagcccttcaactccaacctcggttactgygtctaaaatggccgccaatctcctgtcttctgaccccccgagtagggcaaaccccgggagggcgggggaaaatgagcgtcaggagagcagagtccccttcccccagccagggatcaggccctggmccccaaaagtacaagcggccccgtytgggtggctgcagcatggagggcaatgacacagcaacttkgcagaggccttttcccctcccmctagcggcccaacctcccaaatctgcttttctccaccggggctctgcaggccaggacagaggcccatcagggggccggccatggartaaaaacttaggaggctgagaaaatactaggccttaggaaaagggcagccagacattgctctcgtttattccctgcattccggaaaatcactgcctcccgatcctctatcctcccttcccccacatgagtcaccagggaggctactgctactcagtaatttgggaaagtaactctttcctcctttccgttccctcccccgcagtacacaaggagagaactgttcaggactgggggaggggatgarggaggcgatggaagaggccaccctggagaaacccgaaaccttgggagctgtgaaatcattccaggtcccgagcctccctcgcatctcagaccatgctgtctagaccccctactgccagcacccaccttgggcctggtttctgttcctaagcagacctcaagctttcagcttgtaagcaccmcagcctggagtagacacgtgctcagtaaagaccctacaggggcaaaaggccccacaggccgtgtccacgtgaatgcacacaaattcggtaagcgactcgaagcgtaacctccagcctgcggtgtgacgactggagctcccctaccgcggacacaaagggcgcacagcaatgctccctccagaggctctggggagaaaggaagttggcgcctgggaacaacctcagttcacaacatgggtggccaactcctaaagcattcacatccacgggtaggggccacagccaccactcctcagcccaccgccaggtcacccctccctcggccgccgatggatcccttctcacctggctcccggctgctgtacccccaggggacgaatggaatagggggggccacaccgccccctaacccctttgccctccaatgggtacggaggcatgaggctggccattcccctccccccccatggccctctcccgctcgccccccctccacgctcccattggctgtaaaaggtttgaaggacaaatcttcccactctcaggattctttcctgaaccccaagaatcccctcccggactccccaccattggttaagcacttgactgacatctccgccccacaagggccccttctcacctggatcctaaagccttccagggggcctccaaagttgccctcggcttggtacggggtatgtaatccggggtgtcaacccccccccagaaaacgaagccgtgctgggggakggggcgtagcccccagcccctcccttcccgaacgggctgggggggtggggagagcatcggggccgcgcgcgtacgtcagcagcacccagattggctgaccggggtcacgtgcccgcttcccccccaccccccgcctttcccccagccacgaggaccagctttccgaacgttcctgggggtcgcgccaaggggccaagggggccgcatggcccaggcctatgtcccgaaacccagagcgctataacgctgctgcttgtccatatccccagcttcctatcccgcrgtcctsgactctgtcccccccactcgcctctccatacgagttcagcatggctgccgcagaccaggaayacacacagcgcaggcgcaagggtgcgccctgactgggggagggggaaggagggccagaggctgcggggagagccgtagtgcgcaggcgtccggaccggaaccgcatctccsgcggcggggcttggagcgcgcgcwtttcgtggggcgggagcccgcgcccgggtgctgacctcctgcctcagcgccccctcccccactacccgcggcctagcggggtagcctcgggtggccaggcttgtttcctcctcggtgggtgtaaggtgcggcttcgctggtcctggcctgaatccagcggaagcgcacgctgctgagctgtcagcggaggaaaatggggcctggacctggagatatgagggtctggagagaggggccccttccctggtgtcgtgtggtgcgaccactggagagggagtttctcgccctcgtcgcgcctgccgcgcggagagataaggtgcggaccgcagatgtggabttcgtatttggctttagtcttaggcagccttaaaatctctccgtgccgtgaacctacgctagacttttctttagtgagacctgtgagtccctggaccgctctaccttctacgatatttaccagctgataacttttccttctctatttatytcgtagtggaccgtttaaacctcttatactcttaaagttatgatctctcctctcccaagcttgagtgaattccccccaaaattttggaactggtaacataaaatgttatggtgattcagttgccagctaaaaagtaagcctttaatttgtcattagccgataacctctcccttgattacccagagtatggtccagattttcacgctgcagaccctaatctctcctcaccgacagatggcacttcacagaacagaaaggccaatttgcagaactggcttcccatttcccacctgcaaactgggtcaattgtgtattcctttctcatttcactagaggtcctcccttcggtttgaggaaatcctttactattgacctggtcaaccttctctgttacccggaagctgtcttcccttctcccccttttgacctttttaaacttttctcttggtttccccgctgacagaaagataacaaccctctcaatatcgtgccctcttagagactcatgtctctcggcttccttgcacagccaagacctgaaaytgaaattatccttactatctcaattcttkgtcacattctctttccccatccccactcttcaagctacctctgtcaggctgctaccaccaaaacttttctggcagatgtcaccaagaacctcctaactggcaaagtcaggaagcactttacagttctcactttatttgacctctgaggcattcgacatttgatcatgtttccttcctgacattctctctacccttgacttctataccactctcacttgtttcttttcctatttgtgtaactgttcctctccagtctcagtagatttttcttccttagcccctttttatgtgttgatatttgctgtgattcttgtttgcttctaattttgttcaacttctctaggtaatctgactccatggctcaaagcctctgaagtctgaatctttagttcagacagctctctaagctaaactttctactaaatattcccactgggataactctcagacaccagtatgttcaaaattgatgaaatcactatacactctagacctgctctttctcttctgttgtcctgagtaatggtggctgtttaaccacaaagtctgtaatctgggagcctgttcttgatttccttttctcacacccttacagactcataattttgcctcttaactatccatcaactcacccttctgtcctaattctatcacctgagctataccaacagtctcctaaattatttgctagacacatggctatttggatttaaattaatacaattttaaatttagtgyctcaatacactagccacattttaagttctcartagccacatgtgactagtggctgtcatatgggaaagcacagattattgaacatttgtgtcattgcaagaagttgtttttttctttccctgatacggagtcttgctctgtggcctaggatggagtgcagtggcgcagtcttggcttactgcaacctctgcctcccgggttcaagcaattctgcctcagcctcccgagtagctgggattacaggcgcctgccaccacacccggctagtgtctgtatttttagtagacacggggtttcaccatgttggccaaattagtctcgaattcctgacctcgtgatccgcccgcctyrgcctcccaaagtgctgggattacaggcgtgagccactgcgcgcggcctcattacaagaagttctgttggacagtgctgctttagactttcctctctgcctctgccacaatactgccaggagagagctttccaaaatatagccctggccatagctctttttaaaactctgtgttattccttattggctatgtgataaagtccaaattcctatgtttgccaaaacagtctgcctagctttccagcctcatgtctaaccacttcctcttgggccctatattccagctgtattgaactgtttcccagacacatcattttgtttcatgcctctgtgttttacacatgtgcactttctatatggagtagacttttccccaatctatgtacgcccaaataacatctctgaaaagcttaatgttactgttcaagttgagctaactgctcattctttggtgtcccttccccttatgattttactttccacagtgaatggcatttatgtgattacatgtttctctctagtactagaccttgattttgagagcagggccattatgcattctttttcttgctttgcttttttttttttttttaatatccctaggtcctagcacagtatctggccaatattaggttctcacaaattgagcaaatatggaggtgaattgatgtgtaagtaagtatgtgacttaggtaagattgaaatgtgtatgttttatggggtgccatgtataggggaataatcatagacaaaattattgccttcaaacctgagacattagaattatgtgaggaaagacagacatagaacagcacaggttattgtcacagagagtagtctagtccagtctggccagaacataagctacargaagtagagcaggagaagagaaaatgggaggtaaatttatattagagaacacattatagaaggtttccagtgctgttaagtttggaatcagtggggaaccactgaaattttttgactaatgacttgatcagaattatgttgttagatagaaactctgtcttccagtggctggcaccgtccatgttaataaacatcaaattaaaatgtcggggttggaaggagatgtgattggtgatacaaaacatttattgagtagttaaaatgtgtcaggtactgcaatgagtacatgtagtaactcttttaatccttataaccctataaagtcaatactaatattatcaccctcagttttcaaatgaaacaacagaagcaaaggacgtcttagtctgttttctgatgctatcacagaataccacagactgggtaatttataaacagtagtttatttggctcagttccagttgcttggaagtccaagagcatggcattggcatctggtgagagccttgtgctgcatcatcccacggcagaaaggcaaacaagcacatgagatggagagagaatagaggccagaatgtaccctttgtttgtttgtttgttttgaggcggagtctcgctctgtcgcccagactggagtgcagtagtgcaatcttgrctcactgcaagctcctcctcccgggttcacaccattctcctgcctcagcctcccaagtagctaggactacaggtgcccgccaccaagcctggctaattttttgtatttttagtagggacggggtttcaccgtgttagccaggatggtctccatctcctgacctcatgatccacctgcctcggcctcccaaagtgctgggattacaggtgtgagccactgtgcccggcctcagaatgtccccttttaaatgggaacccatacctacattagtagcattaatccattcatgagagcagagccctcatgacctaattaactcttaaaggtcccacttcttaaaactgtcaaaatggcaattattttcaacaagagttttggaggagagattcaaaccatagcaggtaatatttacctaakgtcacacctttagtaagtagcagaactgggatttgaacccagctgactctgggtggcatattattctgtttactaggcacagcagggagtttaagatccaagattgaagttagagaaaaaagattaggaaaagcagatttgagagtcacctttgaggtgatgtttgaatcagccacgaaggtagctgaggtttgtaaaagagggggtataaaaacaatttagggtgaaggattgagctttgggttacatcttcatacaggaagcaagaataggaagtggaaccaatggaagatctcaaggagaagcagagcaacataatgtgaggaagctagaacaggagatggttccaggaaggatgtcatgttcattgaatgactgattaaatcaggactccttaagctttttatgtgccattagcttttttggcagtttggtgaagcctttggatcttgtctgataatatttgtaaatgcataaaataaaatataaactatagttatcaaaatacagtggtccccccttaactgcagtttcaatttctgtgatttcagttacccaaggtcaacctggtctgaaaataagtacaataagatactttgtgtatgagacagaargaccatattcacataacttttattacaatataattgtcctattttgttgttaatctcttcctgtgcaaatttataaattaaactttatcataggtatatctatggataggaataaactgtataatcacatttggtgctgtgtgggggacactactatattcaaagaaacgtgtgatgatctagtagtatgtgtttctgtattaatacaatacagtgtttctttactaatacattaaaaagcatgattttttggcaagtttaacagctcccataattgtaagtgatattttaagatgtctgtaacaactataatgtgatatgaaaatattaattgatggtgttttctattgatgacagtgttacagctgctggctggtactacaaagatttattttctacattcataaaattagatttcagtgagagttttttgaaaataaagttgacttttttttattccatccaagtttatggacttctgaattgtttttttttattttttattgatacataataattgtacatatttatggggtacatatgatattttgatacatgcatacgatgtgtaatgatcaaatcaggataattaggatatccatcacctcaaacatttattatttccttctgttgggagcacttcaaatctactagctattttggaatatacagtaaattaatgttaactgtagtcacccagctgtgctatcaaacactatagaatttattccttcaatttarctatatttttgtaaccattaatgaatctctcttcatcccccctccaccccctccctttcccagtctctggtaaccatcattctaccctctacctccataagatcaacttttttagctcccacttatgagaacgtgatatttttttttctgtgtctgacttatttcattaacataatgactkccagttccatccatgttgctggaaatgacaggatttcattcttttttatggctgactagtatccattgtatatatatacaccacattttctttatccagtcacttgatagacacttagattgattccatgtcttggctactgtgggtagtgctgaaataaacatgggcatgtacacatctctttgatacactgatttcctttcttttggatatatacccagcagtgggattgctgaatcatctagtagatctatttttagttgtttgaggaacctttatgctgttttccatagtggctatgttaatttacatttctaccatcagtatatgagcattcccctttctttgcatcctcaccagtatctcttatctgtgtctttttgataatagccattttaattagattcagatgatatctcattgtggttttgatttgcatatccctgatggttagtaacgttgagaattttttcatatgcctgttggccatttgtatgtcttttgagaaatgtctattcagatcatttgcccattttcaaatgggattatttggaggatttttgctgttgagtttgagttccttatatattctggttattaawcccttatcagatggatagtttgcacatattttttcccattctgaaggttgtctcttcactctgttgattgtttcctttgctgtggcagaagccttttagcttgatgtaatcccatttgtgtatttttgctttcattgcctctccttttgaagtcttaaaccaaaaaatgtttgctcaaagtcttgagcatttccccagtattttcttacagtaacttttatagtttcaggtcttacatttaagtttttaatccattttgatttaatttttgtatttgatgagagatgggggtgtagttgtatttttctgcatattgttattcagtgttcccagcaccatttaatgaagagtgtgtccttttcccattgaatatcttggtacctttgttgaaaatcagttggctgttaagatgtggatctattatttctgggtcctttattcggttctattggtctgtgtatctgtttttatgccagtaccgtgctcttttagttactgtagctttgtagtatattttgaagttgggtggtatgatgtctacagctttgttctttttgttcagaattaccttgactatttgtgttttctgtggttccatattaattttaggtttgttttttctgtttctgcaaggaatatctttgtattttgataggaattgcaacaaatctgtagattgcttttggtagtacagtcattttcacgatacgaattcttccgaagacataggatgtctttctatttttttgtgacctcttcagtttttttcctcagtgtctcatagttttccttgtagagatctttcacctccttggtttattctaggtattctattttgtttttttggtggggggaggggttgtagctattgtaaatgggattactttctttgatttcttttcccactagtttactgtttgtatccagaagcaccattaatttttatatgataattttgtatcctgcaactgtactgaatttatcaattctaagagattttgtgtgtgtgtgtgtgtggaccttttagyttataaatttgtatgttttcttgtttaatgtctctttattttcattagactttaagtgtgatgatggcaggtatctgatacagagcatactgctagacacagaaggtggccaataaatatttgctaaataaatgaacctttctgagtcccagttttcttgtttatataatggggataataaattataaccttgtagagtagttgtaaggattgctgcatcatagtaatgtcactaaaagggaggatgaatatgggtatggagaaatgtactgaggtagaaataagagtaaatgtgggagctggatggctaggtttgctctctgaaacaggaggtggcagggagtargaagaaaatggtagttggcaaggagcttgggaagggcctagaatggaattggaagggtagtagagtatatagggaaggctgtggaggtgtaaaatggctcatagagactgggtgtggttgctcatgcctgtaatcaaagcacttagggaggccgagccaggtggatcacgaggtcaggagatcaagattatcctggctaacacagtgaaaccccatctctactaaaaatacaaaaaaaaaaaaaaaattagccgggtatggtggcacgtgcccgtagtcccagatactccagaggctgaggcaggagaatcacttgaacctgggaggyggaggttgcagtgagcggacaccgtaccactgcactccagccttggcaacagagtgaaactccatctcaaaaaaaaaaaaaaaagaatggcttatagataaacctgataagatttacctttgaaacatctgttagaagggacaatccatcatcatctaatacctgaaggctcttccattctcagttcagcaccttcagagactggtagcccatttgttcatcgagtgaaaggtcacttagtgggcctcttggtggagatatatatatatatagtacaccctcccctaaggaccttgcagtagagatgaggtgactatgaaacagacatataaatggaagakaataatacaattaaaacagtgataatggccaacacagggtgctttggaaacgtactgaagaggctattaatctcaactctgggttcaaggaaggcttcctgagaggagtgagatttcacctgaaaagacatatagaagtaggtaagtagacttcaggtcattatgggtcatgacaaggaaagtagatcattaacaatcatggaaggttttcatgcagaagtataatatgatcaactaagcataataaaaatatccttctggcagcactgtggaaaataataagattggagagagagagaccaattataaagaaagttgcaataatcagtgaaaaccaaccattgaaggcctggaccagtaggaatggaaggaaaagaaaggaagattyaagagctattagaaaggtagaattgttaggacaattgaatgggaaggtttgaggaagatggggtcatcaacgatgacccacatttgtagctcgggtggacatcttgttattcactgaagtcttaaatataagagaggagttggaatatattgggaagggaaagtgatgagtgtactcttgtaatcttgagatggagatacattcagagtaacaattgctaactttatttgcctatggaatacctaattagaattcattattgaaccatcaatagcttatgaaacataaaatagaaaactcaccaatttttttaaactaatggcacggtttgaaaattataagacactgcttttcatttaaaacttcattctcttacacatttttgagataactaggagaaatgaacagattgggtcaaatgaagttaagtaatttttaattttgttggttgtggtgatggcattatagttatgttaagggaaaggttattatctattatagatatgcctaaaagtatttactggtgaaatgtaatgacagaatttgtttaamatactccaaaaaatgcagaacaatagatgaaacaagaatggaagaatgttaaatgttgaaaattgttgacattcatgagagtacattggagtttattagattcttctcttctgtgtgtgcttggagcttttcaaagtaaaattaaaaaaacctttttagtcagagattcaaaggaaattcgtggaatatataattttaaattaataaatcaatattgaatcacatgataaatgtaatttgaatatgtgataagacaagtgaccgaccagagatcatcaagcagatgacatatgtcacctgagtagttaggaaatgctgtttgagcattaatacacagatttaaccttatgtttatgcctcagatgatctcatacaattgtctgagatgccatatgttgaaaatagctgtattgaggtggttacttttcatatgattctcccttctctargaatagctctaatccatagaggtaatactgtacctggccacaaccaatgaatccagtggtacacacctaatacaagctgagccagtgagagaggctctcccagcaaagcaaaacttgaaagataaagaggcaggaggcctttgcaggtgagcatattaatggcaactcaacccctgcttctaaggtccctgtggctattctacctgaggctagcttattcaactattactttcatttcatgagttagatcagtatctttccaataaatcctcatttttaaaatgtaagttagccagaattggtttctattgcttgcaataaayagacttattaaatataataaattgttacataataaaaaatattatataaatgtgtttgatgttgcattatgtctatgtggaaataaattcaaaaataaatgattgctatcatcaaacttactttttttatttcttgaggaacgctattgtgaagaatacagtttaagaacatgcaaattcatgaagcgttccatatttaaaaaaaaaacaaaaacaaaaaactgctattgcatagcatccaagtggatttgaccagaagtggttcagatatgggtagtgtggaactcagagcaagatctgagctgaagaggtaagcttggaagacattagcaaatgggtggtaacagaaggcatgtgggagtaaatgagaggaccatccagggcaagtgtatagtctaagaagagtaaaggttgaggacaaaactccagggaacaccaatacttaaagggttgctgaaagaaaggagtcccaaagggactgaaaaggggacgccagaaaagtaggagggaaaactaggagagagtgccatcagggatgccagaaatttgaccaatttaggagatrgggtatggccaacagtgtcagatgttgcagagactagttcatttgatttggcaacacaaaagtattggtgaacaattgcattgttgagagttaaaagattamatggyaagaatgggagcggggccacagttgcccatgacttttccaagaaatctgactctgctaggggaaaaaaaatagagtcctttttatatatttatttatttattttttgagatggagtcttgctctgtcacccaggctggagtgcaatggcacratctcagctcactgcaacctccaccycccgaattcaagtgattctcctgcctcagcctcctgagtagcttggattacaggcacccgccatcacgcctggctaatttttttttttttttgtatttttagtagagatgggatttyaccattaaccaggatggccttgatctcctgacctcgtgatccacccccctcggcctcccaaagtgctgggattacaggcgtgaatcactgcgcctggccaaatagagtccatttttaaatgctagaaagggatggcagagctgagtgttagaaagccagagcctcctggatttaccggtgctgtgccattattttcagaggcattcatagctaatgac

SEQ ID NO: 1622 - DNA, 140377 bp, Homo sapiens
tctctgtccctgtgggtcaagctttctggaccacccctgaccttgttggttgttaaggtaactcaagttactcctatattttgttctagaacctttatagatttaggttttacatttgggtctatgtgtgaatatatttatggaggtgttgggagataattctccatagatcttctgtttttgcatatcttctgagcaattgtattcgtagcttttttctagactgtcttttcaagaatgtctgtatagcaaacagctttggaaaatatagtgtctccctytggggaagaaggcaggtttgttggctgttcatgataataaagacaatgtcttccacyggaaaaaggttgaaaaggttttctagcaagggttttagaaaatattggggtttcctaaatagggttgctcttgggtaatgcaactcactgagtgtgctctgtgggaatcagggcttgaagaactagcacaaatgttgttactctgattactgctattgctctgattaataaattgttctttatccctggcccaggaatctcatatctcctgccagtgtctatgaatttgtgccatgctaacttgttttctagcaaggtaaaattacagactcttactattcttaccatttttggtaataaagatggaatactgacaagacatggctttctggaataagaaagacaagagccttccaatagttcagtgataatttgagggaagtctgtaggatttagtagcagccatattattcaaactgtctagtcaatcaagcaataagtgatcctcccctctttcattctctgctaccaaggaggaactagggagatggctgcaggctgagtactggaaaataggttcattgaggtgggggcaggagggtcgatctgatggtcagtgtcactcccatcccattgtaacaacgagaactaagatccattctgggttagagtaaggttctgatccttttcagaaaatagttacrgagatatgcacctctaaatgcaaaaggagaggatttgggactgctatggacagaaattttgcaaatcttaagaactttggcttgttagcttgggagatgagggagagaggtgcacaatgtttgttaaggaggaatggcaacagcaatggcaacctcttatagctcaactcctcctgaattctatcaggccaatattagatctttttgaagatgacagtacgagttttcttggagtaggcgctggctgctgtaagtgtacctggccctctcagtaagagattcctgagacagagaacctgccacgggaaaccagagatgaagcaatgtctagtattcaggcccttactatcctgctttgggttgatactctccacctagtcccctgacactgacccataaaagccacaagtgagggacataatgggtttttatatgttttataaaaattcccttgtcactcttgctcttgactgactgttccagatgaaaattttaggtgagattagaagcatgattggaaagaggttatagttactagaatgggacacattaattttgtggcagtgttagagagagagagacagagagagagagactgagacctaagcacttggaaaggcactgggggataaagggacattagtattaatattcttttgtcttttagaactgatcctggagctttccctcacaaaggaaaatgccctgctgcagcttttgcaaactgtttcaagtccttgaatttaactgrttcctgggtctgttatcctctgttasatggctttgaccacaatttgattactattctcttattctttctgagaagtctattagaaacagcagtgaatggtctcagcttcttcattttccatgcaaaaacttgtcaacagcttgtatgtattgcctgtagatagtcccatagctgtcacttaggtattttgtggtggtggatgaaayaggataggaaagattggactgacttccatcatgtggtacctacaaaaacaaggaygctcaattattcaaactgaactgggaatcctaaggtgtattgttgattgggaggccatgttggaggcatggtcaacctgtgcctcatgagtaatatgagtgccattttggtggaggtagggggaaaggggatacccaataaatgcaaacaagactttatttccagggcactcaatgctccctgactatacttcttgtaatgtatacctccaattttgtttttcttttaaaaagtcattctggctattgcagatccttcctatttccaaatgaactttagcgtcaggttgcaaattgcttcacaaaagcctgatkgtagtttcaatggaattgcattggatttatagatcaatttggggagaactgacatcctaacattattaaatcttctgattcatgaacacagtgtatcttcatttatttaggtctttttattttctctcagcaattttttgtagttatcactgtaactttttaycttattgagtgctggaaggttttgtatgcctataaatattcttgagcwgtgttttgggtctcagctaagttactggaaacattcaatcctttcagatcttacttttaagctttgtttgacaggtccagaggagtgtttagtgtaagactgtttttgaacccttcctgaggcaaaacccttttgagcactttactcactgccccttaaattataaaacttttgactctagctggtggtaacatgaaatattctgagcactgagtatcatatcctatcatggcactgagtgtcatatcctatcatgcttccacgtggttctttccctggccatggatagttttcatayatgtatacagtgatcattacccagttgaagactaaaggggtcccctgaagatttatggagctctctttgttctttaatttcttctctcggattcwctcctttgaactctagcttccttggccttcctggacacctccttccctcaactcagagaccgctagaagctgcctgggttttctgttctttgtatcatgacttggaaccacctgtcttcagggagtaagcttaggaaataatagggatcatcttaaatttgtttcctgttatgcaggggtcattatcattatctgataaccgaggtataaaaattcattgtttcatatattttgtctgattctttacttattccagacaggaggataaacccagttgctgttactccatcttggctggaagcagaacccttcacataaacccagttgctgttactccatcttggctggaagcagaacccttcacatwatcccttgaaggataatatgtatggtatgtgtccatggcacaaagtctatgatttaatttaaattaactttcaggtatggcacgaggcaggggtcatggataattttttttctctcaatgatatcagctttcattttcattgttggaaagatttttctttccccattgaagtgcactggcactgtttaaaatcaattgactttatatatgtggatatatttcttaaccctctatttgttccatttttgtctaacttcgtgtaatatactattttactataactttataactcttgaaaacctgtagtatatgtcatttaaatatttgcttatttttttcaagattgttttggctctagcctttttcatttccatataaattgcaaaattattttcccaatttctagaaaataatcttcttggattttgatcataaacgcatttaatgtgtagataaatattgatagacatagacttaaaaagttgacattttagcaatattgggtcttctaatccattaatatggtacataatctccattaatttggatcttctttaatttctctcagtaatgttatatagttttcattgtagatgtctggaaattgtatgttgtctgggaatacagctttatttctttcattgaaatcattatgcctttatttctttttcttgccttattgcacttgttaagacctccagtataatactgaatagwyatagtgagagcaaatatccttgcctccttccaatcttaaggaaaaatcaatttttcactattgaaaatgatgttagctggagatagttcacagatgtccttcaycagatgaaaaagttcctctctattcataagtattgtttgttttcaaagaataatcgattcatgtcacagactcaaaccactgcaaaatttgatattacatgcttaaatttattaactttttaaacttctttgctttacmttgtcagcactgataacttttctgtggttcttagctgtgctattaaggccacagatatgaatggtgaacttttggctagactcatgctgagagttttgctaatgtatgctaacttgacaacttgaccgttaagattttaccaacaaaattagaaatgactagatgtaatctattttcagggttctagaaaataactgaaattggctttgtcaaatctaaggtcttctttaatctctcctgacttttagttctatctttcctatccctttcatttacaacggttttgggagatttggaatttagcaattcaattctttctaaactactttcttaattttattgccaactttaaaaaataaaaaattgttggtggaaagcttaataaatctgatcatttatatgtacattttctttgttactgacataaaacacacatactgaaaagtgcataaataagcatatgccttcatgtttttttttttttttyytttttagatggagtctcgctctgttgcccaggctggagcgcaatggcacaatctcggctcactgcaacctccacctcctgggttcaagtgattctcctgcctcagcctcctaagtagctgggattacaggcacccgccatcaygcccggctaatttttgtatttttagtagagatggggtttcaccatgttggccaggctagtctcgaactcctgacctcgagtgatgcactgcctcagsctcccaaagtgctgggattacaggtgcgagccaccacgcccagcctgccttcatgaatttttgaacacacccagaaagagcagaagacagaacatttctggtacaccagaagatgtgttgttttccctttccaggcaaccccaatggtaactcctagtggtgtgatggagctagcctacaccagctcttgggagctgataaattttcaggaatctcttgtgaggcattcagattttactggaaaattagaaataattagatataatsaattttcagagttttagaaaatagttgaaatctactaagtcaaatctaaggtctcctttaaacctcctggtttttagttttagttccatctttcctattcctttcayytacacacaggcattattaacagttaaattgtatcaattaatattttaaaatattaaaaacattttacttcgttcaacttaaagacaaaattaatatatttcttgaggtcaaattatctaaaaaactctaccttgtaaaattgcatcttaaagcagtgcgtggaaactgatggcaagaaaccacttaagtgtcacaactctgcttcaagttaattcctagtccatttgattttgttttgcttttaagatcacgaagctggtgtacacttccgtgcgarcttagagtggtaatgaactccacaatacactgaaaagagcttgaggagacagcagatgaaggactggggctctggttttgtagctgaagcccaggttctcaaaggtcctaccaggcctgtactttatttctcctccgcgggcctctaggccaaatgcctggatgaatctgcgctcakggggcgtcctggaattacacttgggagagaataagaaaggaggaggccgatgtgcccatggacattattaaccttccggcaaatccccacagccgccaaactgcgtctcctcttccgctctcggcgcgcagctcacgctcgcagcgtcagcgwcgccggcggcgccaaggcgycgtggcgtcgggcgcctgggacgtggcttcaacggccccatccggcgccggcggcgggtgcccggcggtctttgctgccgcccgggggcgcagaggccgggccttttctttcagcacaaacgtcagtttgtaaaagggaggtgctggagtctgaggagttttcaggcttccgtctcgaaggaagtctggcaggctcggaattgtcatcttcctcaggcaaatagtttttcaccttagagccagcaaggccaaaccgcccagtcacccgacttcccacagtctcagcaggtacacagggcggrgagcctcgggagcggctcccttagcaggacctgagggtttcgggagagtcctggctttgcacttagttttcccgctgcctggctgcctccgtggcggttgtgctgctttttatgcaggatgtaggatcgaaggcaaatcatcctttccctacgtcccctgccaacccctgccgctctcctctattttgtacactttatcattaaaggatttgaaatgaatgtaagttaatccttgaaggatgaaaccagaaaacatttgtcgtggtggcggaaagggacggatgcacttgggcgaagtaatgctgacatccacttcctagcattgttaggagggataaatgaattaaatatgtaaagtccttaaatatttgcttgctaatacgagtattcattgcrtgtgactatttttgtatttatgtgaacttcatcggagcatttgtcaggttctttttttttgcaccaagtgagcgttgcctgcctgcctgccctgcctccctccctccctcccttccttccttcccctcttcccttcctccctccctccctccctccctccctccctcacacttttttggggagagaggacacaatgcaatccataacagcatatacacttgttcttttttccatcgaactttcctcttgaccatgttttcttctagtaatactgtatttctttactcccttttatagtaaaatttctctacagtgcttatattcaattcattgttcctacttcctctcttttgaacggtaagtcagatatttacctcgatcattctactgaaattgttgccgttcttcaggttacaaatgacctacctccatgttgccaaatccagtgtcascttagtcttcattttacttgaytcagcatttgacgtagttcatcactcggtccttggtgatattttcttttccttgctttctatgtatatataaccttttggttttacttattggctcattggccactcttcttacgtcctgtttcctggtcctgatggttttgatggaatttttgatgtttgcttggacctgaaggttttgatggagtttctttggcaatgtaatttattcagaattcttttgaggcttttcaattttgtaaatttaatcttggtttctgcatcattttgcttgtatcattaatttttactgaaagcatcgtgtcacaatcggcatgagaaaaatgtaaaagggagcagggcgcacagtggctcaggcgtgtaatcccagcactttgggaggctgaggtgggaggatcasctgaggtcagaagttcgagaccagcttggccaacgtggtgaaaccctgtcactattaaaaatacaaaaattagccggacgtggcagtgggcacctgtaatcccagctacttgggaggctgaggcaggagaatcgcttgaacctgggaggcaaagtttgcagtgagcaagattgtgccattgtactccagcctgggcgacaagagcgaaactctgtctcaaaaaaacgaaaaatgtaaaagggaatattttgcaggggctttggttcaagttctataatgtgtttatttactattatcatcagtaatttccaagagagcattgtgttcttccttcaaatggatttttagwgacaagttatttttgcaaagtcatatttgattatgatttaaaaattatgcttggcaactatgcattcagttaactatagtgttaactatagtgtttcatcgaaacaaaaaagcagttgtataattcttggatgaaataaacattttcagtgctattaagatattttcgttctattgttcacaacctagtttagaatttttatttttgagaattttctgtttgtgcttgtcagacatatttaagggcatgtatccctggccccatatatattatatatttttaattttaattttttatgagtagtctcttamacatatatatgattcttttccagcggggtgtcatctacttgttaaaatcctaataaatgttcacatattgaaatatctgcattttggaaatccataattacatcaacaattgttatctgctgtccatatgtccaaaataattgagaaattattagtttttaaaactttattcaaagtggttttatttataacatctgtaagttttattatttgtttttatattttattctctaaaatagtatgttatactatttggwattgatatttatgttttgcataaatgtgctaacaggataccatcaacttttgccatggtttctggcaaataaaaaaaatcctattattggtctcttcatatatatcggatgatcttctgaacattagatactgcttctccaaaaattgaatcatgtttattgttattaacaaatatataggcctttattttctcattttcagtagaattgctaattatttatatttttttcaaacctgatactagcttttaatacttatcactaktgatgtgtattttattaatgttcaggaatatgtgataaatgctgctgatctttgcattattttttattcttcagctggattattcctccactgattttattctttgcatcagtttttattcttcagcagtattattttgtgattactcgtgttgttttatctgttatatttttcattttttaatatcttcacttgggtcttaaaaattcctcttatacctgtttcatatggctgatattctctttctgtgtgtttatgtatttttagtctctctgttttaatgattctacaactaaaacatgttttttagtttattatttttatatttatttatttatttgagatggagtcttactccatcccccaggctggagtgcagtggtgcagtctctgctcactgcaacctctacctccgagttcaagcgattctcctgcctcagcctcccgagtagctgagactacaggtgcccaccaccacgcctggataattttttgtatttttaatagagacagggttttaccatattggccaggctggtctcgaactcctgaccttgggatccacccgcctctgcctcccaaagtactgggattacaggcgtgagccaatgcgcctggcctattttttattttttaatggtttttttttccgttgtcaagttgttttggcctgtgagctcatatacccctgggggtgtcccctgtttgtctggtaatctattattaggaaatgatcaaaagccagttctcagcctgtgttcctcctggaagttagggaaagtatgtgggtgtatttgttttcgaagtgctaaatatttcctgtggtctgaatgcttgtgtcatccccaaattcgcatgttgaaattgggacccaattcaacatatggtagaatkaggaggtggggcctttaggaggtgattaggttatgagtgcagcaccctcataaatgggactactgcccttataaaagaggtctgaaaaagctcccttgctccttccatcatgtgaggacacagagagtaggcaacatttatttagcgtctgggctttcatcagacaccaactctgctggtgccttgtcgttggactttccaatctccagaactgtgagaaataaatgtttcttgtttataagctatgcaatttatagtgttttgttatagcagcctcaacagactaagacactagtgctgctgtaacaaagtaccacaaagtgggtggcttagaacaacagaaatttattctttcatggttctggaggccagaaaactgaaatcaaggtttcagcaaaaccatgttccctgctaagggctctagggaagaatctttcattggtttttacaagcttctggtggwtgctagcaatccttgatattccttagcttgcagctgcatcactttaatttctgcctgtcgctatatggtcttcttatagtgacaccagtaattggatttaggacccaccttaattcagtatgaccacatcttaactttgtcatatctgcaaagaccctattttcaagtaaggtcacattcaaagtgctgggggcttaggacttgaacatatctttttcagggacacasttcaacacataacaatgggacaagccaaagtgtagagagcttcagataacagagtaccagtgttacattactctatcttaattttgccattgtacctgacaattcccacggttaggcatatactcttaacactatttgggaggtggcattgtcctgagtcttagctttgaggggagagaaaaatagaggaataaaagcccaagacctatctagtttatacttccttatcttagcatagctttgatgctgccttaatattacactaatgataccttgggccaaggctactgctcctgtgggaataaagatgtatattaaggacatatattagctcaaatatgggggaaagataggaagaaawtgtaatttttctttttcctgaatgtattctctcgttgcttctggcttcttcagtccgtatattcccattctaaatgccccataaacaaatgagcctttgtttaggggtttcttaagttaaaaaattttttgttcttgttgttttctgttgttaggaatattttcctttctatttttcattttttcagagttgattttgggatttgccatcttcatagcaattgataatccttttatcattttaaatctgaaatgttttcatctacaaccctccttacttrcaggaaatgctataagtcctrtaggtaaaataatccaacattttccttatggagagcaaagggtatagaaaagaagcaagatttgtagccaatttgacctatgttgtaattctgaaaaatttaacacttactagctgtgtgactcttggttagtcacttaacttgtctgagctcagtttactctactcccatgtaaaatggaataatgatgtatataaagggcataccttagattaaaaattatggagcttttactgttattatgcttaagtttaaataacttattgatataaattagatattgtgataactgcattctatatttcttcgttttgtttaagttactgtgactcaaaaaagcctgaagtgtaatcatagcttccagaagttgcttaatgtactctgagcaaattgctaaagccatcagaaaaagagaaaygtagtatgtgaatttaattagagcctggtgttttctctgaatctcttattttttttcacagggaggaataagtttttttcatctgtaayttggaagccaagtcagtaacaaaatgaaaccagtaaagcatctgttgaccaccagtaacaaatcggcaaatgttccagcattaactactaaaaaaggactacataatttaccattatcacctgagctaaaggaaaaacataatgcaaaattaattcatgataaaattgaaccaatggtcctaagatctccaccaacaggagaatccattttacggtatgctttgcccattccatcgagtaagacaaagaacttactaccagaagatgaaatgatcggaaaaattatcaaacatctgaagatggtaagaggcttgttagtttctgtgttgcagggcccccatgatcaccccaggtttartgatgtgctaggaggactcacatgactccacatatagtcataccgatggctaagatttattacagtaggcacatgaggtgaaattaggagaaaaccagatctaagcttgcaagagtcttttccctttagagtcacccaggagatgcttaatttctttagcaatgaattgtgacaacacatatgaaatgtctgccagggaaaatcattagaaactcagtgccctgggatttattgggggttgtttactattcactctgtgcttagcatgtacgaaaatttcagactctcacaaggaaaggaggttcagtataaacaatgttatacaaacagtttagggacagtgagctgcttctatcartgaatggggagaaccctcctgaaatccaggatctcagatgccaggttaaggccaaccttgcaagcaggccttcctaagtcctgcatttctaytatgttaaactctgcatttcagaaactttagctcttttttcgtttcttgagatgaagtctcgctctttcgcccaggctggagtgccgtggcrtgatcttggctcactgcaaattctgcctccaggtttcaagcaattttcctgtctcagtctcccgagtagctgggactacaggagcatgccaccatgcctggctaatttttgtacttttagtagagatggggtttcaccatactggtcaggctggycttaaactcttgacctcaggtgatccacccgccttggcctcccaaagtgctgggattacaggcatgagcaccatgcctggctgaaactttagctcttgatgtggggaaaaaatttcctttctctgagtttctatttttttcactgcaatccagaattgaattgtaaatgtaccaaataacaatgaggaagagcacaaatataaaaaaatatatagtacatcaaacttgtacagtacaagtttgttgaaagtttgaggggttaggccagataattttctttaaaaattcattgctttctggtctccatctttctatttcccctaactctcttcagaggagaaagtcaaggcagactttgaggaaaactctacttaatgcttcaaccactcatggacaggccctctccgttttaagatagctatcaacacagaaatggtagagtcatagagcatctctctattgctagggagtagggttaaggaatattgctttctcctcatgatgacatgaaattgggtatgggatgaaaaatttaagtttatggcactggaagaaataagtcttactggtaaaaaggtcctggcataattgattaaatattatttacatttaatataattaattttaaactrttaaagtatctaattggctttkattttttttttacaggttgtttccactttggaagaaacctatggacattgygatcagaatggagaagaaccatttgtaaagcatgaacatgaagaattatctttatctgtaagtatatgcaaccctaatatagagacattaacactgaaaagggtcgattttctttttaaaaatataaatttaaaatattttcttttggagtacttattatatcctcagaatgaatttcccatccatgaaaatgatcctcttagaaaattactcaacccaaccaaatccctcttgacctgaattttgccaagaagtttgcagaaaaggagttctacatacccattaggaatgaccaacattttaaagatagagaataatcacattttagtaaagatatggggccacaggaactctcatacagagctggtgggaacacaaatggtactgctatgttgagaaacagtttgacagctgctcacaaagtttaacatatacttaaaagataaccaccaattccactcttaagtggttatccaagattaatgaacacatacatcctcacaaagtcttgtatataaatgtttatagaagtttcgttcgtaactgccagaatagctactgaatccagcaacccaaatatttactaactggtgaatggataagcaaattgtggtatagcatacaatgaaatactcttcacaataaagggaacaaactactgacacatagaacaatgtagatgaatctcaaaaayattaggatgtggggaagctaaataaataaggctacatatcatatgattctatttatatgaaattctgggaaagggaaaactgtagtaaaggaccagtgtttgtcttgagctaaggtaggaggggagaattgactgcaaaggagtrcagtgaagctttttgaaatgatggaaatgttttatatttttattgtggtggtgattacccaactattaaaaggactatgtaatcacaatccttatcctgcatgaccttgtggttattatgttttgaagccctgccaggaatgaatcaaagaaccaaaactaaaatctgaaattgaagtccartagaaactgggatgactagaggtgggagggaggcggggtaagggttgaaaaactagctatcgggtactgtgctcagtacttgggtgacgggatcattggtaccccaaacctcagcatcacgcagtatatccaggtaacaaacctgcacatgtayccactaaatctaaaacaaaagttaaaaaaaaaaccaccaaaaaaataaaataaaatgaaattaagttcactttcctgtggtctccaatactgacaaaattgaagaaatcagcccttcggataycccctttattttactgaatttctttcctccaatgatcttgtattttatttcacatcaaccactaatggacaaagtgatatcctgtagtccttaccataactgtttcataatttgaatttcagtcatcctaatctgtggccaccacctcctgtctttcccactcagtctgtccaatattctgtctccaaaaatcctttgatttcacagggaaacataatccattggtcttgctgcctttttagtgtccgaaatcctccytgtgcccttacttacccagcttaaatagcatggtccactattatcatcactccctttcacacgtacttaactctcttgccctgttctgctttattggtctcatttggttacattataaacttggtcaaatcaatttctatcttctctgtatttctctatcttctctatatttgtggcacctgaatgtgggtggaagaagtaggctaatagtttctctttatatttgtgattagtaacactaatctgttcattttcctctctgctggatgatttagttttttttccccgtctcctrtatgattrtaggtctttattgtgacaagaagtatgtgagcctctcagcatatttatttatttatttatttatttattttattttatttttatttttttgagacagagtctcgctgtgtcacctaggctggagtgcagtggtgtgatcttggctcactggaactgctgcctcctggattcaagcgcttttcgtgcctcagccacccacgtagctgggattaccggtgtgcrgcgcctcgcccagctaatttttttgtctttttagtagagacgggattttgccatgctggccaggctggtcttgaactcctgacctcaagtgatccaactgcctcagcctcccaaagtgctaggattacaggtgtgagccaccgcgcctggctcagtatctttaaatgtaatgctcagggaatatattcttcatggagaaccactctatgaaaatcctaactgtatataagcctgtaatatttgtttatcatgagtcaattctctgatttacgaatcactgctttactagaagggatttgatcgttatgacatttaagctgtaactattttttcctcaaagttgtgtattgcccattaggtgagagcagaagactgcagttcatggcaattatacagttaggtatcataggtagtagtcattttctaacaccaagagatttttttttttatggtaatgattaccttttattgggccacccagaaatttcagtactatgaggctgggatgctggattttctggaactgtgtagagatgaatgagaggagagacatggctgggtatatgtcactgatgggccacttcccaaagtgtactttctttcatattttttctttgggagaatttgctagtatggcatttgaagcatggcttcttgctgtaaatgtttgaagggacataaattacacaaaattaaaatttttcaaaaagtaaatatgctagaaaaagacagacatgcatatggattcttaaatgtaactttatgttttattattcttttcaaaaggttggggatgatatgaattcattcttgacatattgttcgcaatttgcagctcagctagaagaagcacttaaagaagaacaaaatgtatgtattctgtatatactgtcaagtataaaatatcaaacttgtactggttgttgaaaattgaatctgctatccagtcagccaacattaatctagattcagtgtcttaaraaattataaatggcattggaaarcattatttatttattttttattctttttttttaatcatcatcaagggtttttactatgcccaaatgcaaagattatgccactgaaccaccacaaataagacatgaactttgaattaattcttcaatagttgtgtgaatcttaatgaatctgccatattccctcattaagagcatgtaagtagttacaaggtagttaataaatagtaaggttgtggcaatcagcatcaaagagagaatgattggccattacagagaatgaccacacaatcatggtttagtaccataagccttatcaattagctatgagtaaaatgtaagactacagtggaattgttgcaattgtcttttttttcatataatagaatacacttaatttattgctttttctggcaatagtatttaaattggcatgtaataattatacatatttatggggtacatagcgatattttgatacatacaatgggtagtggtcaaatcagagtaattagcatattcatcacstcaaacacctagcatttccttgtggtgggaacattcaaaatatataaaatatatatatatawaataaaccgttgttagctgtggtcaccctatagtgctgtagaacactataacttatttctcctatctagctgtaattttttatcgtttaaccaacctctccctatcctccctcacccctaccctttccaacctctagtaatcatgattctactctctgcttctatgagatcagcttgttttagcatttgcatattggcaagaacatgaaatatttatctttctgttcctgacttatttctcttcatataatatcctatagggctttccatgttgctgtgaatgacaggatttaattcttttttggaattaagagtgaaatcttttttggaactgaaagtggctgaatagtagtccattccccctatatgccacattttctttattcatttgtctattgatggacatttaggttgattatatatattggcgattgcagtttagtgctgcaataaacatggaagtacagatgtctcttcagtgtactgatttcctttcctgtggatatacacccagtagtggaattgctggatcatatggtagttctattggtagttttttgaggagactccatgctatttttcattatcattctactagtttaaayttccaccaaaagtgtatatatgttcccttttctctgcatccttgtcagtatttattaycttttttctttttsataatagccattctaactgaggtgagatgatatctcattgtggttttgatttacatttccctgatgattagtgatgatgagcatttttttcatatactttttagccatttgtgtatctttcttttgagaaatattcaagccatttacctattttaaaatcagtttttttttgccattgagttgtctgagttccttatatattttgaatattaatcacttgttagatgaatttttttttgcaaatatcttttttcattctgaagattgtcttttcactctgttggttgtttcctttgctgtgcagaagctttttagtttgatataataccacttgtctgtttttgcttgtgttgcctatgcttttgaggtcctatgcataaaatattttctcagaccaatgtcctgaagcatttcctctatgtttccttccagtagtttcatagttttgggttttacattaaaggctttaagctgtttttgagctgatttttgcatatggtgagattttggggtctagtttcattcttctgcctatggatatccagttttcccagcaccatttattgaaaagactgtctttttcccaatgttcttggtgcttttgttgaaaatttgttggctataartaagtggatttattttttgggttctctattgggttccattggtctgtgtgtctgtttttgtgccagtaccatgctgttgtggctactatagctttgaagagtatgttgtgtgtgtgtttgcatgtgtgtgtgtgtgtgytttttttttttttttttaaagagacaaggtctcactttgttggccaggctggagtgcagtggcacaatcatagctcactgcagcctcgaactcctgggcttgagggatcctcttgcctcagcttcccaagctgctgggattacaggcatgaaccatgatgcctggctaactttgtagtatattttgaagtcagatagtgtgttgcctccagctttcttctttttgcttaggattgctttggctacttagggtcttttgtggttccacatgaatttttaggatttgttttctatttctgtaaagaatgtcatggtattaataattaatattgttaaaatgaccatactactcaaagctatctgcagattcagtgaaatccctgtcaaaatgatactgggcttaagcccagtattaatattaattcttctaatccacaaacataggatgtcttttgtttttttgtgtgtgtcttctttaatttctttcatcagtattttataattttcattgtagagacctttcacctccttggttaaatttatttctaggtatcttatatattattttgtagctattataaatgggattggtctcttgatttctttttttcagctagtatataaacatgccactgatttttatatgttgattttatattttgcagctttactgaatttattcattaattctaagaagtttttgggtggagtcttctatgtatatgatatgtatataatcatgttgtctgcaaacagggacacttttgaggccctccacttagttgcttttcttccctaggagagttctgagttaggtgaaactaactcagtttagtgtgaacctctagagagctcaaaagtgggaacctctagagagctcaaaagtgggaacctctagagagctcaaaacagtaacacaatttcttgggaatatgtctgctatgctctctccagaaccactcaaaatgagggttgctgtttttaagactgctactgtgctcaaggaaggggtggggcaagaccgagttaaaataccacacagttctcttgtggtgttcaagccacattttattgatgtggcattgcttggttgctttaaatctttaactgtttttcagagttctaacaaaattggagcataagcctttggacttccctgctgcacatttttttttttttttttttttttttttgctgttagcactcttcaaataccctaatagtttttttccttgatacaaatttacaattractttgaattttatatgtatagcatttcagtagaccaagaataaccaagtgagtcctgaagaaaatgaacaaggccaaaggacctaccctaacagatatcaagattcattatgcagctatatcaattatgattatgtgcttttggtgcaagcctggatgaactgatgaaattgaacaaagtctcagatattgacccttttatatatggaaaattttgttgatgacagagccagcagtataataaatggctttgggacaactggttatttataaaggaaaaaactaatttgatatatgatcaaatatgatactgatgatrtaagtatatgacctggagcaagaaacaatcacaaaacaaatacaaatcataaaaggcaatattgataaattcacctatattaaatttataagctctgtatataaataattcataaagagaggggcaagagaaatttcaaacaggggcaaaatttggatcatgtatacctgacgtatatgtgtatttaatcacatgaaggattatctagattatatagataatgtctacttatcagtaagtaaatgattaaacaaatcattacaaaataaaaaggcatttcacagtggatcagtttttatttttcactcatttttatcaacaatgatctagatttagcagtatcagtaattgatgctgtgggtttcctcagtaattgagaaaggcactgttctcgttaaactargagtggtttaaattattgtagmactatggctacaatgagtggttgaattgatatacgctaaagtttcccatcaggttccagtgcaggaagggaagttttgagaaccccggaatctttcttgacagtggaaagaattagttattcctaggtataatgtgctttagtggacattattttctaaacacttacgtagctgaaaatatttttcttctgacacagacattaatttgctttggtatattttctgaaggatctcagcactttttgcgtagatttatgctttcttatttagcttagtgattctcagactttagcatgcaaagcaatcacctgcaggtctagttacaacacaaattgttagtcccacttctagaatttctgatttagtagggtagcgtggggcctgagaattttcagtactaataagtatgcttgtaggtggtgctgatgctgttgctgtggctccttactttttgaaccacagatctagagttagtgttgcggaagataaatttaatttatctagtttaatttttgttcaatcttatgttactccctgaatgcacgtagtaacattttactttaataatgtaattgaaaacttttacccaatttgatagggtggggtttttgtttttgtagcaaatgtaatcactttaacattagatatttaaatggtaaatactgatattttgaackgtgtatggatgctcctcaacttatgagggagttacatactgataaacccatcataagttgaatttttcatatggtgaaagtgcatttaatacacctgacctaccaaacattgtaacttagcctaccctaccttaaatgtgctgagaacactgracattagcctgcagttgggcaaaatcatctaacacaaaacctattttataaggaagtgttgaatagctcatgaaacttattgaatactgtactgaaagtgaaaaacagaatggttgtaggtgtatgtggagttcagtttctattggtttttgtatatttagtcagtttctcttgtaatttctcaaacaagtaatttgcatttttcattaaaaatattaagtagtattatattttatatcttgattttctagaccgtttagcaggaacagagttgtattgagaagatagtgttgggaaggtgatgctttttgttattgtacttgctgctgtatgaaaaaaatataatgctcctctgaaaggaatttaaattttattccttacatatatgtgtgtgtgtgtgtgtrygtrtatatatatatatatatatatatatatatgcacatatgtacatttttttttttaagatggagtttcgctcttgttgcccaggctggagtgcaatggcgtgatctcggctcaccgcaacctccgcctcccgggttcaagtgattcttctgcctcagcctcctgaatagctgggattacaggcatgcaccaccacacctggctaatttttgtatttttagtagagacggggtttctccatgttggtcaggctggtcttgaactctcgacttcaggtgatccacctgccttggcctcccaaagtgctgggattacaggcatgagccaccccacccagcctccttacctatattaagaaaatatatgaaataaatttgggaattgtttgggggccacctaatatagatatattagggccaggcatgatggctcatgctcagtgttttgggagactgacatgggaggattgcttgtggccaggagttygagaccagcctgggcaacatggccaaactccatccctattaaaaacaaaattaaaaattagccaggcatgggggtgtgcccatgtagtcctagctactcaggaggctgaggcaagaggatcacttgagcccaggagttcaacgttatagtgagctatgagtgcaccgctgcactcaagcctgggtgacagtgagattctgtctctctttccctctttctccctttttatatataaaaagaaaaattatttttaaattctagaaagaagttgtctatgcaaggtgaactaaaagcactgtctgtaaataaaaaattttaagtttcaactacagatttataaagttatattttaatacttagtacatttttgtgattgaaawttgcaaaagactgaactaaatattatattatacattgtgaagcattctaattttaaatgtgttaattaaaactttatttttcagattttggaatctctttttaaggtacgttcaatatattacagcttaagcctactaaaacttaacacagaaatacatgccaatgaagaagaggtttctaaattttaagggagtagaaggaattccatacttgctgctctatatatttaagaattttatgttcatttgtatagtgcattagccccattctgaatcccaagtgatgtttyggtcagggctgatayttgatggatgaagattcagagacacagacacacatttatatagatatttatttcatcagtgcaatttaartagtcactatttctttttttgtccctcttttgttttcttaaagtggtttcagtggcaggtcaatcagatggaagaagtaagtctaacgttttaaaattgttaagttaatattttttaactcatttgaaaagcaatttggattatgtataagttaagtatgtrtaagtcatttttgaataactgttggttataaagtaaccttttggtttgggtagacaaggaataagtggatgggataaaatatttctcagtgacctacaccctatatccctgcatatatctgrtatactccaagtttgactgacacattttttttcctaaaattgaataatggaaactaagttattattttttccaatttacataaaagggtgatgagagaacctttcactttaaatatttctaccatattttaaaaaatcatgctaaatgattatgtatgtgtagacataaaattatgtattgattttctatagatgaaatatgttattttaatgatgttcttttacacttttgattcaggcactttgccattagtttgagaactactggtctctgtccttaggggcttttaattctactttggaaaatactttatatatgctgtcartatattagaatgatttccagggtagctttactgatttacagtattattttagttctcatttggtcacacttatggttcagtccaattaaacactcttgaagcccaggcttttcaaagaaaagaggccagtttatttgggggtatttaaaggataaatatagatagaaccttaaatgcatgaactgtgactatatcytagcatcttctcattgtttttatctctggtcccagaacagaagactttcatggtctatatgctgtttgctttaggatacatttgactgacattggaaaagtgttagtcattctttgattatggcatagaggtcattatccttccagagaagtaggggtagagtgaagtctactattcctctaccctcttttaaaatgtgttcttctttgcaactttggaaattcatcttgtcatcttcttttcatccatcaacctctttttattattttattaatgggtttacttttactcttcttttgcactcagtcctgtcaatgtacatgacctatccaaaaccctggcttctcactttcttgacttcctcatctccaaagatctcttggcctccacttccagtcacactctggaacttgtcattaactaaattactttttaaaaattactaatttaggcaacttattcttgaactgtaaatttctgtttttccaattattactttaaatactgctctggccaccaaacacttggaatgctctaaatacaagctgttggttggaactccttcaattcctgctacctaacacaatattaacgtctgtactcattttctctttcttttttcctgttaagacagatatattgttctttcttatacatatgactaattatttcacttctgttttggatttcatatcctcttgccttctcaagactttgtgtttgtttgtttgtttgtttgkgtttttgagaacttgatctcattctggttgccctggctggactgcagtgatttgatctcggctcactgaagccttgacctcccgggctcaggtgattctccaaccttagcctctcaagtagctgggaccaygggcatgagccaccatgcctggctaattggtattttttttagtagagatggggttttgccatgttgcccaggctagtcttgaactcctggattcatgcaattcccttgcctccgcctcccaaagtgctgggattacaggcgtgagccactgtgccctgccgtgccctctcaagaactttgattaattattctctcttgtatattcagtttctctcattcaatttatccttcttttcagtttttaaatatgctcttctatctcttatttgatccacattcctctctaaaggcctatttccatgtcctttattagcctgtttttaaaaaaattattttgtatgcaaatttactcatattagggaaacaatcattagattattatcagggtgtaaaggcaaaactggtttataagtgagtaggagaaaaatagagtagacagtctttgaacaatgaaactagttttttttttttttaaagtattcaacgaataaactggcacctagtgaaaagattaatctgggcactctttccttgtaagagacaactaaggttattaagtaaaacagttagagttgttaatggatttcctataatmacccttaagagtttagccatggagcatgtgtcacccattcagagccacayttatttttatattcatttactmtacactatgctcttacttcccaaacatttctcaatctatccagactgaattctgtctccctaacaagtaaaacattctctccatatggttcccagtaagttgtatgttgttaaattaaacagacttttttttttttttgcctcagctatagttaatattattgatygtgccctcatttttgaaacactagtcctttggcttctgtgaattacattttcctggctattgttttacctctttggctgtcttctttttagagtcccctcctaaacccaaccagtaaatgttggagtacctcaaagttttatcctatgccttttttctttttactccaaactttctccctaggcagtctcatccagtttttccattcaagtattacctttatgcatgtaatttagaaacataaacctcttgctcaaaatgtttccctgaactccaggctttgtatataattacttactagactattccacctcagatgcaatgggtcagaaatatgaatttttactsctaaactcatatctcttctagtgttccctatcttagtgaatgagtactatttatcaaattgggtaaatgtgaaatgtggaaaccattcctgacaactcacttccatctattcctgatatttaatctatccacaagtcctctgggttttactttctaaataactgtcagatgtgtccacttttctctgtgtctacaccttattgttggttactatcatatccattttgcctgaaatcccaaccagtgcattcataatcaccaggaggaayccccactgcacagtatacttctgatctggaatttcaagtttttcaatgtttaaacccataattacttatctttaatattttattaatttggtgtaccagatatatgatctaaaggtttgtattatgtactgtttttcaaggagtgtttctctctttttttttttttttttgtaaacttttattttaagttcaggggtacatgtataggtttgttatttacgtaaactcatgtcacagatatttgttgtacagattatttcatcacccacatattaagcccagtacccaacagttatcttttctgctcctctccttcctcccaacctccaccctcatgtagaccccagtgtctattgtttccttctttgtgttcatgagttctcatcatttagctcccacttataagtgagaacatgcagtatttggttttacgttcctgtgctagtttgataaggataatggcctccagctccatccatgttcctgcaaaagacatgatctcattcatttatatggctgaatagtattccatggtatatatgtaccacgttttctttatccagtcaaccactgatggacatttaggccaattccatgtctttgctattgtgaatagtgttgcagtgaacatacacatgtacgtgtctttatgataggatgatttattttcccttgggtatatacccagtaatgggattgctgggtcaaatggtagttctgtttttagatatttgaggaatcatcacactgttttccacagcaggcaactaatttatactcccaccaacaatgtataagcatttttttctccacaactttgccagcatcttttattttttgtttttacattttaataatagtcattctgactggtatgaggtggtatctcattgtggtttgatttgcatttctctaatgatcagtgatgttgagctttttttcatatgattgttggccccgtgtatgtcttcttttgaaaagcgtcgttcatgtcctttgtccacttttttttttttttgagacagagtcttgctccctcgccaggctggagtgcagtgacacaatctccgctcactgcaacctctgcctcctgggttcaagcaattgtcctgcctcagcctcacaagtagctgggactacaggtgtatgccaccatgcccggctaattttttttttttttgtattttagtagagacggggtttcaccatgttgtccaggctggtctcgaactcctgatctcaggcaatctgcccgcctcagcctcccaaagtgctaggattacaggcgtgagccactgcgcccggccttgtccactgtttaatggtgttgtttgtttgtgtcttataaatatgcttaagtttcttatagatgttggatattagacctttgtcaggtgaatggtttgcaaatgttttctcccaatttctaggttgcctgtttactctgttggtagttttttttgctgcacagaagctcttaagtttaattggatcctatttgttaatttttgcttttgttgcaattgcttttggcatcttcatggagtctttgcccattcctatgtccagaatggtattgcctaggttgtcttccagaatttttatagttttgggttttacatttaagtcttttattcatcttgagttaatttttgtacatggtgtaagcaatgagtcccgtttaaatcttcggcacttggttaaccagttatcccagcctcatttattgaatagggagtcctttcttcattgtttgcttttgtcaggtttgtcgaagatcagatagttgtaggtgtgcagccttatttctggcttctctattctgttccattgctctatgtgtctggttttgtgccagtaccgtgctattttggttactgtagccctgtagtatagtttgaagtcgggtagtgtgatgcctccagatttgttctttttgctttggattgctttggctctttgggctcttttttggttccaatatgagcttaaaatagattttttctaggtctgtgaagaatttcattgttagtttgataggaatatcattggatttataaattgctttggaaagtattgccattttaaccatattgattctttctatccatgcacatggaatgtttttccatttgtttgtgtcrtttctgatttctttgagcagtgttttgtagttccccttgtagagattgttcacctccctggttagctgtattcctaggtattctttttgtggcaattgtgaatgggattgcattcctgatttggctcttggctcgactgttgttgatgtataggaatgctagtgatttttgtacattgactttgtatcttgagacttcgctgaggctgtttatcagctgaaggaacttttgggccaagactttggggttttctagatataggattatgttgtctataaatgggaatagtttgacttccactcttcctatttggatgcctttatttctttctcttgtctgatwgctctgaccaggacttccaatactgtgttgaataggagtgctgggagagggcacctcaaggaatgtttcttaaagtgtagttgatagaacacgtttaaatgtcagccaagatacctgttataagtgcacattactggattagatttcttttgtgagtctctgagttaggagtctactgcttcaacaggtaggaaacaagggattcttatgcacactaacatttgagaatcttgtgataatctttttactgctgacataatttattgttagtacatgctggtaaggttaatgtcagtgatcattttgcattacatgttgcattaacagagatacatgtggaaactattagagaatatggtgagctacaccagagaaatgtaggctgaacctacagtagcctgtacacttcagaattgtcttgctggaatctgtgccccaaagatctttctgaagaaaccgtttagctgataacccactatctattccatactcttttagttctgtgcctttatcttttttcccagaaaggacttctgttaaaatttaatctgtattgggaaatgtgatgtatcgagagtctaatcaagggacaaaaaccacacagtaatttggttagggaaagtttaatataaagaattattgtaacagaggaatatctactaaaggatattgatagacattctactaaaggagtaaagataattctaatgaatacaggagtagaagatagagggaacaacttcaactcctaggatggaatcagaatatgaatatccccaatcattccctcccagcaacgcagggctaagatgcagaacttctgaagagggagcagctttcatcactacatggcaragaagtctgctgggctgcaaggctggtggagctcgaactcactgggaaggtgtccatgagggtggtacacttaggaatctgccctctgtgatgctaggaaaagccaccttccagagaggtgttgtacttcctgctgggaagctgttcacaagggtgatatgttggaaaacttccctaagggaggctctgcactggtggattttgctacgaagttctgggggaagctgcccataggaatctgccatgccagggaccttaccaggaagccatccatcaggtgatgctgttgaaattttctgggggtgagtactataaaatatactacacactacctgaggaagaagcagagagagatacacagaactaggaagaaaatcttcttcctcttctagtgcctcttcaggaccctctactgaaaaaggctaacatcaggccacctgtcagggaagaaatattccactatcacagacaagacaatgaagaatagatttttgagatgagatgcagtaaattgatgacattatttttgactcaatttatgatttgcggcttcttatttggaatattttctttgtctatagaatttccttaggtctcctgcttctcttccacctattctgtgttccttgccatatcttccctatacccaagctcagacttctagtgcattgcccagcattcacttctgctgttatatcctactctcattccagtcattacaaaaatgaagtctctgttctaaatccccagtgctagaatttatctttgckaagtccttgacttcattttttccccaacttttcctcctagcataaggattggagatgtctacatgggtggatctctgaatttagggcaagcaattattttaacattactcttgtgccattttcctatcaaaacttgctgaccccaattgctattctgcttgtttatgtctccacacattggctgtttgtaggtttcttttgctgtggtttttggacactcattcttgctgaattttctttaagtaaacttattacctagaatagtaattatggtcatcttattctgtgaatcttgctgtttctttccacggcttgttattttttagcttgatctattccaaaggtctcaagacagccaaatatgtcacagtcttccccawgcagactggaaaaatgctagttccatagatctttatattttaacttctgggagttagtaatagacagtattagcctttgagagaaaattactgtctttagataatttactacagtaagggtattcttaaaaagaatttatgggaaacaatttagaatgactcttgtaaatattttgagttgcatttattgttattggacttgcttaaaattcctatatattaaagcaataaacagacagttagatttcaggctttacatgtaaaagccatcactgagctatagttctattcatagataattgctcatataaatatatttgtaaaatattgtatcattacttggctatagctatagataagaaaaatataaaaattactttgatttaataaaggarataatgaaatttatttgaggtatgggaacaaaatgggtatttactaaataactggttaattttattattttagataagtaaagatcaaactcttttacaagcagagcctccaaaacctgacaaaacagtcattttaaatattgcagaaatagtaaggcttgtacaaagatttgaagaactgaagaatcgccttaaacagaggtctaaatcctccgtgaaagtcatgttgtctaaaactatgtaagtgaaatataagaactaattgaattaaaaacagtaagaaagggtatataattagcactgaatgtaagataatgggtcagatatgatggctatacacagagcttcttagtcaaatcaggtctagtcagcttgtttctatttgcaattttaaataatctgagatgtacaatacaggagacatttgctgcatgtggctatgcaaattcaatgtagaaaatcagtttcttagtcacactagccgcatttaaagtgcttagtacctacatgtggctgttattagaaagttatattggacattgctagctttgaaatatctggcttataaactcttctctcagtttgattaggaaactcctagtaataaawaggaaactaagatctaatgaaatacttcattgttcatgaacaccttcattaattatattaacagcttatcaagtaaaatttttacatttatragcaaccatgtttttgcattagacagataaaacattctttttttgtgttaaaatagaatatacatacccatagttgggaggggccactagttatgcagttactttagtgatatctctgtcaataactgaaaataatgaagagagtggtacttgagttggctcctgggggttgcataagtagatccttggttcaaagattaaggtttagaccatattcatacttgacatttaagtgtctgctgtgtactagcgatttttgtagtaactttacatgtataatctttgattttcataactactttatgagaaaggtactattataccccaattttaatgagaataaactgaagccaatagaggttaagtaatatacctggctgaggtcatataattagtaaatggatgaaacaggttttgacccaaaggtcaggtagtctcactcyggaacttatgtccttcatcattatacgattgataataatacttcgacaaaaagatacctcatgtttctaacaatttatttttgctgtttttgttgtgaatgtttttggtatacttaattatattcatggcctacatggaattcatataattacatagtttagtttgacttttcaacttgtaacttgtaagtttaccttagtgtctgtgagtaaagattaaagatatgtttaatttttattctacaaacttcatatgtctggacttcacattttagttattttartgtaatttaaactcttactctttgatatattaaaaaatatttcatttatcgaactttaacagggataaagaaaatcgaccagaagcagtgaaaagttgtgaagctctggcacagaaaattgaaggtgataatattttatatatgtttatccttaaaaattttattaaaaattttgttattatttttatcttttaaagagagggtctcactctgtcacccatgctggagtgtagtggcatgaatatmgctcactgcagcctcaaactcttgggctcaagtgatcctctctgctcagccttttgaggtagctaggaccacaggcacaggccactgaggccagctgatttttttttttttgtacagatggaggtctcactatgtcgcccaggctggtcttgaacttctggcctcaagtgatcctcccacctygggctcctaaaatgttgggattacaggcatgagccgccatgcccggcatgtttgacttttgtggggtttcctaagtgtatgaacattttgagacttaaagttaaaaatttacagttataaaattatacaatggtaaatttagataatacttaatagtgagtttgatattttaataaaagtttttattatgttccaaattctgggaacatacaaaatgaatacaatgtgtatcccctatacagacaacaatgtggttgttacttccataaaatttacagcttagtaaggatacaagtacattatctagcatgttagtacagtgtcatgcatgataaaggtatgtggaatttgcattgggtccacagaaaggagcaatctgttcaacctaaggagttagaaggctttatgcaactttaaagggtgaataggatttagtcaagtaaagaagggaaatatttggtattttaagaagacaatagcatgaacaaacaacatgcatagagaattacaactggattggtattagagtaagaagcaatatatagggatgaagtaacagagggcctagtcatagtgggaatggatgctctgctaaggagcttagacttttttcaaaaataataatcattgaagattttttgtaggatttaattttagagaagttttttcctgattgcactgtagaagctagatttggggactaggagtaggaaagggaagttattataccttagatgtgtgatcagtacctatattcagagactagtgaaaagaagaagggagtcaggtttgagaaatatttacttgaaagttgatgattggatatggaaggaaggaagactagataatgatggtaccatcaatgaatataagagaatacaagagcaaaaacaagttttgatgagaaagtgatgtttataatcagctgttacacacattcttttaaatattaccatttcttacctgattaggaagatctgcagtgttggcagttattattttttcaaagttttctttcttctgaataagttactaaaattaaaacaataaaatttaaactcaattagtatatataattgccgtttgaagtttatagtgacaaatacacttttacttcagaattcttagaagcccactcaactgatgaatttaaagatgtttctgcaacagaaccacgtaagtttccactcattaaagcattattgtgataataacctctgttacattaatttctataaagtaataattattaggttaacagtgcagactccttgccttggagtttggagccatatagttgagctggttgtcaagcaagtattgaaattcttagttaargatacgtgttactgaaactagattcttttttttttttttttttttttttttttggagacagagtcttgctctgttgcccaggctggagtgcagtggcatgatctcagctcactgcaacctctgcctcctgggttcaagtgattctcgtccctcagcctcccaagtagctgggattacaggcatgcaccaccacacccagctaacttttgtatttttttttcttttttttttagtagagagagtttcaccatgttggccaggctggtcttgaactcctgacctcaggtaatctgcctgccttggcctcccaaagtgctgggattacaggcgtgagccactgcgcccggcctagattaatttttgaggagtgcatgttagtacatggaatggagaattttgagttgtgattagaacgtactactgaaatgttggcaggcctttgaggtgtggcagtgataaatttaaatagtttgtagattttgttactaggaattatatccacaaatgctttgactgcagatgagtagttgtcagttcaggaatataaagaactgctagagcttgtatgttaagtttatgactatttgtcaatagaaaggaaattaacttacttgtgtcttagggctggagagaattttgaaataatagtgtaaagcacactatggaatacagttcaaaagtagaaaataatatttgcttggaacaggttgctgggaattctgccctctttcaacttcagctttaaacccaaacgttgccatgtttaaaccaaggacagctgcacatcttacagcactcccaagttctatagagatttctggttgaagagagctctgactgactaggtggggtagaaaggtatatagaacttaggagtagatagtgaaaacctctgtatacatcgaggggaatcctttgtacatctatggacctctcaagagctctctctttttctctctctcaatctgtatggttgccttccttctaatattgtaccttggcttccacaaacactgaactttgtttcctaaactcaaggtgaccagtatgctctgagttccccttccctacactgtggactggcaattctagacagcaarctggggtcatcacagggcctttccastttatttccatatgtactgcattcactgttttccaatttctgaataccactgtttcatgtatttttgtccagtatttaagtggtttaaagtagaaaagtaattctggtccctgatgctccatcatggatgaaagcagaaatccctgtacccacttatagtctaatggaatacatcttccaatcataaaaccacatttcaaaaggataaaatatagttgagattttgctcatggttctaaaggggaacagaggacagaattatattgtacaatatggagaaaatgctttgcaaattcgtaagatcttttttcagtggcagttgtttcaggttcttagctttactagtattgacctactgtctttctctgttgytgtatttcacttgtttaccataattttcttttaaaagtacctcctstcttcttctctggccacacttaatcctctcttcccttcctgttttctaaattctattaaatcttatagcctggccagcaagacaaaagctacctttgtattgcactctggttttgctttcaggtcacaatttcatcttgatgttgcttcatttaataattaatagactattttttagagaagttttaggttcacagaaaaattgaacagaaattacagagctcccattagtgcagtccccccattcccgcataaagcttcccctgttattaacattttgcattaatgtgatacatttgttatggttgatgaaccaattttgatacwttattattaactaaagtccatagtttacatctggtttgctttttgccttgtacagctcagtgggttttgacaaatrtatcatgtcttggatccaccattacagtgtcacagaatagtttaattgcccccaaaatcccctgtgtcccacctattcacctcttcctccatccacctgaatccctggaaaccactaatctgtttatttactgtttctgtagtatttccttttcaagaatgttgtatatttgatattattagtctttcttttacctaacaatgtacagttaaagttcctctgtgtctttcaatagtttgacagtttattwctttttaattgctgataaataatcaatttatggatttactacaatttatccatttacctatgaaagggcatcttggttgtttccacrttttggcaattataaataaagctactatcaacacttttgttcaggtttttgtgtggatgtaagttttcagctcaattgggtaaacacaaaggagcatgactgctaagtcatataataagagttgtttagcattataagaaactgccaaataagcgtgcaaaggggctgtaccattttgcattcccccctgcaattgaggagaattcttgttgctccatatctttgtcagcatttagaattgacagtgtttgggcttttagccattctaatagttgtgtagtgatttttcattgttttcatttgcagttccatgattatacatgatgttgagcatgttttcataagcttatttgccatctgtttcatttctttggtgaggtattcaggtcttttacccattttaaaaattgggttattcgttttcttattgttgagttttaagagttctttttatattttggatacaagccttgtatcagatatgtatttggcaaagatattctctcagtctgtggcttatcttttcattcttttagcagtgtcttttgcagagccagaataaagtcaaacttaacatttttttttttatttcacgaattgtgctttaggtgttgtgtgtaaaaattcatcttcaaacccaaagttacctagatagtctcttctactgccttgtaaaagttttatagttttgcattttacatttataactatgatccattttgagttaatttttttttttttgagatggagtctcgctctgtcgctggagtacaatggtgcaatctcgacccactgcaacctccgcctccctgttcaagtgattctcctgcctcagcctccctagcagctgggaccacaggcgtgcgccaccacgcccggctaatttttgcatttttagtagagatggggtttcaccatgttggtcaggctggtctcgaactcctgaactcgtgatccgcctgcctcagcctcccaaagtactgggattacaggcgtgagccactgygcccagcccattttgagttaatttttgtgagaactgtaaagtctatgtctagagtcattgtttttttttttttgcatttggatgtccagttgtttcagcatcatttgttgagaagagtactatttcttcattgagttgcctttgttcctttgccaaagatcagttgcgtatatttgtgagtctgtttttggactctttattctgtttgcttgtctgtctattttggcagtgctacatgtcttgattactttagcttttagtaagyattgaagttgggtagtgtcagtcctccaactttgttgttcttcaacattgtgttgacttctctgggtctattaaactttataaactttagaaacaatttgttggtatccaaaaaataccttgctgggattttgattgagattgcattgaawctatggattaaatggrcaagaacttgtatcttaacaatattgtatctttcattctatgaacttgaaatatctctccatttatttagatcttatttgctttctttcatcagagtaatgaacttttcctcatatagatctcgtacatattttcttttagatttacactgaagtgttgaaatttcagtgctactataaatggtgttaatatctataatttaaaattcaaatacaaatgcttcattgctggtatataggaaagcaattgcaattaacttttgtgtcctgtaaatttgcaataattgtttattactagatattggtgattctttgggatattctatagagacagtcacattatctaacagacagtgttacttcttccttctgattttcttttcttatattattgcattagctaggacttccagtatgatgttaaatagcatggtaaaaatgggcatgcttgccttcttcctgatcttagggaggaagcatttaggatttcactgtaagtatgatgttagctataaactttctgtagattttctttatcaaactgaggaagcttacttctattttatttataatttacaaagagttttttaaaattatgagtaggtgttagattttgtcaaatacgttttctgcatttattgatatgatcatatgatttttcttctttagcatgtagattacattaattgatttttgaatattggactagccttacrtacctggaataacccatttggttgtgttgtatagttctttctatacatttatgtatgtgatttgctaatgttttgttgaggattttcacatatgtattcatgaaagatattcatctgtagttttcttttcttgtaatgtctttgtccggctttggtattggagtgatactggcctcatagaatgagtcaggaaatgttctctgtgtttctgtcttctggaagagatcataaagaattggcataatttcttagttaaattttggtagaatttgccaagtgaaaccatctgagcatagtacctgctgttttggaaggttattaattattgattcaatttcttttaaataggcctattcataatatcaatttctcctttgtgagttttggtagattgtgagtttccaagaatttgtccatataatctaaattatcaaatttgttagcataagttatttatagtatttgtttattgtccctttatgtccatgtggtcggtagggatggtccctctttctttttttgcaaatagaaataattttatttcttgcattcgtatttggacaccttttatttcttttcttgcttaattgctctagctaggaattccagcactatgttgaatagaagtggcaagaatgggcatctttatcttgttcttcatcttagaggaaaatctttcaacttttcactgttgactgtgtagctgtgggcttgtgatagttggccattattgttttgaagtacattccttctgtatctaatttattatttttgtcatgaaagaatgttgaattttttcaaatgtttttccccatatattgaggctatcatatgatttttgtattttattctagtaatacagtatatcacatttatttgcatattttgaaccatctttgcaccccagggatcagtcccacttggtcatagtgaatgattcttttaatgtgctgtsaattcagtttgctagtattttgttaaagatatttgtatccatattcatcagagatattggactgtgttttcttttctcatagcgtctttgtctggctttggtattagggtaatactaaccttgaaaaatagttcagaagtattccttcctcttcaagattttcgaagaattcgagaaggattctactagttctttaaatgttgggtagaattaggccataaaaccactgggtcctggttttttcttttttttttttagtgggggattttatcactgagtcagtcttcttattaattactagtctgttcagactttctgtttcttcatgatttagtcttggtgggttgtatgtgtctatgaattatccagttattttagggtatctaatttgtgggtgtataaatgttcacagtagtctttatcctttgtatttttgtggtatcagttattatgtctcttctttcttttccaatgttacttgagtcttgctgttttttcttagtccagctaaagtcttgtcaattatgtttatcttttcaaaaaccaaatcttagttttgttgaacttttctatgatttttctagtctctattttatgtacttctgcgctaatctcttatttccttccttttactaactttgggctcagtttgttctttttctagttccttgaggtgtgacattacgttatttgagctcttttgtctttttttaatgtatactttatttatttacttatttatttagagatagggtcttgctctgttgcccaggctggagtagagtgatgtgatcatagctcactccaacctcaaactcctggcctcaagtgattctctcacttagcctccttagtagctgatattgcaagtgtgggacactgtgcccagcttgaatgtaggtttttattgctataatcttccttttaataactgcttttgctgcatcacataaattttggtatgtttccatttttgtgtgtcataagatattttttgatttctttttgattttcwttttgacccattgctcaggagtatgttagtttccacatatttgtaaatctttcaatttttcttcagttattgatttctagtttcatgccactgtgattgggaaatacttgatatgattttagccttcttaaattttataagacttactggcctaacacaagatctgtcctttagaacattccatttgcacttgagaaagctctatattctcctgctgttgaatggactatcttgtatatgtctgttaggtccattggtgtaaagtgtggttaaaatgtaaggtttccttatttgttttctgtctggatgatttgtccattattgaatgtagagtactgaaggcctctgctattattgtattgctgtctatctctctcttcagatctattaatatttgttttatatatttaggtgttgcaatgttgggtgtgtatatatttgttatattctcttgagcttttttcattatataataakcttctttgtctcttgtgactgtttttgatttaaagtatctggtctgatgtccaagtatagccacagctgctcatttattggtttctaattgcatggagtatctacttaacatcccttcacatttattctgtgagtaagcagcaggtagtcttgtttttttattcattcagcccttctgtgtctttgaattgaataatttgatccatttactctcaagttacctttaataaataaggacttactattgccattctgttaattgctttttagctgttttgtagatcctttgttcttttattccctgtttgctatcttcctttgtgatttgttgatatacttttactcccctctaagcattttatgtttttgatgttataattcacatattttatattgaattttattaagaaattattgtagctataggtattttgttttttaccctttattctgtagacataagtgatttacagactactgttacaatattatggtatgtaattttactatatacacactttcaccagtgagttttatactttcatatgtatttgtgttactacttagtgtcctttcatttcagattgaagagctccctttatcatttttgtaaggcaagcctgatgatgatgaactccctgagcttttgtcagagaaagtatcactccttcatttttgtagaccaacttttctgggtaaggtattcttggttggcagtttttttcttccagaactttgaaaatatcttcttactctctcttagactgcaaaattttcactgctgatagccctatggggattctctctgtgtgaggaagctcttttctttgttgctttcaagattctctttttgtctttaatttttgacagtttggttataatacattttgatgaaatattctttgggttgtacctgtttggagacgttttatctttctgatgtttatatctttccctatatttgggacattttgagccattatttcttcaaataagctttctgcccctttttcttttctttttttttaattcctataatgtaaatgataacactcttgatgctgtcccataaatcctgtaggctttatttattttatttttcaraattaaaaaatttaaatttttacatatttagaggagataactgcagatttcttacatgtatatattgtgtcgtggtgaagtctgggcttttagtgtacccatcacctgaatagtgaacattgtatccaataggtaatagcctttaaaattcctttttattcwttattctttttttcctaactgtatattttcaaataactttaagtttacagattctttcttctccttgatgaattatacagtkgacatattttttacttatcttttctaattttaattttattatattctttggcatcagaatttcttttttttattatactttaagttttagggtacatgtgcacaacgtgcaggttagttacatatgtatacatgtgccatgttggtgtgctscacccagtgactcgtcatttaacattaggtatatctccaaatgctatccctcccacctcccccaaccccacaacaggccccggtgtgtgatgttccctttcctgtgtccrtgtgttctcattgttcagttcccacctatgagtgaggacatgcggtgtttggttttttgtccttgcgatagtttgctgagaatgatggtttccagyttcatccatgtccctacaaaggacatgaactcatccttttttatggctgcatagtattccatggtgtatacrtgccacattttcttaatccagtctatcattgttggacatttgggttggttccaagtctttgctattgtgaatagtgccgcaataaacatacgtgtgcatgtgtctttatagcagcatgatttataatcctttgggtatatacccagtaatgggattgctgggtcaaatggtatttctagttctagatccttgakgaatcaccacactgccttccacaatggttgaactagtttacagtcccaccaacagtgtaaaagtgttcctatttctccacatcctctccagcacctgttgtttcctgactttttaatgatcaccattctaactgatgtgagatggtatgtcattgtggttttgatttgcatttctctgatggccagtgatgatgagcattttttcatgtgtctkttggctgcataaaagtcttcttttgagaagtgtctgttcatacctgttgcacactttttgatggggttgtttttttcttctaaatttgtttgagttcattgtagattctggatattagccctttgtcagatgagtagattgcagaaattttctcccattctgtaggttgcctgttcactctgatggtagtttcttttgctgtgaagaagctctgtagtttaattcgatcccatttgtcaattttggcttttgttgccattgcttttggtgttttagacatgaagtccttgcccatgcctatgtcctgaatggtattgcctaggttttcttctagggtttttatggtttcaggtctaacatttaagtctttaatccatcttgaattgatttttgtataaggtgtaaggaagggatccagtttcagctttctacatatggccagccagttttyccagcaccgtttattaactagggaatcctttccccatttcttgtttttctcaggtttgtcaaagatcagatggttttygatgtgtggtattatttccaagggctctrttctgttccattggtctatatctstgttttgataccagtaccatgctgttttggttactgtagccttgtagtatagttggaagtcaggtagcgtgatgcctccagctttgttcttttgacttaggattgacttggcaatgtgggctcttttttggttccatatgaactttaaagtagttttttcgaattctatgaagaaagtcattggtagcttgatgcrgatggcattgaatctataaattaccttgggcagtatggccattttcacaatattgattcttcctatccatgagcatggaacgttcttccatttatttgtgtcctcttttatttcactgagcagtggtttgtagttmtctttgaagaggtccttcacatgccctgtaagttgtattgctaggcattttattctctttgaagcaattgtgaatgggagttccctcatgatttggctccctgtttgtctgttattggtatataggaatgctgtgatttttgcacattgattttgtatcctgagactttgctgaagttgctcatcagcttaaggagattttgggctgagaygatggggttttctaaatatacagtcatgtcatctgcaaacagggacaatttgactgcctcttttcctaattcaataccctttatttctttctcttgccttattgccgtggccagaacttccaatactatgttgaataggagtggtgagggagggcattgctgtcttgtgccagttttcaaagggaatgcttccagtttttgcccattcagtatgatattggccgtgggtttgtcataaatagctcttattattttgagatatgtcccatyaattacctagtttattgagagtttttagcatgaagcgctgttgaattttgtcaaaggccttttctgcatctattgagataattgtgtggtttttgttgttggttctgtttatatgatggattacatttattcatttgtgcatgttgaaccagccttgcatcccagggatgaagcccacttgatcgtggtggataagctttttgatgtgctgctgaatttggtttgccagtattttactgaggatttttgcatcgatgttcatcagggatattggtctaaaattctctttctttgttgtgtctctgccaggctttggtatcaggatgatgctggcctcataaaatgagttagggagcattccgtctttttctattgattggaatagtttcagaaggagtggtaccagctcctccttgtacctctggtagaattcggctgtgaatccatctggtcctggrctttttttggttggtaagctattaattattgcctcaatttcagagcctgttattggtttattcagagattcaacttcttcctggtttagtcttgggacggtgtgtcgaggaatttatccatttcttctagattttctagtttatttgcatagaggtgtttatagtattctctgacagcagtttgtatttctgtaggattggtggtgatatcccctttatcattttttattgcgtctatttgattcttctctcttttcttctttattagtcttgctagtggtctatcaattttgttgatcttttcaaaaaatcagctcctggattcattgaatttttgaagggttttttgtgtctctatttccttcagttctgctctgatcttagttatttcttgccttctgctagcttttgaatgtgtttgctcttgcttctctagttcttttaattgtgatgttagggtgtccattttagagatctttcctgctttctcttgtgggcatttagtgctataaatttccctctacacactgctttgaatgtgtcccagagattctaggatgttatgtctttgttcttgttggtttcaaagaacatctttattcctgccttcatttcattatttacccagtagtcattcaggagcaggttgttcagtttccatgtagttgagcagttttgagtgagtttcttaatcctgagttctagtttgattgcactgtggtctgagagacagtttgttataatttctgttcttttacatttgctgaggagtgctttacttccaactatgtggtcaattttggaataagtgctgtgtggtgctgagaagattgtatattcggttgatttggggtggagagttctgtagatgtctattaggtccacttggtgcagagctgagttcaattcctggatatccttgttaactttctgtctctttgatctgtctaatgttgacagtgggttgttaaagtctcccattattattgtgtgggagtctacatctctttctaggtctccaaggacttgctttatgaatctgggtgctcctgtattgggtacatatatatttaggttagttagctcttcttgttgaattgatccctttaccattatgtaatggccttctttgtctcttttgatctttgttggtttaaagtctgttttatcagagactaggattgcaacccctgcctttttttgttttgcatttgcttggtagatcttcctccatccctttattttgagcctgtgtgtgtctctgcacgtgagatgggtttcctgaatacagcacactgatgggtcttgagtctttatccaatttgccagtctgtgtcttttaatgggagcatttagcccatttacatttaaggttaatattgttatgtgtgaatttgatcmtgtcattatgatgttagctggttattttgctcrttagttgatgcagyttcttcctagcctygacgrtctttrcaatttggcatgtttttgcagtggctggtaccagttgttcctttccatgtttagtgcttccttcaggagctcttttagggcaggcctgatggtgacaaaatctctcagcatttgcttgtctgtaaaggattttatttctccttcacttatgaagcttagtttggctggatatgagattctgggttgaaaattcttttctttaagaatgttgaatattggcccccactctcttctggcttgtagagtttctgcygagagatcagctgttagtctgatgggcttccctttgttggtaactggacctttctctctggctgcccttaacattttatccttcatttcaactttggtgaatctgacaattatatgtcttggagttgctgttctcgaggartgtctttgtggtgttctctgtgtttcctgaatttgaatgttggcctgccttgctagattggggaagttctcctggataatatcctgaagagtgttttccaacttggttccattctccccatcactttcaggtacactaatcagatttggtcttttcacatagtcccatatttcttggaggctttgttcgtttctttttattcttttttctctaaacttctcttcttacttcatttcgttcatttgatcttccatcactgataccctttcttccagttgatcgaatcggctactgaggcttgtgcattcgtcatgtagttctcgtgccttagttttcagctccatcagtcctttaaggacttctctgcattggttattctagttagccattcgtctaattgtttttcaaggtttttaacttctttgccatgggtttgaacttccttttttagctcagagtagtttgattgtctgaagccttcttctctcaactcgtcgaagtcattctccgtccagctttgttccattgctggtgaggagctgcgttcctttggaggaggagaggcactctgatttttagagtttccagtttttctgctctgttttttccccatctttgtggttttatctacctttggtctttgatgatggtgacttacagatggggttttggtgtggatgtcctttctgtttgttaattttccttccaacagtcaggaccctcagctgcaggtctgttggagtttgctggaggtccactccagaccctgtttgcctgggtatcagcagcggaggctgcagaacagcagatattggtgaacagcaaatattgctgcctgatcgttcctctggaagttttgtctcagaggagtacctggccatgtgaartgtcagtctgccctttctggggggtgcctcccatttaggctactcaggggtcagggacccacttgaggaggcagtctgtccgttctcagatctccagctgcgtgctgggagaaccactactctcttcaaagctgtcagacagggacatttaagtcttcagaggattctgctgccttttgtttggcaatggcctgccctcagaggtggagtctacagaggcagacaggcctccttragctgtggttggctccacccagtttgagcttcctggctgctttatttacctattcaagcctcggcaatggcgggcgcccctccctcagccttgctgtggccttgcagtttgatctcagcctgctgtgctagcaatgagtgaggctccgtgggcgcaggaccctccaagccakgcgcgggatataatctcctggtgtgctgtttgctaagaccattggaaaagcgcrgtattagggtgggagtgacctgtttttccaggtgccgtctgtcacccctttctttgactaggaaagggaattccctgatcccttgtgyttcccaggtgaggcaatgccttgctgtgcttcggctgatgctcgttgcgctgcacccagtgtcctgcacccactttccgacactccccagtgagatgaacccggtacctcakttggaaatgcagaaatcacccgtcttctgcrtcgctcacgctgggagctgtagactggagctgttcctatttggccatcttggctccaaccccccagcatcagaatttctgtatggttcttctgtatgatttctatcactctgttaaacttctcattttgttcgtgtattgtttttctgatttttgttaagttgtcyatcagtgttttcttatagcttactgagcttccttaaaactattatttgaatatttcgtcagatattgatagagtcacttcttctagactttatggactagttttatatgaaaagatcttcacctatgggtggttgtgagtacactagctgggtggggtgtggcaattcaggatccagtgaggttgtggcagtttagtgttcatgtagctttttcggctgtggttgatatgggtaaaaatttcagtggtgtacagtggccaaggctgtaggtatctgcaacagtgggaaagcctgacagaattcttctaatctcttttacttccctaagggaagctgtggcagaggtgacacctcttggttctggatttggctggtgggtgtgcttctagtgacagtggtactaatgtctgatgcatgatacctgtggagtggtcaaggagcttgkatctgggagcacaggcatgtatggattgacagtggctttggrgtccagatgctagtgtgtgcaagtctactgctgctctgaggactgtgatatggatatccctgctgcattgatggttctggtgtctagaatgcaggcacttgttgagtggttgcagagccacattctggaatgtggtcacacctggagagcaacagttgcgtgggctagcttgttgtggtggtagctctgatgtctgatgcatgtgcagtcagagtctcaaagagttgcagcagagctgaggttgcagcccacatgtgtactgagagactgcagcttcagggccctgggcaaggctagcatgtaaagccagtggctctggtgactatattatacatgtgcatggtgcagccttagagatgtggactggagtgtgaacacatgcagagcaacagtggttccaggattgagctgtggcttagctcactgtggcagtggctcagatacctgaagcataggattcctagaggagtggcagagctagggttcattgtgcaggctggtgcagagtgagcatggctctagggcctggggtggggctagccctcagtgaagggggctgtggtgtctgaggcatggaagtgcgtgatccaacgttcaagccagtgctggagcctgggtacatatggaaagattgtgactctgtggtctgggtcacacatggaattggggcatggtggctctggtcctgggttggcacaacagtggttccttcttggtggtggatggagcaacatttctcttatctgggggtttaatggtggcagtggttattagttatctcagtggtgagagctgtcagtgttctctgtagagcaggctactaggaaccatggtgggacatgttgcatggctcatagtgatagttcctgcactcttcctcattccttgctgtctccagctgtctctggtatgctgatctcctcagctatcctgtctgtgtggttattctccatttttttgctttactatcttgctgcaacttctttgagactttgagccctaccaaggccactttcatccatggatagctgtctagtggttgtttctttgtggggagatgaagactgatatctcctactttctcatcttgctaatgtcattttgtgttcttcctttttttcccccaggaatgttttgtaatggctttttcttctttctggggactgaattttcaaattgtggckgaaataatagttgatgttccttgtagtcctttaccatatttagggcagaatttaaaatcgtctcatatgctatgatcagattactcttaaaatattgttttattttggctgggtgcagtggctcacgcctgtaatcccagcactttgggaggcccagacgggctgatcatgaggtcaggagattgagaccatcctggctaacacrgtgaaaccctgtctctactaaaaatacaaaaaaattacctgggtgtggtggtgggctcctgtagtcccagctactcgggaggctgaggcaggagaatggcagtgaacccgggaggcagagcttgcagtgagctgagatcgcgccactgcactccagcctgggcgacagagcgagactccgcctcaaaaaaaaaaaagttggtgttttattttatcatttactgtaactttttatgtaaacattttaaattattctctcttacctacaaaaaattataaatttaattcttacgaagctggcttctcccagtatcctatttgaatctttgaggaatattgactctctcaaagtaaagcctctgtttgacttggtttcttggttgtacttgatatatttggtaccctgaatatattttacacatttctactttttctgcctttgcttagggtgtttacttttcatttttttctctctaatgaaactctgtccattctttaaggcttagcttctttrtgtttttctactttawcttctcagctcctaaatatttattattcttctataccactcttttgacacgtgggatagaaaaaatataattaatgtttaggaactcttgtatgcttctatattatttaacattttctttgtgtcatgtcttgtttatctagcagaaaacttaktgcagggactgtcttctgtcatatactttttatgtcacaagattgaagagtcttgtggtattaccccaatagttcattgattattatggatcattattatgttggttctcttttaagtagcatcttaggttctcttttgggttctttgatacagttgtaaagcttaacaggttagctagatccttcccatagaccttattgacttagcaacagcaactaaagcagttctsttttagtatgctrtagtccctctgatattccatatcataagaaggtcacatatgttggacattaatccagttttgtcttttactagatatatagtattgatcaagttatgtaacctctttgagcctgaacttctttatttgaaaattatgacagtatcttattttttagattaagaataagagaatgcaatataacatggtgatttgcacataataggtgtttaataaaatggtagctattctcctcataagcattctgttaatagtcatgtagcccatgctagcccctctttatgtttgtttagctttcacatctatagcagttatatttagcatagagctataacttaagctatttataaaacctttaacatttttgactttttaaataatagaaactgctcattcaatgactaatcgatttaatgccatgttgaaagtatttgaaaaccaggcaaatatgttggagaggtaagcttttttgtttttgcattttattatttttctatttttaaaaaaagacagataaaattgtatttttccatatgtaatatgttcattgaaaaaagttagtaygtgtttattgcagaaatattgaaaacataaagaagaaaataacacctctatcaacaaatttagaatttcttatatcaatttttatgattttatgtatgtataatttttacatggaaagttataaacatagagaatgtaaaatgaaatgtaaaatatgtgctatgggaaaatagtatattggttcctaaaaaaattaaaaacagaattaccatatgatccagcaattccacttctgggcatatataccccaaaattgaaaacagagtgttgaagggatatttgtacatccatgtttgttgcagcattattcacaatagccaaaagatggaagcaacccacatgtgcaacaatgaataaatggataaacaaaatgtggcatatacatataatgaaattattattgagtcttaaaggaaattctaatacatgctacaacatggatgaaccctgaggacattctgctaagtataataagccasccacaaaaaagacaaatgcaattattcctcttacatgaggtatctagagtagtgtcaacttcatagacacagaagatagaatgatggttgccagggggtacaggagggggaaatggggagttattgtttgatgcacacaaagcttcagttttacatgaggagaagagttctggagattggttgtaaaataatgtaaagttacgtaacactgctgaactatacacttaaaatgattaagatggtaaattttatgttatatgtatttttccatagttaaaaaagttaaaagttgygatgatacaaaatgtagtttgtgaatattttttcacctgtaaactcatttaatttctttttaaaataaatgttttattttttattgacaaaattatatatatttatggtataaaatgtgatgtttttatatgtacataccttgtggaatcgctaaatcaagctatgtaacagacccaaaatcctcacatacatatctttttttttctggtgaaaacacttaaaaactactctctagaaactttccctttgtctagctgaaattttgtaccctttgaccaacatctccgcattttcccccaaccccagcctctagtgaccagcattctgttctctatttccatgagtttgactttttagggttctacatataagtgagatcatgcagtaattgtctttctgtacctgacttcttagcataatgcccttcagtttcatccatgttgttgcagatgacaggatttccttctttttaaggctggataatattttatatttatatttatatttaatatatatatctgtatatatatatcttccacatgttctttatctatttttacatttatggacacttaggttgattccatattgtagttattgtgaataatactgcagtgaacatgggagtatgggtatctactcaacatgatttatcccatttcctttagatgtatactcagaaatggaattttttggtcattcggtagttctgtttttatcttttttgaagaatctccatactgttttccataaagctgaactaatttacattctcactaacagtgtataagagttcccttttctccacaktcttgccagtacttaaatgttttttctttttgataatagccattttttttgataacagatgtgaggtaatattacatggtggtttaaatttacttttccttgatgattagtgatgttgaacatttttttcatataccctgttgaccattcacatgtctttttttgagaaatatcaaaccatttgcccatttttaaatggtgttatttgttttcttgtagttgagttgagctccttttacatcttggatattaaactcttatcagatgtatggtttgcaaatattttctcccattccatagkttgtatctttattccattgattgtttcctttgctctacagaaactatttagcttgatgcagtcccatttgtctatttttgcttttgttacctgtgcttttggggtcatatcaaaaaaatcttttccaagaccaatgtcaagaagttttcaccctgttttcttcaagtagttttacagtttcaggttttacrtttaagtttttaattcattttgggtctatttttgtatatgagatgagataaggaccctatttcattcttctgtagtctcttcaacacaatttattgaagagacattcttttcctaattatgtgtttttggacatttgtcaaagatcagttgatcatatatatgtaaatttatttctgggctctctattctgttccattggctatgtctgttttttttttttyctttttctaaattatactttaagttctggggtacatgtacagaatgtgcaggtttgttacataggtatacatgtgccatgctggtttgctgcacccatcaacctgtcatctacattaggtatttctcctaatgctatccctcctctaggcccccacctgctgacaggccctggtgtgtgatgttcccctccctgtgtccatgtgttcttattgttccactcccacttatgagcgagaacatgyggtgtttggttttctgttcctgtgttagtttgctgagaatgatggtttccagcttcatccatgtccctgcaaaggacatgatctcatccttttttatggctgcatagtattccatggtgtatatgtgccacatttgctttatccagtgtatcattgatgggcacttgggttggttccaagtctttgccattgtgaacagtgctgcaataacataygtgtgcatgtgtttttatagtagaataatttataattctttgggtatatacccagtaatgggattgctgggtcaaatggtatttctagttctagattcttgaggaatcaccacactgtcttccacaatggttgaactaatttacactcccaccaacagtgtaaaagtgttcctgtttctccacatcatctccagcatctgttgtttcctgactttttaatgatcgccattctaactggcatgagatgatatctcattgtggttttgatttgcatttctctaatgaccagtgatgatgagcatatttttataagtttgttggctgcataaatgtcttgagaaatgtctattcatattcttcacccactttttgatggggttgtttgtttttttcttgtaaatttgtttaaattctttgtagattctggatattagccctttgtaagatggatagattgcaaaaatcttctcccattctgtaggttacctgttcagcctaatgatagtttcttttgctgtgcagaagttctttagtttaattagatcccatttgtcaattttggcttctgttgccattgtttttggtgttttagtcatgaagtctttacccatgcctatgtcctgaatggcattgcctaggttttcttctagggtttttatggttttaggtcttacgtttaagtgtctaatccatcttgagttaatttttgtataaggtgtaaggaagggatcccagttttagttttctgcctatggctagccagttttcccaacaccatttattaaataggaaatcctttctccactgcttgtttttctcaggtttgtcaaagatcatatggttgtagatgtgtggtgttatttctgaggcctctgttctgttccattggtctatatatctgttttggtaccagtaccatgctgttttggttactgtagccttgtagtatagtttgaagccaggtagcatgatgcctccagctttattctttttgcttaggattatcttggctatgagggctcttttttggttccatatgaatttaaagtagttttttttctaattctgtgaagaaagtcaatagtagcttgatggggatggcattgaatctataaattactttgggcagtatggccattttcatggtattgattcttcctatctatgagcatggaatgtttttccatttgtttgtttcctctcttatttccttgagctgtggtttgtagttctccttgaagaggttcttcacatcccttgtaagttgtattcctaggtattttattctttgtagcagttgtgaatgggagttcactcatgatttggctctctgtctgttcttggtgtataggaatacttgtgatttttgcatattgattttgtatcctgagactttgctgaaattgctcagcttaaggagattttgggctgagacgatggggttttctaaataaacaatcatgtcatctgcaaagagagacaattgacttcctcttttcctaattgaatacactttatttctttctcttgcctgattgccctggccaraacttccaatactatgttgaataggagtggtgagagagggcatccttgtcttgtgccagttttcaaaggaatgcttccagtttttgcccattcagtatgatatactgatattggctgtgggtttgtcataaatagctcttattattttgagatactttcagtcaatacctagttcattgagaattttcagcatgaagggctgttgaattttgttgaaggccttttctgcatctatttacataatcatgtggtttttgtcattggttctgtttatgtgatggattacgtttattgatttgtgtatgttgaaccagccttgcatcccaggaatgaagcccactggatcatggtggacaagctttttgatgtgcttctggattcagtttatcagtattttattgaggattttctcattgatgttcatcagggatatttgcttaaaattttctttttttgttgtgtctctgccaggtcttggtatcaggaaggtgctggcctcataaaatgagttagggaggattctctctttttctattgtttggaatagtttcagaaggaatggtaccagctcctctttgtacctttggtagaatttggctgtgaatccgtctggtcctggactttttttggttggcaggctattaattactgcctccatttcagaacttgtaattggtctattcagggatttgacttcttcctggtttagtcttgggagggtgtatgtgtcctggaatttatccatttcttctagattttctagtttatttgtgtagaggtgtttatagtattctctgatggtagtttgtatttctgtgggatctgtggtgatattccctttatcattttttattgcgtctgtttgatctttctcccctttcttcttcattaatctgggtagcagtctatctattttgttgatcttttcaaaaaaccagctcctggattcattgattttttgaagggctttttgtgtctctatctccttcagttctgctccgatcttagttatttcttgtcttcttctagcttttgaatttgtttgctctcgcttctcttgttcttttaattgtgatgttagggtgttggttttagatcttgccttctttctcttgtgggcatttagtgctatacatttccctctacacagtgctttaaatgtgtcccaaagattctggtacattgtgtctttattctcattggtttcaaagaacatctttattcctgccttcatttcattatgtacccagtagtcattcaggagtaagttgttcagttttcatgtagttgtttggttttgagtaagtttcttaatcctgagttctartttgattgcactgtggtctgagagacttgtttgttatgatttctgttctcttgcatttgctgaggagtattttacttccaattttgtggtcaattttagaataagtgcaatgtggtgttgagaagaatgtatattctgttgatttgttgtggaaagttctgtagatgtctattagttctgcttggtctrgagctgagttcaagtcctggatatccttgttaattttctgtctcgttgatttgtctaatattgacagtggggtgttaaagtctcccacaataattgtgtgggagtctaagtctctttgtaggtctttaaggactcgctttatgaatctgggtgctcctgtattgggtgcatatatatttaggatagttagctcttcttgctgcattgatccctttatgattatgtaatgcccttttctcttttgatttctgctgctttaaagtctgtttcatcagagactaggattgcaaaccctgcttttttttgctttccatttgcttgataaatcttcctccatccctttattttgagcctatgtgtgtctttgcatgtgagatggtctcctgcacaccagtgggtctttactctttgtccaatttgccagtctgtgtcttttgattgcggcatttagctaatttacatttaaggttaatattgatctgtgtgaatttgagcttgtcattatgatgctagctggttattttgcccgttagttgatgctgtttcttcatagcatcgatggtctttacaatttggtatgtttttgcagtggctggtaccggttattcctttccatgtttagtgtttcctttaggagctcatgtaaaggcaggcctggtggtgacaaaatctctcagcatttgcttgtctgtaaagtattttatttctcctttgcttaggaagcttagtttggctggatatgaaattctgggttgaaaattcttttctttaagaatgttgaatatcggcccccaatctcttctggcttgcatgttttctgctgagagatctgctgttagtctgatgggcttccttttgtgggtaacccgacctttctctctggctgcccttaacatttttttttttttcatttctaccttggtgaatctgacaattatgtgtcttggggttgctcttctygaggaatatctttgtcgtgttctctgtatttcctgaatttgaatgttggcctgccttgctagattggggtagttctcctgtataatatcctgaagagtgttttccaacttggttcaattctccctgtcactttcaggtacatgaatcaaatgtagatttagtcttttcacatagtcccatatttcttggaggttttgtttgtttctttttttttttttttttccaggaggaaaaaaaarcctatttaatgaactcagaaaaaatgaagacaaaagaaacataaaatgaacatatggccttttccatgatacatgctgttattttacctgtcttctattactcatgtgttattcatctttcttccaratttgcatatttctccatttatacatagggaattgggaacttttaraagtttttccctgtctctgatggattggacaatgtttgcaattctaggagacatctgattattctttcaaaataaatttatcagaaggagttttgttttctaaaattattgtgattccagaattatcttctgctcttctgctaataratctcctatcattgkttggttaatktattgggaagaaacttgacatcctgatgtaatcttctttgtcctgtgttttcccarccatggtcattatgggagagggtgacgggagaaagggctgggaaagagggagccctaatgttgaatctttcttttttwttttttwwtttttttttagtgtttattgatcattcttgggtgtttctctgagagggggatttggcagggtcataggacaatagtggagggaaggtcagcagataaacacgtgaacaaagttctctggttttcctaggcagagggccctgccgccttccgcagtgtttgtgtccctgggtacttgagattagggagtggtgatgactcttaacgagtatgctgccttcaagcatctgtttaacaaagcacatcttgcaccacctttaatccatttaacccttagtggacacagcacatgtttcagagagcatggggttgggggtaaggttatagattaacagcatcccaaggcagaagaacctttcttagtacagaacaaaatggagtctcctatgtctacttctttctacacagacacagtaacaatctgatctctctttcttttccccacatttcccccttttctattcaacaaaaccgccactgtcatcatggcccgttctccatgagctgttgggtacacctcccagatggggtggtggccgggcagaggggctccccacttcccakacggggcggctgggcagaggcgccccccacctcccggatggggcggccggcctggcgggggctgccccccgacctcctggacggggcggctgcccggtggagacgctcctcacctcccagacggggcagctgctgggcggaggggctcctcacttctcggacggggcggccggtcagagacgctcctcacctcccagatggggtggtggyggggcagagacactcctcagatcccagacggggtcacggccaggcagaggcgctcttcacatctcggagggggcggcggggcagaggtgctccccacatcccagacgatgggcggcggggcagagacgctcctcacttcctagacagggtgatggctaggaagaggtgctcctcacttcccagactgggckgccgggcagaggggctcctcacatcccagacgatgggcggccaggcagagacgctcctcacttccaagatggggtggcggccgggcagaggctgcaatctcggcactttgggaggccaaggcaggyggctgggaggtggaggttgtagccagccaagatcacaccactgcactccagcctgggcaacattgagccctgagtgagcgagactccgtctgcaatcctggcacctcgggaggccgaggcaggcagatcactcgcggtcaggagctggagaccagcccggccaacacggcgaaascccgtctccaccaaaaaatacgaaaaccagtcaggcgtggcggcgcgtgcctgcaatcccaggcacttggcaggctgaggcaggagaatcaggcagggaggttgcagtgagtcgagatggyggcagtasagtccagccyccgctcggcatcagagggagaccrtgcaaaggggagagggagagggagagggagaggtgtttctttcttttcactctttttttgtctaatcttgtcttcttgctttatttcattgagttgatcttcaatctctgatatcctttcttccgcttgatcaatttggctattgatacttgtgtatgcttcacaaagttctcgtcctgtgtttttcagctccatcaggtcatttatgttcttctytaaactgggtattctagttagcaattcctgtaaccttttttcaaggttcttagcttcctggcattgggttagaacatgctcctttagctcagaggagtttgttattacccaccttctgaagcatacttctgtcaattcgtcaaactcattctccatccagttttattcccttgctggtgagcagctgtgatcctttgcagtagaagagatgttctggtttttggaattttcagcctttttgygctggtttctccccatctttgtggatttatctacatttggtctgtgaggttggtgatgttgatactattcctttctgtttgttagtgttctttctaacagacccctctgytgcaggtctgctggagtttgctggaggtccactccagaccctgtttgcctgggtatcaccagcagaggctgtagaacaacaaagattgctgcctgttcctccctctggaagcttcatctcagaggggcaccagccagatgccagccagagctctcctgtatgaggtgtctatcggcccctactgggaggtatctcccagtctggatacgtggatggtcagggacccacttgagaaggcagtctgtccgttgtcagagcttgaacactttgctgggagaactgctcctctcttcggagctgtcaggcagggatgtttaagtctgctgaagctgtgcccacagtcgccccttcccccaggtgctctgtcccagggagctgcggtgggctccaaccagttcgaacttcctggcggctttgtttacactgtaaggtaaaaccacctaytcaagcctcagcaatggtggatgcccctccccctaccaaggtcgagtatcccaggttgaccttagactgctgtgctagcagagakaatttcaagccagcggatcttagtttgctggactctgtgggggtgggacccattaagccaggcaccaagagaatttcctggtctgcyggtggtgaagaccatgggaaaagtgcagtgtctgggccagaatgcaycatttctcccagtacagtctctcatggcttcccttggctagggaagggaaatcccctgaccccttgcacttcccaggtgagacaacaccccaccctgcttcagctcaccctccatgggctgcatccactgtccaaccagtcctattgagatgtactgggtacctcagttggaaatgtaggaatcatccaccttctgtgttgatctcgctgggagctgcagactggagctgttcctatttggccatctttttggctgtatctgttttgatgctagggtcatgcagttttgattactacagctttgtgtattagattttgagataatgtgatgcctccacctttgttctttttgcttgtgattgctttggctactcagggtcttttgtggtcccatatgaattttaggatctatttttatttctgtgaaaaatgtcattgaaattttcctagggattacattgaatctctaagttattttgggtagcatgaacattttaacgatattgtttcaactcatgaatatgggatgtattttcaattctttgtgtgttcttcaatttatttcatcaacatcttatagttttcagtgcaaaagatctttcacttytttgattaagtgtattcccaagtattttatttctttttatgctattataaatgggattgttttcttgccttcttttttagatagtttgttgttaatttatagaaacacaactgatttttgtattggtttttgtatcctgcaactttgttggattcatttgttctgcaagtttttggggacatctttagagttttctatataggaaagtatatcatctggaaacaaatatgattttacttattctttttctattttgatgcattttatttgtttttcttgactaattgycctggcttggacttctagtactatgttgaatagaagtggtgagagtgggtatccttgtttttgatcttagaagaaaagctttcaacttytcactgttgagtataataatgttarctatggggttctgatatatggattttattatattaaggtacattccttctatacctatttattgatgggtcttattatgaaaggatgttgaattttgtcaaatgctttttctgcatcttatgatcatatggttttgtctttcattctgctaatatgatgcccaacatttattgatttgctgaatcatccttgcactccagggataaattccacttgatcatggtgaatgatccctttaatgtactgttaaatttgttttgctagtattgtgttgaagatttttacatctatattcatcagggataattttcttttcttgtgatgtccatgtctgactttgttatcagggtgattaatgaagacttgtgaaatagtttagaagtatttcttcctcttcaagatttttgaagagtttgagaaggattgtattagttcttctttaaatatttggtagaattcagccatgaagccaggaagtcttgggcatttctttgataggagatttttttattattgattgacacttcttggtcattattggtcttttcagattttctatttcttcagtcttggtaggttgtatgtttccaggaatttcctaattttcttctaggttgttcagtttgttagaatgtaatttgtttgtggtagtttcttattatcttttttttatttctatggtatcagttgtaatgtctcatttttctttactgaggttatttgggccttctctctcttttttcttagtccagctaaagatttgctgattttatcttttcagaaaacttttagttttgttaaccttttctattgtttttctagtctctattatttattgctggttttttttttttttttttttgagatggagttttgctctgtcgcccaggctggagtgcagtggcgcgatcttggctcactgcaagctctgcctcccaggtcatgccattctcctgcctcagcctcctgagtagctgagactacaggtgcctgccacaacgcccggctaattttttgtatttttagtagagatggggtttcaccgtgttagccaggatggtcttgatctgaccatgtgatctgcctgcctcggcctcccaaagtgctgggattacaggcatgagccaccatgcccggcctatttctgctctttgtaattttcttccttctatgaactattggcttaatttgttatttttctcgttctttggtgtatcacmttaggttatttatttgagatcattatttcttttttaagtagacatctattgcaataaacttcccacttagaactgcttttgctgcatttcatgagttttagtatgttgyatttccatttttgtttgtctgaagatactttctgatttccctttggatttcttttttgactcatcatttgtttaggagtgtgttaatttctacatatttgtgaatttttccagtttttctcctgtcattgatttctagtttcaaattattgtcattggaaaatatacttgatatgacttcagtcttcttaagtatattaagacatgttttgtggtctaacacataacgtatcatgggaaatatttcatattcactcaaggagaacgtatgttctgctgctgttgggtggaatgttttgtatgtgtcagttaggtccatttggcctaaagtatcgttcaagtccgatgtttccgtattcatttgttgtctggatgaactgtctattgttgtaaatgaggcattactgtaaataggctattattatattgctgtctgtctctcgattcagatctattaatagttgctgtatgtattcaggtagtcttatctcgatgcatattatttaaaattgttataacctcttgatggattgacccctttataattttttttatgcccagctaatttttatttatttatttatttatttattttttagtatttattgatcattcttgggtgtttctcggagagggggatgtggcagggtcataggataatagtggagagaaggtcaccagataaacacgtgaacaaaggtctctggttttcctaggcagaggtccctgcggccttccacagtgtccctgggtacttgagattagggagtggtgatgactcttmacgagcatgctgccttcaagcatctgtttaacaaagcacatcttgcaccacccttaatccatttaaccctgagttgacacagcacatgtttcagagagcacggggttgggggtaaggttatagattaacagcatcccaaggcagaagaatttttcttagtacagaacaaaaatggagtctcctatgtctacttctttctacacagacacagtaacaatctgatctctctttcttttccccacatttcccccttttcttttcgacaaaaccgccayygtcatcatggcccgttctcgatggtcgctgtctcttcggagctgttgggtacacctcccagatggggcggctgggcagaggcgcttctcacttcccagacggggcggccgggcagaggcgctcctcacatcccagatgatgggtggctgggcagaggckctcctcacttcccagatgatgggtgggcgggcagaggtgctcctcagttcccagacggggctgccagtcagaggcgctccttgcctcccagacagggtggcggccgggcagaggtgctcctcacatcccagacggggcggccgggcagaggcgctcctcacttcccagayggggtggccaggcagaggcgctcctcacttcccatttggggcggctgggcagagacgctcctcagttcctagatggggtggcggccgggcagaggtgctcctcacttcccagacagggcggccaggcagaggcrctgctcacttcccattcggggcagccrggcagaggcgctcctcacttcccattcggggcagccaggcagaggcactcctcacttcctcccagacggggtggccgggcagaggcgctactcacttcccagacggggcggccgggcagaggcgctcctcacatcccagacgatgggcggccaggcagagacgctcctcacttcctagatggggtgrtggccggrcagaggcgctcttcacttccagacggggcagccgggcagaggggctcctcacatcccagacgatgggcagccaggcagagacgctgctcacttmctagacggggtggcaggcgggcagaagctgtaatcttagcactttgggaggccaaggcaggtggctgggaggtggaggttgtagcgagccgagatcacgccactgcactccagcctgggcaacattgagcattgagtgagtgagactccgtctgcaatcccagcacctcgggaggccgaggggggcagatcactcaaggccaggagctggagaccagcccagtcaacacggcgaaaccccrtctccaccaaaaatacaaaaatcagtcagtagtggcggtgtgtgcctggaatcccaggcactcggcgggccaaggcaggagaatcacgggagcccgaggcagggaggttgcagcaagccgagatcatggcagtacagtccaggcttggcaagagagggagaccgtagaaagaaaggggagagggagagggagaggcgacccctttataattatataacgacctttgtctcatgaggcagctaataacttaaaatctctcttcttatataagtatagccactcatgccttcttttggttttgatttgcatggagtatctttttccatcccttcacttttagcttttgtgtgttccaggctggagtgcagtggcgcgatctcaggtcactgcaacttctgcctcccgggttcaagtgattctcctgcgtcagcctcctgagtagctgggactacaagtgygcgccaccacacccagctaatttttgtatttttagtagagacggggtttcaccatgttggccaagatggtctcgatctcttgagcytgtgatccgcccaccatggcctcccaaagtgctgggattacaggcatgagccaccgcgcctggcctgtgtgttcttaaagtttttgtgagtctcttgtgggcagcatgtagttgggttcttaaaaaaaaaatccattcagccacttgacatgtttttgttggagatttaatcaatttacacttaaatatacattcaaagtaattatttatatgtaaggacttactattaccattttgttttttgagttggattctcactctgttgcccaggctggagtgcagtggtgcaatcttggcttactgcagcctctgcctcctgggttcaagcaattctcctgccttagcctcctgagtagctggaattacaggcacctgccactatgcctggctaatttttgtatttttagtagagatgcagtttctccatgttgaccaggctggtcttgaactcctgacctcaggtgatccaccaccttgacctcccaaagtgctgtgattgcaggcatgagccactgtgcatggctcactgttaccattttgaaggacagtaatcatatgatcatttcaatagatgcagaaacagcatttcgcagcattcaaaatcttttcatagtaaaaacttacaacaaattaggtatacaaggaattttccccacataaaaaggccatattagcctacagctaacattacactcagtggtgaatagttgaagactttttctctaacaacaggaaaaagacaaggatgcctactcttaccaattctattcaatgtagtaccagaagtcaaatgcagtagccaagcaattagtcaagaaaaagaaattaaaggtatccaaatcagaatagaagaagtaaaatcatgtgtttatagatgacatgagttcatatatagaaaaccctaaggatgcttcccccacccccatcaaatatagaatggtgccactcccaaaactcttagaactaataaatgtattcagtaaagttgcaggttacaaaatcagcatccccatatcagttgtgtttctacacactaacaataactgtgaagaagaaaacatttagagtagcatgaaaagaaatgaaatatttaataataaatttaaccaaggaagtaaaagatatgcacacagaaaactataaaacacatgagatatattgaagaagacacaaagaaacgggacagtattgtatgttcatggattagaagagttaatagtgttgcaaataagtccatgtacccaaagtgatctacagattctgtgtgaatcctatgaaaataccaatgacatttttcacagacataaaacaaatcctaaaattcatatgcaatttcaaaaggccttgaatagccaaagcaaattttagcaagagtagtaaggctggaagcacattactttcttatttttttttttgatacggagtctcactctgtcgcccaggctggagtgcaatggcaccatctcagctcactgcaacctccttctcccaggttcaagcaatcaagcaattctcctgcctcagcctcccaagtagctgggattacaagcgcccgccaccatgcctggctaatttttttgtatttttagtagagacggggttttaccatgttggccaggctggttttgaactgctgacctcaagtgatcttcccgccttggcctcccaaagtgctaggattacaggcatgagccactgtgcctrgcattttttttttttttttttttgaaatggagtcttgttctgtcacccaggctggagtgcagtgccatgatcttggctcactgcaacctctgcctcctgggtttgagtgattctcctgcctcagcctcctgagtagcctcagatgatccacctgcctcaacctcccaaagtgttgggattacaggcctgagccactgcacctggcccttactttctgatttcaaattatgttttaaagctacagtaattaatacagtatggyactggcataaaatcagacatatagacccatgaaacagattagcaagcgcagaaacaaacccaagcataggtacaagtgatcttcagcaatagtgtcagaaataaacaatggggaaaggatagtatctccaacaaatgatactgggaaaagtggatctctatatgcaaaagaatgatgttsgaccttcatgccatgcataaaaataaattcaaaatgcattaaaaacttacctgtatgagctgaaaccgtaaaactcctcgatgaaaacataggaaataagctccatgacattggtctgggcaatgatttttttggacattacaccaaaaaaaaaaaaacaggaaaaaaagcaagaataaacaactgagattacatcaaacttaaaagtcctgcctaaaaaaggaaataataaaatgaaatggaaaactatggaatgggagaaaatattttcaaactgtacatctgataatgggtcaatataaaaaatatacaagggactcatacaactgaattgaagataaaaagtaattaaaggacttgaatagatatttttccaaagaagacatacaaatatacatgggtatgggaaaaggtactttatatcaccaatcatcagagaaatgtaaatcaaaatcacaatgaaataatacatcatacttgttaggttggctgttattaagaaaaaatggtaacaattattagcaaggatttggagaaaagggaacccttcaacactactggtgggaatgtaaattggtagagccattatggaaaacagtatggaagtgcataaaaatttaaaatagaactaccatatgacccataartgccacttctgggtatgtatccaaaggaacttaaatcaatatgtcagggkgatatctgcactcccattttcattgcagtagccaaaatatggaaacaacttaagtatccataatggatgaatggatataaygtgcctatgcatacaacagaatattattcamccttaagaaattagaaaatccttccatttgtgacaacatggatggacctggaaggcattatgttaagtgaaagaatccaggcacagaaagcaaaataatttaggagctgaaaaggtgtaggctaaaatgcacaaagtttcagttttccaagataaataagctttgtagatctattatacagcagaattcccatagtgaacaatactgcattgtatacttaaaattttctaagagggtaggtgttttgttaatttttcttaatagcaacagcagcagcagaaaccatgacaaacaattatggtattaatgagggcagacggaaacatttggaaatgaggatctctttgtggccttgatgatgatgatattttcatgggtatattcatatccccaattcattgggatagatacaataaaaatgtrtagctttttgttttgttttgtttttatacaacattttcagcctttattgagagtacagtcatcatgccaaaattcatccatcaacatacaaccttatttcccatctaaagttaatgagaatgtattttattttaaatgggacatagaggcaacatgccaagaattaaagtacaaccataaagttttagttttacactttgaatatcaacaaagcagtaattcctaaaatcatgaaaacatgataaagtatctatacagaaaaaaatgaacatttaagtcatttcatgctttcttaatatcatatagtgaaaacagatgtacctataatttcagcctacagatagcatacttcataaggtcattattcatttaaaatagtacaaatgtttacaaagaacatttcacttaaatttcacagctgcttataaaatggtacttgcaagactgacctatataaagaaataagagtctcatcaaaagagatggtaaattataaatatataatatatcacaatgttaaaatcctcagtgcaaatcaataaagataatgatctttggagaggaaagtatttagctttacatatttactgtgaatttacatattaataagaaacacatttaaaccttgtcctgccacagaattattctgtggggggcggggggggsggsggggaaatgtactttttgaatatgtgtacaccaaaaccaaaaagttaacttttactttttcctttattggcaacttttgatgcatttttcggttttggttcccagagggcattttttacaaatcttgaagctgcacctctgtccagcttgccagcctttttcttgtctgttatttccttgactctgttcatatatactctgattctttccaattcctgttttactggatgttccttaggattaactccttgggttgccaaataaacccaaaacattgaatttaatgtgtatgcagaaaccaaatccacttttgcttgttcaagtggatccaacttctgcaacaactcatttctagaaacagacatcgtggtcttcagcatctcatccacagcaccaatggaattctcaaacgctgacaaatactcgtgaatttctactggatagtcttcattaatttcttcacctgccgttatggctgactcacggccttcgactccagyctcccggaaagcggtygggcaacgatgacgacartgacgcgccagctctgcccgcgccaccagcggcrctttccgatgatctcaccaatgtayagctttttatacacaaattacataccaataaagtgatttaaaagtataggataaaatatagaaactaggattttattaaattattatgcataaatttatatagtagcaggataggacaatcatgttggtctttgggggagctaatagacatattcttcaggatcttgtcagtgcattgtctagctgttcacctgtgcatattgagaaataaataaataggcatagatctagagggccttgaaattcttttgtaattgtgggacaaattgagatctcaattagatattgatttgttggatggtttgtgaagatatgattcctttttggtgaacagaatgcttagaactagtgttcagtcttagagatgaagttgttaagttagataagaacaatgtacattacctgaatcatgtggtctggacaggaaagcagtcctgttaaraattccttcatgacatttttctagggaggcatagatrttacaagtgaaggtaataggctgttttgcctttcaaagcgtctttagcccaagtgcatgcatcacaaatagtcaccttatgtcagaattggaatcataataattctaacatggcaaattcacattcgtgaatgaatttcagtgattagctagggcataggcaaggcaaaggcatccatgtggttaaaaagtaatgacagattctgaattcacatcatttaaaaaagtaacattgattacagacctaaatgtaagaaaataaaaccataaaaagggagggaattcaactcccaaaactgaaaacacctcgttcaaaattgaagcaaagttacaaggtaagcagtagactgggagaaaagatttgtgctcatacagtagaaaaaaggagtactaataagaatctataactccctaaaaacacataagaaaaataggcaaagtatayaaagaggaggtaactaagggaaagacaaaaaaattggccaataaacattttaagagatgctcaatctcaccgtgatcagggaagatataagacaaagccatgacttttttgtctacaaaatttaraagttttctaatatcaactattggcagagaggtagtggaatgaatactcttaccatgctaatataataraaatttccccctttcgaggacaatttagcacagtttagtaataacaaaagtgtatgccatgttatatagcaaatctctttttatctaccctcgggaaaggagtacaatgtgctcaagaaagcatataaaaggaattttttttgcatcagtgcgatggtagcaraactagaaagaacctgtttttgttagtaggagtatggctcaataatctatggtaaatggataataagggaatactatgaataactatgtgaccacaaattagataacttagatgatatatatctctagaaaaacccaaactaaactgtatcaagaagaacaagaacatgtgactgaacttataagtagtaaaagatttaattagtaattaacatattcccaccaagaaatgcttaggccagatgacttcactttttaatcctgtcaaatatttaaagaagagttaataccaggcctgtacaaactcttctaaaaaattaaagagttcacacttctcaattcattctatgagattagtgttactctgataccaaaattagacaatcacaagaacataaatatgatatttattttaagaagataaatatatgttatgaatatgaacatgaaaatccttaccaaaatactagcaaactgaatccaacagcatataaaaaagattatctatgatgaacatgtgagatttattttaggaatgcaaggttgatttaaaatgcaggtatcaatttacataatgtgtaatattgattaaataaaggagaaaaaattacatcagttcgctagattcagtaaatgcacttgacaaaattcaacatctttttatgatacaaagttccacaaaccaggaatagaaggaaacttccttaacctgatgaaggccatctacaaaccccatggtcaacatcatactcagtggtsagaatgaataatttctccctatgatcaggaacaagacaagacattcacttctattcatcattatagtggaggttctagcaagggcaattatggaagaaaaggaaataaaagtgtctgcattggtgaggaagaagtaaaactacctctatttgcaaatgacatgattttagatataaaaacatcctgagttctgctaaaacctattggaagtaatgaatgaattcatcaaggctgcaatatacatgatcaataaacaaaaacaatttgtatttctatacactagctgttatgggttgaattgtatcccctcaaaagatatgttgaagttctcaccccctgctacctcagggtgaccttatttggaaacagggttattcccgatattattagttgagatgaggtcatactggagtaggatgggcccttaatccaacgtgactaatgtccttataggaattggaaaagacagataaacatggaggaaatactgctaatgtaaagatagaracagagactggatttattctgccacaatccaaagaatgccagggactaacagtggctagaataggcatggtggtttccttccccagatatttcagagggagcatggctgtgccaacactttaattttggatttcaagtcatcaggctktgagaaaataaattcttgttgttttaaatcacccatatgtggtcttttattactacagccctaggaaacaaatacactaactatgaacatttcaaaagtgaaataaagaaaacaattccatttataatagcaccaaagagatcatacctgaatttaaaagaaatgcaagacttgggcactgaaactacaaaacatcattgaaagaacttaaagaacacctacagaaatggatagatatctcatcttcatagactgttaaacttaatattttttattttctttttaagaaacagggtctcactctgtcacccaggctggtgtgcagtgatgyaatcatagctcacttcagctgctaactcctaggcccaaggcatcttcctgcctcagccttctaagcagctaggactacaggcatgaaccaccatgcctggcaattaaaaaattttttttgtagggacagggtcttgctgtgttgcctaggctcgtcttgaactccaggcttcaagtgatcctcctgccttggcctcccaaagttctgtgattacaggtgtgagccaccacacctggctttaataatcttaagatagcaatacttcccaaattgtcctgcagattcaatgtaattactttcaaaattccagctgacatttttaaaaaactgacaagctgattctaaaactcatgtggaagtgcaaggaagctagaatagccaaagcaatcttaagaacaaagttagaagactcatacttaactgattttaaaacttaatacaaagctacagtaaccaaggcaaagtgttactggcataaggctagacatatagagcaatggaatagarttgaaagtccacaaataaacccttacatttatgaacaattgattttcaaggtaagatgattcaatgggggaaagaraagtctttttaataaatggtacttgggcagctggttatccccatgcaaaagaacgaggctggattacttatttttatttttatttttttttgaggtgaagtctcgctctgtcgctcaggctggagtgcagtggcacaatcttggctcactgcaagctctgcctcccgggttcacgccattcttctgcctcagccttccgagtagctgggactacaggcgcctgccaccacacccggctaattttttttttttgtagaggcggggtttcactgtgttagccaggatggtctggatctcctgacctcgtgatccgcccacctcgcctcccaaagtgctgggattacaggcgtgagccaccgtgcctggccttggattacttatttttgccatgcactaatgtcaaaattatcaaagaactaaatttaagagctaaaactataggcattttagaagaagcataggagtaaatctttgtgacattgggttaggcagtggtttcttaaatatgacatcagaagtacaatcaacaaaagaaaaagttagatcaactttatccaaattaaaaactcttgtgctgcaaatgatactatcaaaaacatgaaaaaaaaccactcatagaatatgaaaaatattcacaaatcatatatctgctaaagtacttagaagaatatataaagaactcttatacctcaataataaaaagataaataattcaattaaaaataggcaaaggatctgaatagatatttccccaaagaagatatagaaatgcccaataagcacatgaaaagatacttaacattrttagttactagattttttttgttttttttttgagatggagtctcgctctgttgtccaggctggagtgcagtgacatgatctcagctcactgcaacctccacctcctgggttcaagcaattcttgtgcctcagcctcccaagttgctgggactacaggcacctgccaccacaccyggctaatttttgtatttttcgtagagatggggtttcaccatgttggccaggctggtctcaaactcctgacctcagttgatcttcctgcctcggtctcccaaagtgctgggattacatgcatgagccactgggcctggctgtcactagttttaattgcaaatcaaaactacaatgagataccactttacacccactaggatggctatattcaaatagacaacgcaatgatttgttggcaagtatgtagagagattgggaacctcataatgggaatttaaattatgtatctgctttggaaaagtttgccggttcctcaaaatgttaaatacagagtctgcatatgattcagaaattctgtgtctaggtttatacatgagataaatgaaaacacatgttcacacaaaaacttgtacataaatgttcataatagcattattcataatggcagaaaagtggaaacaaacaaaatgtccttaaagtgttggataaataaaatgtgggatatccatataatggaatgttatttggcagtaacatagataaacatagattatttgttgaaaataatctatggtctatccatactgtggaacaatgtcaccaaactgtgtcagcaaactgtggaacaatgtcaaacctaacctgaaacttatttttgtaaataaagtttaattggaatacagccatacgcattgaagaatagtgacagagaccatcaggcttgcagaatctaagatacttactatttagttctttacaactcctgctatggaataatcattagcgcttaaaaaaactgggaaagatctatgtttatggacatgaagaaatctcagacattaagttaagtgaaaaagtaagtttggaacaatatatacagtgatgtcatttatgtgaaaaagaaaactgaaatccaayccactaataaaaattacagaatggaaaagttacatgcagtattgtgtaaatgcctagaacaagtcctggaaaggtaacagtgatccaatatttctagggagagtattaaatttttgaagtgctaatcaaagtgtccgttaaacttcatctgtattaaaatctttacaaagaaaatgtgtgtgttaggtgggaattgaacaatgagaacacatggacacaggaaggggaacatcacacaccgggractgttatggggtggggggaggggggagggatagcattaggagatatacctaatgctaaatgacgagttaatgggtgcagcacaccaacatggcacatgtttgttacatatgtaacaaacctgcacgttgtgtacatgtaccctaaaacttaaagtataataataataaaataaataaaaagaaaaagaaaaagtgggatgcaagggagggcagaataaaacagcagcaactaattactgaataccaaaagaaaaaaaaagaaaatgtgtgtgtttcataaattaaaatataaatgtacaattataaacacactttttttggtttatttttcagagctgtaaatgatcaagttttgttagatgctgtaagtatagtactctcaatttgaaattacactttgtccttgagttcttaacagattctagaaattgtyaggatacataatcctatataaagatccaatccttacttagtttatttaagagatttgtatgcatatrtgaactttctggaaagccttgtctattttgttcattttactctcattatcactcagaaactcttcacttctgaaatactaaactataatatcctacagtcatctgaatagttccagtccttgacacgtgtrgatcttttatgyctttcagctccaattattgtgtcactctacagactgatatcaatgtttcattcttttcatgagttaatgaagactttcttaccttaataattaaatatctgaataacctttctacattgagagttttactcttcattattactaaaattatttgtttttaggaatacaaacagatgcagtgtgattttcagttgttatcagaagagaagttggtgctggaaaatgaactacaaaagttgaaggacaaagaggttggaaaaattttagtgtttgaaaatggcatacacctaataaggcttattatgttaggatagaaatcaaagagctatttaaatgttatataatatgtttttactattaataattcrtagcagctatgctttaaaaataaaattatgccatattctaaattatcatattaggtgtcaaaaccaaaaggatgccatgaaaaaacagataaaatttaaacatctgaaaagacatttctaggccaaatatttaactttattaaactaacggtaaattagttttcaaatatattgtaaatgcattttgtggtattttctacaattatgtaatgtgtgtgtcccagttcattataccaaatagagtaaatagaaatagaaatgcaaggataaaggaaaatttgtttcctcttgtattttattattctctttgccrttgttagagagcttacaaattcaaactacagacaataaagtcaaatacattagaagtgaacttttattaaccacttaagaaattaagatatatgattgaggaaaaatactaaatttcaataatgttggttgcttgatatttcttccttactaggtgaggaagcagaaatcatacaggagatttgctgtttgatcagttagagaaggagtagtcttacacaggtgtcaaatataagatcagggctgtcatatatgttcagtttaggaatagttttcctttaggtatcatgccaaataggaatagaacattggtacaaaaaaactaaaaatagtaaattgtcatgttgaagaactgagtagtctgaccaagtgtgagaattttgcagcatmctaatcacacactgttagaaccacattgaaaaaacgctggagcttcttagatggcttgaggatgttgcagcagtttctggttttgcttccttgtgtttcttcaggtgttttgtctctaattctgctctagagagcaatggtttttgcatgaacttcaatatatgatctaggatacaacaaggttttcttgtttaatgcgtagaaactttggtgctcatttggtaggttagactcttacccattctttaaaacatttaaaaaatttttatttttgtgggtacatagtaggtgtatatatttatggggtacatgagatattttggtacaggcatacaatgtgtaataatcatatcatggaaaatttggtatcctccttaagcacttatcctttgtgttgcaaataatccagttatacttttttagttattcttaaatgtacaattaaatcactattgactattgtccccctgttgtgctatcaaatactaagtcttattcattctttccaactacattttttgtacccattaaccatccccacctccttctcacactccaagcctctggtaaccatccttctattctctatctccatgagttcaattgttttgatttttaacccccacgaataagtgaaaacatgcaatgtttgtstttctatgcctggcctatttcatttaacataatgacttccagttccatctatgttgttgcaaatgacacaatctccttttttatgactaaatagtactccatcgtgtatgagtattacgttttctttttccagtcatacgctgatggacacagaggttgcttccaaatcttggctactgaaaacagacctgcaactaacatgggagtgcagatgtctctttgatattctgatttcctatttttgggatatatacatatcaataggattgctggattgtatggtagctctatttttagttttttgagcaaccctcaaactattttccatagtggttttactaattcacattctcaccaacagtgtatgagggttcccttttctccacatcatccccagcatgtgttattgcctggctcttgaataaaagtcattttaactggggcaagatgatatttcattgtagttttgatttgcatttctcagatgatcagtgatgttgagggcctttttatatgcctatttgccatttgtatgtcttgttttgagaaatgtctatttgaatcttttacccatttttaaattggattattagattttttttcctgtggagttgtttgagctccttatatattctgattgttaatccctcatcagatgggtagtttggaaatattttttctcattttgtgggttgtctcttcactttgtagattgttttctttgctgtgcagaagctttttaacttggtgttatcccatgggtccatttattttttggttacctatacttgtggagtattactcaagaaatttttgcacagaccaatatgctagagagtttctccaatgttttcttggagtagtgtcatcatttgaggtcgtagatttaagtctttaatccattttgatatgatttttgtgtaaggtgagagagggttcaagattcattcatctgcatatagctatccagtttcccagcaacatttattgaagagactgtcttttcccccactgtatgttcttggcacctttcttgaaaatgagttcatcgtaggtgtgtggaattttttctgggttctcttctgttccattggtctatgtgtcggcttttttgcaactaccatgctgttttgtttactgtagctctgtagtataatttaaagtcaaataatataatttcttcagttttatttcttttgctcaggatagctttggctattctggggcttttgcgatttcatataaatgttaggatttgttttatatttctgtgaagaatatcattgatattttgacagggattacactgaatctgtacattgctttgggtactatggacattttaacaatattgactcctccatctatgaacatggaatatctctccatttcaatttctttcatcagtgttttatagttatccttgtagagatctttcacttctttggttaatacgtaggtgtttaatttgtggctattgtaaatgggattacttgtttgatttctttttcagattattcactgttggtatatagaaatgttactgatttttgtattttgatttgtatcctgtaactttactgaatttatcagttctaagagttttttttttttttggccagtctttagatttttccaaatataagatcataccataccatctgcaaacaaggataatttgacttgttcctttccaatttggatgccctttatttctttctcttatctgattgctctagtgagaacttccagtactatgctgaacaacagtcatgacagtgggcattcttaccatgttccagatcttagagaaaaggctttcagttttttcccattcagagtgaaactggctgtgggtttatcatatgtggcttttattatcgttgaggtatgtttcttctgtagccagtttttagaggatttttatcatgaagggatgttgaactttatcaaatgccttttcagcgtcaattgaaatgatcacatggtttttgtctttcagtctgttaatatgatgtatcacattgattgatttgcatattgtgaatcccacttggtcatgatgaatgatccttttaatgtattggtgaatgtgttttgttagagttttgttgagaattcttgcatcaatagtcaccagaaatagtggcatataggcctttcttttgaagagcttttgtctagatttgatatcagggtaatgctggtcttgtagaatgagtttggaagtattccctcctctagtatttttgggatggttttaatagggttggtattatttctttaaatgtttggtaaaattcagcagtgaagccactgggtcctgggctttccttactgggagactttttattatggctttgatctcgttactttttgttggtcagttcaggttttggattttttcatgtttcaattttggtaggttatatgggtctagaaatttatttcttttagatttttcaattcattgatgtatagttgctcatagtagccactaatgattctttgaatttctgtggtatcagttgtaatatctcctttttcatatctgatttttatttatttcagtctttctcttcttttcatagtctgactaaaggtttgtcaattttatttatcttttcaaaacaccaactttttgtttcattgatcttttgtattgttttcttcatcagaaattcatttatgtctgctctgatctttattatttcttctactaattttgggtttggtttgctgttacttttctagtttttttgttgcttcattaggttatttatgtgaaatttttcttcttttttgatgcaggcacttgtagctatgaagtttcctcttagtactgtttttgctgtatcccataggttttggtatattgtgttttcattattatttctttcatgaattttttcagttcccttcttaatttcttcattgactgattggtcattcaggagcatattttttaatttccatgtgtttgcatagtttccaaaattccttttgttattgatttgtggttttatttcattgttgtcagggaagatgcttgatattatttcagttttatttgaatgttttaagacttgttttgtgacctaacatatggtatatccttgaaaatgattcatgcactgcagagaaaaatatgtattctgcaacygttggatgaaatgttctataaatatctgttagttccatttgttctgtagtacagattaagtttgatgtttctttgttgattttctatctcagagatctttccaatgctaaaagtagggtgtttggccaggggcagtggctcacgcctgtaatcctagcactttgggaggttgaagcaggcagattgcctgagctcaggagttcaaaaccagcctggacaacacggtgaaaccctgtctctactaaaaaatacgaaaaaattagctgggcatggtggcaggcgcccgtagtcccagctactcgggaggctgacacaggagaattgcttgaacctgggaggcagaggttgcagtgagccgagattgcactactgcacaccagcctgggtgacagagcaagacgctgtctccaaaaaaaaaaaaaaccgtagggtgtttaagtctccagctattattgtattgatatctatctttctctttagctctaataatatttgctttacatatctgggtgttccagtgttgactgcatatatatttacaatcattatatyctcttgctgarttgacctctttgtcattatataatgaccttttttgtctcttcttacagtttttgtgttgaaatctattttgtctggtataagtagagttactcctgctttttttttggtttccactggcatggaatatctttttccattcctatattttctgtctatgtgtctctttataggtaaagtatgtttcttgtaggcaacaaattattggttcttgtttttttttyaatccattcagccatcacatatcttttgattagaaagtttagtccatttacattcagtgttattattcataagtagggacttgctcctgccattttttaaatttgttttctggttgttttacagccttatctttcttccttctgtctttttttttttttttagtgaaggtgactttgtctggtggtttgctttaatttcttgctttttattttttgtgtattccttgcttgttttttgatttgaggttaccatgaggcttgcaagtactatcttataacccacaactttaaactaatgacaacttaacactgattgcatgaacagaatacacgtggaaagaaaactcataaaaactctacgctttaatttcatccacttgtttgttaattgttttctttttgtactgtgtcttgaaaaagctggtatagttattatttttgtttgttttatcactgagtctttttatttaagtcaagagtagtttacacaccacagttatggtgttacatgattctgtgttttcttgtgtgcttactattaccagtgagttttgtaccttcagatgatttctcattgctcgctaacatcctttcctttcagataaaagaatttcctttagcatctcttatgggacaggtctggtgttgataaaatccctcaacttttgtttatatggaaaggtctttatttctctgcaatgcttaaagaatatttttgccagctatactattctagggtaaaaggttttttccttcagatcattaaatatggtatgccactttctcctggcctgtaagttttccactgaaagtctgctgccagacatatttgaggtctattgtatgttatttgtttcttttctcttgctgcttttaggatcctttccttatcctttatctttgggagtctgattgttacgtaccttgaggtagtcttctttgggttatattttcttgctggtctataaccttgtactggaatgttgatatatttctctaggtttgggaagttgtttgatattatccctttgaataaactatctaccccatctctttctcctgttcaaggccaataactcttaaagtgccctcatgaggctgttttctagatcttgtacgtgtgcttcattgkgtgttttttttttcttttgtctcctctgtctgtgtattttcaaatagggggatgggggagggatagcattggacaaatacctaatgtaaatgacgagttaatgggtgcagcaaatcaacatggcacatgtgtacatatgtaacaaacctgcaygttgtgcacatgtaccctagaacttaaagcataataaaaaaaaaagaaaagaaaaaaaaacccaaatagcctgtctttaagctcaataattgtttctcttgcttgatcaattctgctattaagagagtctgatgcattcttcagcatgtcaattgcatttttcaattccagaatttctgcttgattcttttaaaatattttaatctctttgttaaatttatctgatagaattctgaattccttctctgtattatcttgaatttgagttttctgaaaacagctatttgagttctctttctgaaaagtcatatatctctgtttctccaggattggttcttcatgccttatttggttcatttggtgaggttatgttttcttagatggtgttgaagcttgtagatgtttataagggtctggattttgaagagttagatatttattgtagtcttcacagtctgagcttgtttgtgtctgtccttcttgtgaagacttttaaagtatttgaagggacttgggccccaagcccaataatgctgtattttttgcagactcttagaggtatcaccttgatggtcttggataagatccagaaggattctctggattaccaggcaggaacttttctttttttcccttactttctctcaaaggaacagagtctctctctctctgctgagccatctggaactgggggtgtgttgtgcaagcacccctgtggtcaccaccattgagactgcaccaggtcagacttgaagccagcacaggactgggcctttcccaaggccctttccttcagggtggtgtgttcccccaagccctaagtgtgttcagagatgctggctgggaggcagggatgagagtaaaaaccttagcattttacctgatgttttctgctatggctaagctggaactcaacccatgatacaaagttcttcccactctgccttgcataggcagagaagcccctccctgtggccaccaccacaaatgggtcatgagggcttctgcctgtacacaccgttgatgctgacttaaagctcatggtctcttccttcagcttgtggtgaatgcttccaggcctgggactcacccttcagggcagtgggttcccctctggcccaggtaaggtccagaaatattgtccagaagtctcagcctgggctcagggaccccaagagcctgctcgttgttctaccccactgtggttgagctgatacctagggtgcaggacaaagtcacctttacgtttcccccttattttctcaaacagaaggagtctttcaccataacctctatagcttggaatgtcctgagtcacccttgaagcccccatgtctcagagcccaggcccacagtgtactctgtgcatatcactggtggttattcagggcccagggctctttattcaggaggtgatgactcctgctagtactgggtccttcacttcaaggcagcatgctcccttttggcccaggatgtgattagaaatgtccaggagtgagggcctggaatagttggcctcatgactctccttggtgccctatcctactgtacctgagctagtatccaagatgcaagacaaagtcctctttactctttgctctcttctccttaagcaggagggagtcactttcgttgctgagctgcattgcctggggttgggggaagggtggcacaagcattccctttgccataccaggtggtatcttcgtaggtcacgtgccacccaagtttactggctttaagcccaaccctagccctacaaatagtctagaaattgcagyccatgtgtcctagactgcctttcaagtgtacctgrgaccccagagcccttcagtccatgatgttgaggattgccaagaaactcaagctcggccactagtatggtcacttcccctctggcaagggctggtgcaaatgctccctccatgtgtgggtgctggctgagcccagcatggctttattctctgctgtgacagggcagcgctgggttcattgtaaagtccccccactgttgtgctctccctccccaaagtgcacagattctttctccaccccacatggctgctgcactgtgatagcggatgaatagcatcagcatttaatactgtctcttctgccctcctcaatgcctcttttggcaatatgaagttaaaacgaggaactgcgattgctcacctgatttttggttcttctgatggtgctttcctgtgtgtagatagttgttaaaatttggtgttccaayagaggggacgaacagtgtagacttctattttgccatcttgccaccaccatttttgtctcagcccgtgcacatcatttctgcttcactcttcacttaagctttcagtattctaaaatatattaaagtctgctggaccacatttctaatactatataaatgtgaaatgtagtcaatgaatgactttaccttctcttgttataaattacttaaagaatttctcataatgatgcagatgtgcgaaggagaactgtggaagtaattgttatatccacacaagggtagtgaccaagaaatctgagaagtagtctgttttcagagaaggaaatttaacatggcaattggtgaaataggatggtgggtagagaataatggttatggaatatgtagaacacaggatttctaatttttatttttatttttaatttttttatttttataaatttatggggtacaagtgtaatattgttatatgcatagactgcatagtggtgaagtcaggacttttaagttctccatcactcaaataatgtatgttaacatacccattaaataatctctcatcatctacctccctgcctacccactgacccttccaagtcattcctcactctaagtccatgtgtacacattgtttagcttccacttgtaaattagaatatggggtatttgtctttctatgtctggcttgtttcacttaatataatggcctccagtttcatccatgttgcttcaaatgacaggattccatcctttttatggctgaatggctgaataatattccactgtgtatatgtagcacgtttcttttttttttaaattgtaataggtttttggggaacaggtttttggttacatgaatagkttctttagtggtgatttctgagattttggcgcatccatcacccaagcagtgtacactgtacccaatgtatatttatccctcacccccctcttatcctttcccccgagtcctcaacacccattgcattattcttatgcctttgcatcctcatagcttaggtcccacttatgagtgagagcatacggtgtttggttttcgattcctgagttacttcacttagaataatggtctccaaatctatccaggttgctgtgaatgacattatttcattcctttttatggctgagtagtattccatggtattccatggtatatgtatgtgtgtgtgtgtgtgtatatatatatacacacacatatatatatrcatatatatacacacacatatatatgtatatatacatatatacgtatttacgtatatatgtatatatacatatatacgtatttacatatacacacacattattccatggaatacttttatatatatatttatattttctttatccactcatcgattgatgggcatttgggctggttccatatttttgcagttgcaaattatgctgctataaacatgcatttggaaatatcttttttgtataatgacttcttttcctctgggtagatacccagtcgtgggattgctggatcaaatggtagatctactgtctacttgtagtttatttttattttattttattttatgttattttttattttgagatggagtcttgccctgtcacccaggctggagagcaatggtgtggtctcagctcactgcaacctctgcctcctgggttcaaatgattctcctgccttggcctcccaagtaactggggattacaggaactcactaccacgcctggctaatttttgtatttttagtagagatggggtttcacatgttggccaggctgggcttgagctcctgaccttgtgatctgcctgcctcagcctcccaaagtgctgggactacaggcatgagccactgcgcccagcctacttgtaatttttaaaggaattgccacactgttttccatagcagttgtactagtttacattcccaccagtagtgtaaaagtgtaccctttttactatatccacaccaacatctattattttttgattctttgattatggcsattcttgcaggagtaaggtggtattgcattgtggttttgtatcatatttccctgatcattagtgatgttgagcatttttttatgtttattggccatttgtatatcttcttttgaaaattgtctattcatgtccttagcctgctttttagtgggattacttgttttgttcctgctaatttgtttcagttccttgtagattctggatattagtcttttgtcagatgtatagattgtgagaattttctcccatgctgtgggttgtctctttactctgttgattgtttcttttcctgtgcagaaggtttttagtttaattgagtcccatctatttatctttgtttttgttgcatttgcttttgrgttcttggttatgaagtctttgcctaagccaatgtctagaagggtttttccatgttatcttctagaakctttayggtttcaggccttagatttaagtctttgatccatcttgagttgatttttgtataaggtgaaagatgaggatccagttacattctcttacatgaggcttgccaattatcccagcaccatttgttgaatagggtgtcctttccccactttatgtttttctttgctttgtcaaagatcagttgactataagtatttggctttatttctgggttctccattttgtactggtggtctatatgcctgtttttataccagtaccacgctattttggtgactatagccttatagtatagttggaagtcaggcgatgtgatgcttccagatttcttctttttgcttagtcttgctttggctatgtgggctcttttttcattccacatgaattttaggattgttttttctagttctgtgaagaatgatgttagtatttttatgggaattgcattgagtttgtagattgcttttggcagtatggtcatacatacctcaaaataataaaggtcatttataacaaacccacagctaacactatactgaatggggaaaaactgaaggccttttgtccaaggaatggaacaagacaaggatgcctactgtcaccacttttattaaacacaacactgtttatgttttaaatgggatggttttcttgatttctttttcagttaagtgaaatggtatataattrgtactgttttttgtatattgattttgtrtcctgcaactttattgaatttgttcatcagttctaacagttttcttgggggttgactctaggtttttctaggtataaggttatattatctgtgaacaaggctaattagacttcttcctttacaatttggattccctttatttctttttgttacctaatttttctggccaggacttccagtgttatgtttaataaaagtggtgaaagttgacatccttgtcttkttccagtccttggaggaaagaccttcaatttttccccattcagtataatgttagcttgggtttgttatagatgatctttataattttgagttatgttccatctatacctattttgatgaggrtttttatcgtaaaggatgttgaagtttatcaaatgctttttcagcagctattgaaataaacatggtttttcttcctgattctgttaatatgatatatcatgtttattgatttgtaaacattgaaccatctttatgttcctgggatgatggatcttacttgattatggtgattgattctttttttttgagacagagtctcattctgtcacccaggctggagtgcaatggtgtgattttggctcactgcagctttggcctcctgggctcaagcaatccttccccctcagcttccctagtagctggaaccacaggtgtgtgccaccatgcctggctattgttctttatcttttacagagatgaggtctcactatgttgctcaggcttgtcttgaactcctggatggaagtgatcctcctacctcagcctcccaaaatgttggaattatatatgtgagccactgcacctagccatgaatgatctttaaaggtgttgttgaatgtggtttgtattttgttgcagatttttacatctatgttcatcagtcatatgggtgtgtagttttcgttttttgctgtgtctctgtctggttttgatatcaaggtaatgctggccttgtagaatgcatttggaagcactcccttctcttctacttttgaaggatttgagtaggattggtattagatctttaaatgttcagtaaaatccagcagtgaaaccatcaggtcctgggtttaactttgttgggagactttctattacaccttgatcttgttacttattattggtttgctgatgttttctatttctccatggttcaatcttggtaggttgagtgtgtccaggaatttatctatttcttctaggtattccaatttgttgactattgttgttcatagtagtctctagtaattctttgtattctgaggtctcagttgttatttctgctttttagcttctgattttatttatctgggtttttctcttttttcttagtctaaaggcttatcaatgttgtttatcttttcaaaacatcaactttttctttgttgattttctgcacatttcttagtctcaatatcatgtatttctgctttaatcttcattatttcttttcttctacttattttgggtttgatttctttttccttttgtagttccttgaggttcatcattaggttatttgaagtctttctacttttttccttaacattggcgtttattgctataaattttcttcttaatgcctttgccatattccataaactttggtatgttgtattcccattttcatttgtttgaagaaatttttaagtgtcattcttaatttctttattgacccattggttgtttaggaacgtggtaacatctatgtgtttgtgtattttttgaggttttccttttgttaattgatttatagttttattctatttaagttacaaattatacttgatatgatttctatgttttgcatttgttaagatttgtttggtagcctaagatatggtctatcctggagaatgctccaatattgatgaaaacaatgtgtattctgcggcagttgggcaacatgttctgtaaatgccagataggcctattacattttgtgtgttgtttaaagtcccttactgttattgtattacagtttatctctccctagagatctatactttagttaatgtttgctttatatatctgggagttctgttgttggatgcacagatatttatagttgctacatgctcttgctgaattgacctctttattattatatagtgactttgtctctttttgcaatcttagatttatagtctattttatctaagtatagctactcctgctcttttttggcttccagttacatggaatatatttttccactccattcactttcaggctgtgtgtgtctttagggtttcttgggagcagcgtatcattgagtcttgtttctttactcattcagccactctatgggttttaattgaagaattgagaccatttacactcagtgttattgtttataagtaagatcttactatgaccattttgatgcctgttttctgattgttttgagtccttcttttctttatttcttactgttttcctttgtggttaagtaattttttatgataatatgttctgatttattgcttttgacttttagtgaatctattacatgtttttgtgatgtggttactattaggcttacaaagaacattgtatagatataacaagttgttttaaagagatgataatttatctttaatcccaaataaaagaatagaaacaaaggaaacacacacacacacacacacacacacacacacacacacacacacaattctacactttaacttctcccccacattttgactaagttgtctcaatttatgtattttatattaccaatctcttaacaggttgctgtaatatttttatttttgatagacttgtctttggacttcataatagatttatgagcaaattgcacaccacagttgcaatatagagtattttgggtttcttcatgtacttaattttaccaaggcgttttatacctggaaaagtttttttttattttgcacgttggtgttttattttttttcagattgaagaactccctttagcattttttataagatgggtctggtagttgtgaattctctcagctttattttgtctggagawgactttatatctccttcatatttgaaggataattttgatggatacaatattcttgaatggaagttgtcttctttcaacactttgaaaatctcattctaytgcctcctggcctgtattattttcattgaaaagtctgttgctaggcaaattggagctttttaatatgttatttgcttcttttctcttgcttcttttargattctctttgtccttgacctttgagagcttcattattatatgtcttatgtagtcttacttgggttgaatctktttggtgttctcagaatttcttttacctggatattgacatctttcagaagttttggaaagttttctgttattatttctttgggtaagttttctacccctttcttttcctcagctctctcttgaacaccaataatttttagatttggttctttaaaataattttctatatcttgaaggtaatttttattccttttcattctttcttcttttttctcctttttgtattttcaaatagccaatcttagatttcactgaatttttctcctctacttggtccattctgctgttgagagcctctaatgagttcttcagttcagcaaatgtatttctcagttccaagatttgtttgagttttaaaaaattattttaaacttgttgttaaatttatctggtatatttctgaatttcttttttgtgctaccttggagatcactgagtttccttaaaactgttgttttgaattcttgttccragaactcatgaattaacatcttgttatggtcagtcatggtgtttttgctttgtccttttggggaggttatgatttcttgtttgctgttgtttcttgtgggtatatgcctgtgcctttgctttgaagaattacttatttattcccattttctcgttctggaaaaaaatggatgtatttgcttagcaagtatttatcactggtttgctgcttttttgggggygctcttggtggctccttaaatcctggttgacctcagctctagtaaatgatgagagtgctgcttgtctggaattggggaggtcccaaaaggtttatcccagcagtgtaggaaggctggccagggatttgggccaaaggatttgggaatgaatattccttctacgatgtggtcctgctgaatagccactctgacttgacatctcctttggtcaagttacagagtttccagggctggggatggtagttttacttttcttctttgtctttgtctgttgttggtaatatttctccctttaggcagtcataatgcttcctgagggttaaagcaagtacaggtctcctgtcaaggaacccagcattggtgggaaagctggttgaccccctcattctcactttttgcagtgtagaaacttggagttgggggaagattttcttctgcatgcttgtcgcaggacagaatgtgaggaggggcatcatggatgtggaagtccgattttcctaccatctgcccggagttttttcacttctctgggtgaaaaactccgggcagatggtaggaaaatatgtcccatccttatatttatgttctgggttgttgctggtgaaaatctcagtgctctgtatttaacttatgagaagattgccactatagtgaatttggtatccattgggagttgtggtttaaaacaagaaataaccacctaatgccttaataggtaattattattaagctaatctaatttttaaaaatatttaaagaagtttaccctgagccaaatatgagtgaccaaggcaattgggttacagtttggttttatacattttagggagacataagacatcaatcaatacatgtgaagtatacattggtttcgtcaggaaaggtgggacaacttkaaggaaggatgcgtgtgtggggtgcttacaggtcatakatggattcaaggttttctgactggcagttgattgaaagagtcaagttattattatccaaagatctggaatcaatagaaaggagtgtctaggtaaagagaaggggcttggagaccaaggttcttattatacgaaatctcataggtggctgcccttagaaacaatagatagcaaatgtttcctgtttagacctttaagaggtgctggactctcagctaatctcttcaaggttgggaggaaaggggaaagatattacgttaattacgttaatagaagttatttgcagatgcagatttccctggtagaagatggctttgcaggactgtttcaaaatatggcaaagaaacatattttggggttaaatatttggatttccttctttatctgtcatgtgatgtgatgccagagtcaggttggatagtaagcaatgttatatagggttaaataaaatgcatctatttagattttatggtttatagggcatgtcttcccagaccccttaaataggaatttcagcaagagagagaaaaggtcaaagtttagtccttgctgggatagccaggttgctagtttactctagaagtaacccctccctcactttgtttcttgctgcacatgtatctaactacccgtttgcttgagaattccaaaagctaatcttgaaacaatccaggcaggaagcagagagggtggttgcaattttctcccttccaggaagaaattggagcagttagtctatgatcagacccctgcagaaattacaccagccaggcctgtggatggtctgttaccccagctagccatcagaaaacaacaagcagacctacaccccatgcctctcctgtgcatcatttccatgccacctttccccttaaacatcctctaggcagcttgagattttgagatggctttttgagacttgagtcttgctgtctcacaagctgctagcacttgaatatacctgttttctcccagcaaacctcacacttcggttaacttttattttaggtttaggggtacatgagcaggtttgttatataggtaaactgcatrtcatgggtgtttggtgtacagataattttatcacctgggtaataagcatagtaccagataggtattttttctaatccccttcctcctaccactctccactctcaagtaggccccaatgtctgatgttcctctcctagaatccatgtggtcttgttgtttagctcccccttataagtaagatcatggggtatttggcactagccatttggataatggcttccagctccatctgtgttgctgcagaggatattatctcattattttttatagctacatagtattccatggagtatacatatcacattttctttatccagcccaccgttgttgggcatttaggttgactccctgtatttgctattgtgaayagtgctgcaataaacatatatgtgcatgtgtcttcatggtagaatgatttatatattcctttgggtatatacccaacaatgagattgctgggtcaaatagttattcttttttaagttctttgaggaatcactacactgctttctacaatggctgaactaatttacactcccaccagcagtgcataagtcttcccttttctcctcaacctcactggcatctgttactttttgactttttaataattggcattctgactggtatgagatggtattttattatagttttggtttgcacttctctaatgattactgatgttgtgcattttttgtatgtttgttggctacatgtatgtcttcttttgaaaagtgtccattcatgtcctttgtcccctttttaatggagtcattttttccttgtaamtttgtttaagttccttatagattctggatataacacctttgtcagatgcatagtttacaaatattttctcccaatctctaggttgcctgtttactctgttgatagtttcttttgttatgcagaagctctttagtttggatctcatttgttaatttttgtttttgtcgaaatggcttttggcatctttatcatgaaatctttgccaagtcctatgtccagaatggtatttcctaggttatcttccagagtttttatagttttgggttttcatttaagtctttaattgattttaagttgatttttgaatgtggtgtaaggtaggggtacagtttcagtcttctgcatatggctggccagttattccagcctcattttttgaatggggagtcctttcttcattgcttgtttttgtcaggtttattgaagatcagatagttttaggtgtgcagccttatttctggcttctctrttctgttccattggcctaggtgtctgtttttgcacctgtaccatgctgttttggttactgtagccctttagtatagttttaagttgggtatgtgatgcctctaactttattctttttgcttaggattgccttggctattccaactcttttttggttccttacgcattttagaatagttttttctatttctgtgaagaacgacattggtagtttgataggaatagcattgaatctttaaatcactttgggcagtatgaccattttaacaatattgagtctccctatccatgagcatggaatgttttcccatttttttgtgtcatctgatttctttgagcagtgttttaaagttctcattgtggagatctttcacctccctagttagctatattcctagatattttattctttttgtggcagttgagaatgggattgtattcctgatttggctcttggcttggatgttgttgtataggagtgctactaattttgtatatggacttcrtaccctgaaactttgctgacgttgttcatcagctgaaggagattttgggccaagcctatggagttttctagatatagaatcatgccatcaaacaggggtagtttcacttcctctcttcctatctggatgccctttattgctttcccttgcccgattgctcttgccaggacttctaatattgtgttggatagaaatggtgagagagggcatctttgtcttgtgctggttttcaagggaaatgctttcagcttttgcctattcaatatgatgttggctgtggttttgtcatagatagcttttattattttgatgyatgttccttcaatgcctagtttattgaaggtttttaacatgaagagagttgaattttattgaaagtcttttctgcctctgttgagataatactatggttttggtttttagttttatttatttggtgaatcagatttattgatttgcctatgttgaatcaactttgcatcccagggatagagcctatttgatcatggcggattacgtttttgatgtgcttctggaagcagtttgctagtattttgttgaggagatttttgcatctatgttcatcaagatattggcctgaagttttctttatttgttgtgtctctgccaagttttggtatcaggatgatgctggcctcatagaatgagttagggaggagtccctcctcctcagtttttttgaataattttagtaggaatttagtagcaatcatttagtaggaatggcaccagcgcttctttatatatctggtagaatttggctgtgaatctctctggtcctgggctttttttttggtaagctttttgttactaattcaattttggaaattgttattggtctgctcagggattcagtttcttcctggatcatttttgggtggttgtatgtgtccaggaatttatccatttctagtttgatgtactcatttctagtatagattttctggtttgtgtgcatagaggcgatcatagtagtttctgatggtgatttgtatttctgtggtgtcagtggtaacatctgctttgtcatctctaattgtgtttatcaggatcttctctctgtttttatttgtgtagctagtggtctatcttattatttttttttataaaaccaatttctggatctgttgatcttttgtattttttttgtatctcaatttcttcagttcaattctgattttkgtacttcttgccttttgcttgccttgaggttggtttactcttcttcttctagttgtgatgttaggttgttaattttagatctttctaactttttcatgttgggcatttartgttataaacttccctcttaacactgccttagttgtgtactagattttctgatatgttgtatctttgttctcattagtttcaaagaacttcctaacttctgccttaatttcattgtttacccaaatgtcattcaggaggaggttgtttaatttccgcataattgtatggttttgagtgattttcttagtcttggtttctatttttattttgctgtagtctgagagtgtggttggtatgattttgatttttttttaacttgctaaggattattttattgccagttagattttttggagtatgtgctatgtmgtgatgagaagaatgtatattctgttgtttttgggtggagacttgtgtagtgtctatttgtccactagtcaagtgttgagtttaggtgctgaatatctttgtttattttctgcctcaatggtctaatactgtcagtggggacttctgtttaatagcaatctcccactattattgtgtgtgggtctaagtcygtaggtccctaagaacttgcttaccctgggtatcaatctgggcggtcctatgttgggtgtgtatatgtttagaatagttaaatcttcttgcagaattgaaccctttaccaatatgtactgcccatctttaccttttttgatctttatttgcttaaagtcccattttgcctgaaattaggtttgcaactcctgctttttcctgttttccatgtgcatggtaaatttttctctgtcttttaattttgagcctatgattgtcattgcctgtgagatggatctcttgaagatagcatacccattgggtcttgcttccttttccagcttgccactctgtaccttttaatttgggcatttagcccatttgcattctctgttaatattgatatgtatgggtttgatctcgctatcatgttgttagcatttgattgcctgaaaagatcttatttctcttccacttatgacattcagtttggctggatatgaaattcgtggctggaaatttttttctttaggaatgctgaatataggctacccccaacccagtctcttctggcttgtagggtttctgctgaaaggcccacttttagcctgatgggtggggttctttttgtaggtgacctgcacattctctctagttgcctttatcattttttctttcatgttgacctttgaaaatctgacgattatgtgtcttggggattatcttcttatgtaatacctttcaggggctctgtrtatttcccggatttgaatgttgtcctctctagcgaggttgggtaagtgttcatcaatgatatagcaaaatatgttttccaggttgcttgctttttccccgcctctttcaggaaccaatcagtcatagatttgacctctacctaaccccaaatttctgagttttttttttttcattcttttttctttgtttttgtctgattgatttattttagagagccacaggggtggatagagttgctcgccctgccttctgggtgtttccagggtagcaggaggcaaattcaggcagaagtaggaccaytgagctagaagctctagcaggcatggctcacctggctaccagcagtgggggtgggcgaggatgcctgctctatagtctagatgcttcctggaacaacatgaaggtgcaccctctcactgagtttacacagaaacatggccactgggctggaagctctaggaggtgttgcccatatgggtatcaatgggaggggtgggtggggtcacctgctcagctctctgggtatttcctgggaaaacaggtggctacaccctccagctgagttcacacaagagcaggactgctgggctggaagctctagcaagccttacccgcctggctaccagtggtgagggtgggtggaatggccagctgagttcggcccaaagtgggcctgctagtccagaagctggccttgagcctcatctggcaagaatacatggataaatcatacagctcccaggcactgcaactgtggtctttactgaggcagtgayattggtgctggtctgcccttgggcccaaggcttgtagaggtcaccgtggactcaagagttgcccccacaaaatgtcccagtggctcctacctcagtctagaaatgtggtggagttggtgggggcccagggggattctcccactcccagtcttgcacaggtccctgtggagagctgaatccccctaggggctctcaccctttcacatgttggaaaatggttcacttactcagcctttcccatattgaaaggttctcctggctctgcactgagcccagacatgctggtgcctcacctcactcctctctgctctctgttaccctgctgccttgatggatagtaacgtggtttctcagatgatcggcctacagggtcaatgttcactagccccttttgtttctgctctgtgagaatggtgcatatgagatgcttctagtcagctatcttgtccaaacgtcctaaaatttttaataatctaattgttaatttttcccttactttcttttataaaatgatcttctactacacagcagctcaagaatactttaaaacctgattagttctgctataatatttgttttgaaatgcaaacttgttccaacataattgaacgatttgagcatagtttgaatttcacatatgcttaagcaatttcatctgcaaaaacaatgagtgaaagcagaaaggccrggtgcagtgtctcgtgcctgtaatcccagcactttgggaggccgaggcgggcggatcaccagaggtcaggagttcaagaccagcctgatcaatatggtgaaatcctgtctctactaaaaatacaaaaattagccgggcgtggtggcgtgcccctgtagtcccagctactgaggaggctgagacaggagaattgcttgaacccaggaggcagagcttgcagtgagccgagatcatgccactgcattccagcctggacaacagagtgagactcccatctcaaaaaaaaaaaaaaaaaaaagcagaaagcaactttctccatctaccttggttcacctgtatatagtgtgccacaccagctcacatctggtggtatgacattttaatttcagataatttccttcyactgtgcaataactcacaagttgcaacctattcaatgctcactttcacaaacaagtttcaggtctttctcaaaataaaagtctatatttctcatggtatttatgtattcttaatgactgtgtactatagtactgtttttcttaggtttttatttttaaaaatatatcaccaacaaggtttttgcaagatgtgcacctaacccatttcccccatacatcckacaggttttattgcatktttttgcatagtgaggtgattttcaggaaggcatataccacattataacataattgattgatattgtcagaaaaatttaaatgttttaatatgtattaggttatatacaacttacaccacrtaaagcactattacaaacagaccagatgtgtcattttattttgcttctatgcagataatttttcctgaaacgttgtatagtgactctcagagtaaaatgtacattaataatgtatattatcatatctttctataacttattgtgtttttaaccctttatttctggcttatrtaaaattatacagaaaactaagcctacaaataatcgaacaaagaaagctgtgaaaacagtgaagaaaaaagacaaaggaaaatctgaggattcagaaaagtaagacataaagatacatgttaatctttttttccttgttaatttatattttctttttatacaaacaatttaaagtcaaataaacataacttatgaataatcttttaaaaacataaaattggcaaatacatgtttttataagcataccagtatatgattatgggataaagctaaaaagggaagaacaaagaaccaaaaatggactggaagaggagattgaaccacaatacattcagaaataggtgaacagaattaaatctttaattttaggaaaaaagcatttacattgtttctttgatggtctagctcatgctttgtaatttgttaactccacagtgttggctgttcttttctactgtacttattaattgtattattcttataaaaagttatttattttttgtgtatgtgtattattataaagtgacattattaagtaaatattttctttagtattataattattgcatttgaatttgcctggttaaaccctaatattaaaataattttaaaaggaaactatgaagtcaaactttatagaattccacaaatcctgaaaagaaattcatgggacaaatggctttgacctttaacaaaaaatgacccgagaagaaaaaatgaccaatatgctttgactatcagtcttttcacattttaatcataccagtgagaagttagtttgagaaatgttattcagttgtttgtaatttagcctgtatgaattttatgtctcttagaaatatgaattttttwaaaaaaacttcattattttaaaatcgtttaaaaagtcctcctcaagaaagcaaascagtgatgcatttaaaaatatsatgatgcattttaaaacattttatgttacaggaagatgtctccagaaaaagagtttaaaataaaagaagatttggatcaagtacaggtaacacacccactctctctatgcatcaatatttgattaatacttgctctgatagtcatatatagagaaacattattacgtatgtgattatagggtatatatgtctgtgtgtgtgtatgtgtctctgtgtgtgtgtgtactaaaattcttcctgagataatgtctttcttgttgatggactcttctcatcaaagttcagagaatgaaatgtcaaacccaggcatatttatgtcaatattatgaaaattaccatggtttaaacaactacaggcaataccatggaggaaagagcatcatatcaggagtcagaacagcaacttactgattatatgactttggataattccctttaacctatttgaatttcaratttttcaaaattttcataacccaaatgtgtaaaacaatagctactctatttgtcttaaaaaggtgtaaacattttaagatgcaacgaaaaacttcttcagaaattgtaaactctgtgtctgactctggtttgtgtgatctaattagaggaatacaggtaagctgttattacattttggcttttgaatattcttttttcttttgctacatgttaatttctttttttttggatttacgttttattcaaaggataaatacaaaattaagaaagatttcaaattcaaagcaaatatgcttaatatttcaaaacaattctacatacaaagtacaataggaaaaaaaccaaaagcccccataaattagagtggctagacacattcaagtctagcagaaagaaacttggaatttaatgcaacgttatttctcttgtctagaagctaaagayttaattgtctcagatatcttccatctccttatgggcattacttgaagacaacagtggagcaakctttttaatgaacttgccatggtaaaaaaccaatgacagatgccacactggaaagaggacaacaatgtaacctaaaagggagctactggcagaaataaaaactagtgatactgataatatctagacctttgtagatgtttagagtactgtacaatcttaaattattgtttatcaacattttggtctcacaaattaagaatgtactagttaagaaccaaggagttatacccagttcacgctactgtttccttcacttgccctttagatataatgaatctggaattctcaatgagtgttacatggtttgggaattctggcaattttccttccatgacctccctatacttatctccatttcaaaatatgcaaagctgagtgacagaggcaaaaattaattcctaaagatccaaagggtacacaatacctgtcaaatttcgtatgtctgggcaggatgcggtggcttaygcctrtaataccagcacttcgggaggctgaggcggacagatcacttgaggtcaggagttcgagactagcctggccarcayggcaaaaccctgtctctaccaaaaatacaaaaattagctgggcatggtggcacgtgcctgcagtcccagccactccagagactgaggcagaagactggcgtgaacccaggaggcggaggctgcagtgagccgagaccacaccactgcacgccagcctgggcaacagagcaaaactccgtctcaaaaaaaaaaaaaaaaaaaaaagatgtagcctctggaaaaaatgacgcatgttggtgaggcagccttaggctctagtgcagaagaatagagaaggagaggtggaggagggagagaaggagagaccaaagactgggctgaattctacaagcaggcaaaacagcacatctatccattcaaatcaccctggcataactgtctcctgaaaaacatatcgaatgctataaccactggggatagactctagcatgctgtttatgaaaggattctgtaagggaatctttgctctataattaacagagtaccagatattatagaaactttagattgtcttgctactcactgaccttaaatattatccttcttttgcaacttatcaagtcacttaaaaattttaatcattgcataccctgtaaacttcctataaacaacatgtgattgcaaaatgtttaaaaagatgtgagaaaatatctgtsgagtgtggtatcagaaaaggcagagcctttgttttatctaacgattatttcccaaactgggaaattggggtagagacagctagatgttaatttcttaacaaccatctagcattatatcacccatttcagtgaatggctcgagttaagtgtacaagtatgtgcaagcgtacaagtatgtatacacctgaatgacccaagaactagataacataaattttgtaaaaaacaagagtaccacrtaaaatagtgaatataaaatgtactattttgtagcattagttttctattgctgcatagcaagttaccacaaatttagcagcttaaacratttatattatctcatagtttcagtgggttcggcatctgagcatggcttagctgtgtcctatgctgtaatcaacttatgctcaccaggctattatcaaagtgttggctgggctccattccattatatgtcttgagaatcctcttccaagctcaagyggatgtgataaacttcagttccttgcagtttagggctgaggcacttaacttctaggggcagtctgcagtttcctgccacatggtcttttccatagattgttcgtatcatagcacctttcctcctcctcctcctcttcttcctcttcctcctcctcctcttccttctttcttcttctacagggtctcactctgtcacctaggttggagtgcagtggcatgaccctagctcactacagcctgaactcctgggctcaagccatcctcccgcctcaccctcccaggtatctaggactacaggcatgcaccatcacaccctgmtaagttttatgttttttaagttttttgtaacaccaagctcttgctatgttgcccaggctggtcttggattcctggcctcaaatgatcctcctgcctcagcctctcaaatttttgggattataggcataagccaccatgcytggctagctcacaagagtctctcttgtctgctaagacagagttctaatataatgtaacttgatcataggagtgacatcctctcactcttgctatataatgaacctaataaagggagtggcatcccatcactttgccatattctattggccagaagcaagccacagatcccacccacactcagaggggctggattattatatataacatgaccctaagggtgaaggtcatgggattattttagatttttgcctgccgtcttattttattaaaaaaaawtttatttttatttctgtgggtacatagtaggtgtatatatttatgrgatacatgagatattttgatacaagcatacaatgcataataatcacatcagggtaaatgagtatccatctcctcaagcacttttcatttctttgtgttatagataatccaattatactttcttagttgtttttgtcatttatttatttttaaatttatttttccataagttattggggtccaggtggtatttggttacatgagtaagttctttagcagtgatttgtgagattttggtgcacccatcatccaagcagtatacactgcaccatatttgtagtcttttatccctcgcccacctcccactcttgccctcaagtccccaaagtctattgtatcattcttatgtctttgcatcctcacagcttacctcccacatatcattgatgttataaataaatatttggtgccgccaaagaaacagcactcgaacataaatttaattttctcagcaaggtaattttacttctatagaagggtgtgacttgcggatggagcaatggcaggagcacacctgaacaagggaggggaaggggytcttattcctggtgcaggtagcccctactgctgtgttattcccctattggctagggttggaccgcacagtctaagctaattccgattggctattttaaagagagcaggagtatgaactggaggggcagagtcagtagtttggcaggaagggcagctacagaacagataattcaggtcagagcaggtgaccagggtgactcaggacggagcaggtgatcaggggtgactcaagacgtagcaggtgaccagggaaacatatgtgaactactgattagaactggtggaaaaggttgtttactgaaactaggggcgaggagaatgaagaagttaaactttaaaatggcggacaaagaacacgggagctgaacatcctgatacattggttctttggagaggatctcagaaatcattgtacttaacaatttacaggctaaaacctttgaagaggaatttattatatcctacagtgagaacatccgatgtttggttttccattcctgagttacatcacttagaataatagtctccaatctcatccaggtcactgcaaatgctattaattcattcctttttatggctgagtagtattccatcatataaatataccacagtttctttatccrcttgttgattgatgggcatttgggttggttccatgattttgcagttgtgaattgtgctgctataaacatgcatgtgcaagtatcttttttgaataatgacttcattttctctgggtagatacccagtagtgggattgctggatcaaatggtagttctactgttagttctttaaggaatctctacaccgttttccatagtggctgtactagtttgtgttcccaccagcagtgtagaagtgttctctgatcaccgcatccacaccaacatctactgttttttgattttttgattatgggcattcgtgcaggagcaaggtggtatggcattgtggttttgatttgcatttccctgatcattcatgatgttgagcatttttycatatgtttgttagccatttgtatatcttcttttgagaattgtctattcacgttcttagcccactttttgatgggatactttgtttttttcttattgatttgtttgagttcgtcatagatattaggtgttagtcctttgtcagatgtatggattgtgaagattttcttccactctgtgggttgtctgattactctgctgactgttccttttgccgtgcaaaagctttttagtttaattaggtcccagatatttattttcatttttattgcatttgcttttgggttcctggtcatgaaatccttgcctaagccaatgtctagaaggggttttccaatgttatcttctagaatttttatagttttatgtcttaggtttaagtccttaacccaccttaagttgatttatgtataaggtgagagatgaggatcctgtttcattctcctacatgtgtttagccaattatcccagcaccatttgttgaatagggtgtcctttccccactttatgtttttgtttgctttgtcgaagatcagttggctgtaagtatttgggtttatttctgggttctcttttctgttccattgtcagtgtgcctgtttttataccagtaccatgctgttttggtgactatggccttatagtatagtttgaaatcaggtagtgtgatgccttcagatttcttctttttgcttagtcttactttggctatgggggctctgttttggttccatatgaattttaggattgttttttctagttctgtgaagaattatggtggtattttaatggggattgcattgaatttgtagattgcttttggcagtatggtcattttcacaatattgattccacccatccatgagcatgggatgtgtttccatatgtttgtgtcatctatgatttatttcagcaatgttttgtagttttccttgtagatgtctttcaactccttggctaggtatattcttaagttttttttttttttcagctattgtaaaaggagttgagtacttgatttgattttcygcttggttgctgttggtgtatagaagagttactgatttgtgtacattaatcttgtatccagaaactttgctgaattcttttatcagttctaggagctttctggaggtgtctttagggttttcaaggtaaatgattgtcagcaaacagtgacagtttgactacttctttactgatttgggtgtcttttatttctttctcttgtctgatagctcttgctaggactttcartactatgttgaggaggagtggtgagaatgggcatccttgtcttgttccagttctcagagggaatgctttcamcttttctccattcagtattatgttggcattgggttgtcatagatggcttttattacattatggtatgtcccttgtatgccgttttgctgagagttttaagggatgctggattttgttgaatgatttttctgcatctactgagatgattgtgtgatttttgtttttaattctttttatgttgtgtatcacatttattgacttgggtatattaaaccatccctgcatccctsgtatgaaacccagttgatcatggtggactatctttttgttatattgttggattcagttagctagtattttgttaaggattttagcatctatgttcatcagggatattggtctgtagttttcttttttagttatgtctttacctggttttggtattggggtgatgctggcttcatagaatgaattagggagggttccttctttctctatcttaaggaatagtgtcaaaaggattggtaccaattcttctttgaacgtctggtagaattctgctgtgaatccatctggtcctggcccttttttttgttggtaatttttaaattaccatttcaacctcactgcttgttattggtctgttcagagcatctaattcttcctgatttaagctaggagggttgtatttttccaggaatktatccatctcttctaggttttctagtttatgtgcataaaagtgttcatagtagccttgaattatcttttgtatttcagtggtgtcagttgtaatatctcctgttttatttcttagtgaggttttttggattttctctcttcttttctcatttagtcttgttaatggtcgatcagttttatttatctttcaaagaaccagctttttgtttcatttatcttttgtattgtttttatttcaatttcatttagttctgctctgatcttggttgtttcctttcttctgctgggtttgggtttggtktgttcttgtttctctagttccttgaggtgtgaccttagagtgtcagtttgtgctttttcagtgtttttgaggtacacttttagggctatgaactttcctgttagcactgcctttgctgtatcccacaggttttggtaggttgtgtcattattgtcattcagttcgaagaatttttaaatttccatcttgattttgtttttgacccaatgctcattcaggagcaggttatttaatttccatgtatttgcatggttttgaaggttccttttggagttgatatccaattttattccactgtggtctgagagagtgcttgatatactgtcaattttcttaaatttattgaggctcattttatggcctatcatatggtctatcctggagaaagttccatgcgctgttgaatagaatgtgtattctgtggttgttggatgaaatgttctgtatacatctgttaagtccatttgttctaaggtatagtttaaatccactgtttctttgttgactttctgtcttgatggcctgtcttgtactgtcagtggagtacttaagtcctccactattactgtgttgctgtctatctcatgtcttaggtctattagtaattgttttataaatttgggacctccagtgttaggtgcataaatgtttaggattgtgatattttcctgttggacaaggcctttcaccattacaaaatatccttctttgtctcctttggctgctgttgctttaaagtttgtttgtctgatgtaagaatagctatccctgcttgcttttggtgtccatttgcatgaaatgccyttttccacccatttactttaagtttatgcgagtccttatgtgttagcgagtctcctgaaggcatcagatagttggttagtgagttcttatccattctgcagttctgtgtctttaagtggagcatttaagtccaatgttagtaatgaaatgtgaggtactgttgcattcatcgtgctctttgttgcctgtgtactttgggttcttgtttatttgttttttgcttttgctttttaacttgtatttatgttttatagatcctgtgtgaatttatgctttaaagaggttctgttttgatgtgtttccaggatttgtttcaagattcagagctcattttagcagttcttgtagtggtggcttggtaatggcgaattctctcaccatttgtttgtctgaaaaagactgtatctctccttcatatataatgcttagtttcgctagatacaaaattcttggctgatgattgttttgtttaaggaggctgaagatcrggccccaatcccttctagcttgtagagtttctgctgagaaatctgctgttaatctgataggttttcctttataggttacttggcgcttctgtctcacagctcttaagattctttccttcatcttaactttggataacctgatgacaatgtgcctaggtgaagatctttttgtgatgaatttcccaggtgttccttgtgcttcttgtatttagatgtctagatctttagcaaggctggggaagttttccttgatgattcctccaaatattttttctaakattttagaattctcttcttcctcaggaaaatcgtttattcttaggtttggtcatttaacataatctcagatttcttggagtctttttttttttttttaattctttttttttatctttgttgaattgggttaatttgacgactgtgtctttgagctctgaatttctttcttctacttgttcagttctattgctgagactttccagagcatttcatatttctaaaagtgtgtccagagtttcctgaattgttgattgtttttttctttaagctttctattttcttgagtatttctcccttcacttgttgtatcattttttggatttccttgcattgagcttcacctttctctggtgcctcccttaataactaacctccggaattctttttcaggtaaagcygggatttcttcttggtttgggtccattgctgatgaagtattatgatttttgtggggaatgttaaagagccttgttttgtcatatttccagggttggttttctggttccttctcatttggataggctctgtcttagggaaggtctagggctgaaggctgttgttcaaattcttttgtcccatggggtgttcccttgatgtagtactctcccccttttcctatggatgtggcttcctgtgagccaaactgcagtgattgttgtctctcttctgggtctagctacccagtgagtctacctggctctgggctgctattgggggttgtttgcacagagtcctgtgatatggtggtttaatgctctatttttgtgctggttggcctcctgctgagaggtggcactttccagagagcatcagctgtggtagtatggagaggaagaggcggtggctgtggccctagaactcccaagattatgtgccctttgtcttcccctaccagggtgggtagggaaggaccataaggtgggggcagggctaggtgtggctgaggtctgactccttgggtgagtcttgctgtggctgctgtggggaatggggtgagattcccaggtcactggagttgtgtacctaggagggttatggctgcctctgctgagtcatgcaggttgtcagagttgtccggccaagtgggcagtcacagggctcacccagctcccacccaaaatgaagggcccgtgttgctcccaacctcccctgcaatagccccaagtctgtttccagacggtgggcgagttgggcttgaaaacttgctccaagctacccgccttcacagctgcgaaagaaaagggcttggttcttcccagacctatggagtctgcacaccagatttgtgccctcccctgagttctggccrggaggtttcttgccctgttcaaattgttacaaagttcagctagaactgcttttccctgtggagttttaccccctggtcctctgtctgtcctcccaatggatccctgtgtttccaggcaggaatggcctgcttcaggacccagtgagctcccagggcttttctgctgcttcttctactcttatatttcacttggctctctaaatggactcagttccaagtaaggtcagaaacttttccaacaaacagaccttctgtttctccagtggagagtgtgttttcgggaaaggagggtctccctttcctgcttccgcagttggggcactcacagtatttggggtgtctcccaggtcctgcaggagctgtctgcttccttcagagggtctgtgggtctttttaagtttttttaaaatgtacaataaatgattgttgactgtagttgccctgttgtgctatcaaatactagatcttactcattctttctaattatatttttgtactcattaaccattgccactgcactccaccccctactactatttgcagcctctgataaccatcattctgcgctctatctccatgagtttgttttgatttttagctcccacaaataagtgagaacatgtgaagtttgtctttctgtgcctggcttatttcacttaatgtagtgacctccagttgcaaatgacaggatctcattctttttgtatggctgaatagtactccattatgtatgtgtactacattttctttattcrtttgtctgttgatggacacttacattgcttctaaatcttagttatttttgaattgtggtgcaataaacatgggagtgcagatatctttttaatatactgatttcctttttttgtacrtacctaacagtaagattactggattatatgttagttctatttttaatttttttttttttttgagatggagtcttgctgtgtggccaggccagagtgcaatggtgcgatctcagctcactgcaacctctgcctcctgggttcaagtgattctcctgcctcagcttcctgagtagctgggactatgggcgggcgccaccacacccagctaatttttgtatttttagtagaggcggggtttcaccatgttggccaggatggtctcgatctcttgacctcgtgatctgcctgccttggcctcccaaagtgctggtattacaggtgtgagccattgtgcttggcctatttttaactttttaaggagaggacacattctgtaaggaagtcataaggccagtccatattcataggtaagagtagcatgcatatatagggtgggaaaaaattgttggtagccatttatggaaataatccagtacaatattcaatttttgtaagtgttctaatgacataaaataatgcacattttctactgctaggtataccaattagcttttcctaaataacaaattattccaaaacgtagtaacttaaaacagtagaatcattatttctcatagttgctgggcagctcagcttagtttggatgtgcaagataagttttattsctatgyctgacgttccagctgggacatctgggacaggtgggacttctttctagtctcttatcttccaggatgatagctctgggtagtttaaagaaggatccctagtagcaagagattaaaacaaagctgaaagatctctggaggcctcagctcacatcactcatggtgtcatttgtgttgtatcctcttggccccaacaagaattaggccaactgagtttcaagaagtgaggaaatagattgtacctttttatgggagctattgtgaagaatttatggccatttgtagtctgccacagtggggtatatattttctctctccctgtgtataaaattcarttaagtctagatttgtttcattattttaattttctatcatctttattcgttagaatatagactaggctgctataaaaagagacgccatataattcaatggcttaaacaaggtagaatatcatttttatctcatgtaaagtttgagttgatggttccagcaagtacagtagtttgatgttgtctggtacctagactccttacttcttgctcttgtttctcattgaaacatagaaatttttatcatatctcaaattttttatctatatcaagggagttttcttatttctttcgtcatcatttaactttcttcttccttttatcccgctgagactcgtatttgaatattatgatttctacattgactgttttaagtcttctatctttttcatcatggcttctatgtgtatgtttgttctgtggtatgagatatgtcttccatttaatttacaagatttctaaacttattctcaaaagtaagcaacctttctccttttcacttcctcttgaacttttaagttaaaaaagtcatgtttgctttctttaaaaatctcaggagatcctaatttagggttctaattccatcattcagagaacactatcagggtcttaatgttttctttctaattattttctgtttatccctctagctctgctttagtaggggctatgtctttggattgttcaacttcctctctgaagttacttagtcccatcccatggtttattgcatttctstgcctgtttatggacatgtttcctcagcagctcattggtcatgtgttgaaatcgcttgtgcagttgttgtaaggtttacttttgttcccattatcacgtgcttttgttttatagatgctgtgttctctcaaatttcaatgagaataaaatgtagatttagggatttcttttgtttcttaaaataactttgttacagaaaaggggcatttattctgtaaagatattttttctatttttgcttggctttcatttttttctgctgagaagcaattattaaaatcatcatttccttttgtataatatgtcatttttctttggccrcttttattgctttttttttttccttttatttggttttcagcagtttggctttgttttacgtgarcatgattttctttgtaaatatcaacttgggcagcactgaacatgttgagtatgttaatttcaccaagtttgggacattttcaatgtattattattttaaaaatattttgtctaccacttcctctctctcttttccttatgggatacaattatatattagacatatgattttatcccacagttgcctcagtatctgttagttaaaaaaaatctttgttgtttgtatttagattgggtattttgtatcgatatattttcaagtggtttgactttttccactgtcatcagatcccatctgttcttatgctcatacattaaatttttaaattcagatattatgattttcagttccagaatttccatttgactattttttttttaaagagacattgtcttatttttattacccaggctggagtacagtggcaggatcatagctcactgcagctttgagctcctgggctcaaatgatcctcctgcctcagcttcccaaggagctaggattataagtgtgtaccaccatggatggctaattcaaaatgtgttttatagacatagygtcttgctatgttgcccaggctggtcttgaattcctggcctcaagcaatcctcccaccttggcctcctgaaatgctgggattataggtgtgggcatgcattttttatagcttatatttctctgctaagatttccataattttatttattatgagcatattttcctttatgctggacatttttattatgcttgctttaaacatctgtatgtgaattttaaaatctggattgtcttgcttgggatcactttttgctcattgtcttttatcttaagaattagtttcacttttctgtttcttcaaatgtcaagtatttctaaattatatcctggctattatgaatatcatattcttgaaaccctagattgtgttatattcttctgattattattatttttttctttaatatataattaacactattcgatttaaaatgtaaattctatgtttaggtagcagctcacattgcattttagtttttttagcttttgctaggctgcttagtcttctttatgcatatgtagttcaggggtcaggtggagatttgggtagagtttatacaaagaatctggggctccctatcttatcttcttttctttgtgtaatttccctctaacctttccagtggcttgaattgtcctgaactctgtcctctggtggtttttaaatcagctactaggcaccttgaatggctcagatagggattgccctcaractaaaagccacaaaaatgagaatcttccctagagttcttcccttcctccaaatgtcaccttccgtcaagaatttacctatgagggagcagccaagatggccgaataggaacagctccggtctacagctcccagcgtgagtgacgcagaagacgggtgatttctgcatttccatctgaggtactgggttcatctcactagggagtgccagacagtgggcacaggacagtgggtgcagtgcaccatgcgtgagccgaagcagggcgaggcattgcctcactcgggaagcgcaaggggtcagggagttccctttcctagtcaaagaaaggggtgacagacagcacctggaaatcaggtcactcccgccctaatactgtggttttccaacaggcttaaaaaacagcgcaccaggagattatatcccgcacatggcttggasggtcgtacgcccacggagtctygctgattgctagcacagmactctgagatcaaactgcaaggcggcagcgaggctgggggaggggcgcccgccattgcccaggcttgcttaggtaaacaaagcagccaggaagctcgaactgggtggagcccaccacagctcaaggaggcctgcctgcctgcctctgtaggctccacctctgggggcagggcacagacaaacaaaaagacagcagtaacctctgcagacttaaatgtccctgtctgacagctttgaagagagcagtggttctcccagcacgcagctggagatctgagaacggacagactgcctcctcaagtgggtgcctgacccctgaccccagagcagcctaactgggaggcaccccccagtaggggcagactgacacctcacacggccgggtactcctctgagacaaaacttgcagaggaacgatcagacagcagcatttgcggttcatgaaaatccgctgttgtgcagccactgctgctgttatccaggtagacggtctggagtggacctctagcaaactccaacagacctgcagctgagggtcctgtctgttagaaggaaaactaacaaacacaaaggacatccacaccaaaaacccatctgtatgtcaccatcatcaaagaccaaaagtagataaaaccacaaagatggggaaaaaacagagcagaaaaactggaaactctaaaaagcagagcacctctcctcctccaaaggaacgcagttcctcaccagcaatggaagaaagctggatggagaatgactttgacgagttgagagaagaaggcttcagacgatcaaactactctgagctacagtaggaaattcaaaccaaaggcaaagaagttgaaaactttgaaaaaaatttagacgaatgtataactagaataaccaatacagtgaagtgcttaaaggagctgatggagctgaaaaccaaggctcgagaactacgtgaagaatgcagaagcctcaggagccgatgtgatcaactggaagaaagggtatcagtgatggaagatgaaatgaatgaagtgaagcgagaagggaagtttagaggaaaaagaataaaaagaaacgaacaaagcctccaagaaatatgggactatgtgaaaagaccaaatctatgtctgattggtgtacctgaaaatgacagggagaatggaaccaagttggaaaacactctgcaagatattatccaggagaacttccccaatctagcaaggcaggccaacactcagattcaggaaatacagagaacgccacaaagatactcctcgagaagagcaactccaagacacataattgtcagattcaccaaagttgaaatgaaggaaaaaatgttaagggcagccagagagaaaggtcgggttacccacaaagggaagcccatcagactaatagcggatctctcrgcagaaactctgcaagccagaagagagtgggggccaatattcaacwttcttaaagaaaagaattttcacccagaatttcatatccagccaaactaagcttcataagtgaaggagaaataaaatcctttacagacaagcaaatgctgagagattttgtcaccaccaggcctgccctaaaagagctcctgaaggaagcactaaacatggaaaggaacaacyrgtaccagccactgcaaaaacatgccaaattgtaaagaccatcgatgctaggaagaaactgcatcaacgagcaaaataaccagctaacatcataatgacaggatcaaattcacacataacaatattaactttaaatgtaaatgggctaaatgctccaattaaaagacacagactggcaaactggataaagactcaagacccatcagtatgctgtattcaggaaaccatctcacatgcagagacacacaggctcaaaataaaaggatkgaggaagatctaccaagcaaatgcaaaacaaaaaaaaaggcagggattgcaatcctagtctctgataaaacagactttaaaccaacaaagatcaaaagagacaaggccattacrtaatggtaaagggatcaattcaacaagaagaggtaactatcctaaatatatatgcatccaatacaggaacacccagtttcataaagcaaggcctgagtgacctagaaagagacttagactcccacacaatagtaatgggagactttaacaccccactgtcaacattagacagatcaacgagacaagccaggaattgaactcagctctgcaccaagcagacctaatagacatctacagaactctccaccccaaatcaacaggatatacatttttttcagcaccgcaccacacctatttgaaaattgaccacatagttggaagtaaagctctcctcagcaaatgtaaaagaacagaaattataacaaactgtctctcagaccacagtgcaatcaaactagaactcaggattaacaaactcactcaaaamcgctcaactacatggaaactgaacaacctgctcctgaatgactactgggtacataacgaaatgaaggcagagataaagatgttctttgaaaccaatgagaacaaagacacaacataccagaatctctgggacacrttcaacgcagtgtgtagagggaaatttatagcactaaatgcccacaagagaaagcaggaaagatctaaaatggacaccctaacatmacaattaaaagaactagaaaagcaagagcaaacacattcaaaagctagcagaaggcaagaaataagtaaaatcagagcagaactgaaggaaatagagacacaaaaaacccttcaaaaaattagtgaatccaggagctggttttttgaaaggatcaacaaaattgatagaccactagcaatattaataaagaagaaaagagagaagaatcaaatagacgcaataaaaaatgataaasgggatatcaccaccgatcccacagaaatacaaactactatcagagaatactacaaacacctctccgcaaataaactagaaaatctagaagaaatggataagttcctcgacacatacaccctcccaagactaaaccaggaagaagttgaatctctgaatagacgaataacaggctctgaaattgtggcaataatcaatagcttaccaaccaaaaagagtccaggaccagatggattcacagccgaattctaccagaggtacaagraggaattggtgccattccttctgaaactattccaatcaatagaaaaagagggaatcctccctaactcattttatgaggccagcatcatcctgatatcaaagccgggcagagacacaaccaaaaaagagaattttagaccaatgtccttgatgaacattgatgtaaaaatcctcaataaaatactggcaaaccgaatccagcagcacatcaaaaagcttatccaccatgatcaagttggcttcrtccctgggatgcaaggctggttcaatatatgcaaatcaataaatgtaatccagcatataaacagaaccaaagacaaaaaccacatgattatctcaatagatgcaggaaaggcctttgacaaaattcaacaacgcttcatgctaaaaactcaataaattaggtattgatgggacgtatctcaaaataataagagctatctatgacaaacccacagccaatatcatactgaatgggcaaaaactggaagcattccctttgaaactggcacaagacagggatgccctctctcaccactcctattcaacatagtgttggaagttctggccagggcaattaggcaggagaaggaaataaagggtattcagttaggaaaagaggaagtcaaattgtccctgtttgcagatgacatgattgtcatctgggctagaaaaccccattgtcttagcccaaaatctgcttaagctgataagcaacttcagcaaagtctcagtatacaaaatcaatgtgcaaaaatcacaggcattcttatacaccaatgacagacagagaggcaaatcatgagtgaactgccattcacaattgcttcaaagagaataaaatacctaggaatccaacttacaagggaygkgaaggacctcttcaaggagagctacaaaccactgctcaatgaaataaaagaggatacaaacaaatggaagaacattccatgctcatgggtaggaagaatcaatatcatgaaaatggccatactgcccaaggtaatttatagattcaatgccatccccatccagctaccaatgactttcttcacagaattggaaaaaactactttaaagttcatatggaaccaaaaaagagcccgcattgccaagtcaatcctaagccaaaagaacaaagctggaggcatcatgctacgtgacttccaactatactacaaggctacagtaaccaaaacagcatggtactggtaccaaaacagagatatagatcaatggaacagaacagagtcctcagaaataatgccacrtatctacaactatctgatctttgacaaacctgagaaaaataagcaatggggaaaggattccctatttaataaatggtgctgggaatactggccagccatatgtagaaagctgaaactggatcccttccttacaccttatacaaaaattaattcaagatggattaaagacttaaatgttagacctaaaaccataaaaaccctagaagaaaacctaggcattaccattcaggacataggcatkggcacggacttcatgtataaaacaccaaaagcaatggcaacaaaagccaaaattgacaaatgggatctaattaaactaaagagcttctgcacagcaaaagaaactaccatcagagtgaacaggcaacctacaaaatgggagaaaattttcgcaacctactyatctgacaaagggctaatatccagaatctacaaagaactccaacaaatttacaagaaaaaaacaaacaaccccatcaaaaagtgggccaaggacatgagcagacacttctcaaaagaagacatttatgcagccaaaaaacacatgaaaaaatgctcatcatcactggccatcagagaaatgcaaatcaaaaccacaatgagataccatctcacaccagttagaatggcaatcattaagaagtcaggaaacaacaggtgctagagaggatgtggagaaataggaacacttttacactgttggtgggactgtaaactagttcaaccattgtggaargcmgtgtggcgattcctcagggatctagaactagaaataccatttgacccagccatcccattactgggtatatatccaaaggactataaatcatgctgctataaagacacatgcacacgtatgtttattgtggcactattcacaatagcaragacttggaaccaacccacatgtccaacaacgatagactggattaagaaaatgttgcacatatacaccatggaatactatgcagtcataaaaaatgatgagttcatgtcctttgtagggacatggatgaaattggaaatcatcattctcagtaaactatcgcaagaacaaaaaaccaaacaccgcatwttctcactcataggtgggaattgaacaatgagaacacatggacacaggaaggggaacatcacactctggggactgttgtggggtggggggacgggggagggataacattaggagatatacctaatgctataatgacgagttaatgggtgcagcacaccagcatggcacatgtatacatatgtaactaacctgcacattgtgtacatgtaccctaaaacttaaagtatawaaaaaaaaaagaatctacctacacttggctgggtgtgtggtggctcatgcctataatccccatgctttggaaggctgaggcaggaggatggcttgagcctatgaatttgagactgcagtgagctaggaacccactgctgcactctagcctgggtaacagagcaagaccctgtctcttaaaaagaaaataaaataagttaacaaatctgcctactcttgattgttctcctattgttgatacttgtatttagtccagagtttatggttgttatgtgtggcagcatttgtctagtgggaactcagtcatatcagaagcaaaactgggaactctaaatatggtcctcaaagtgtctttaatttgatggagaattcctggaacatcatgtgtaatagaatttactcatttgcacaaagccagaacaatgtttattttgtgttaagagtagaggttcttcttttagtaaaatttgaaattcttctttttaaatatttcaggcctagaggaaaggagaaatgaaatgtttgatttactgcaattgtaatttccccgattcatgctcaatttgcctgtgaaaaatcaataggaagctttagcttcaggtattatccaccattacacttgagagatgtgcagttcaatgtctatgctcaattcttatcttgggtatctaygggttttggaaaagtaatactggtaaaactaaattaattaaraataccaaagtaaataccttttttcccccttcttacttcctagaaagtagcacgtctggaaattgagaacaaagtccttcaggagcaattgaaacaggctttacaggtaaaggatgtcatgtttctttaacattgttaacaagtaaagaaaatatccacaaagaacttttcaaatgaataatttttactttgtaagctaagaggtctacatattctactatttgrctaggtttaaactatattcattttatgcattaggggtatattaataaaatttaatattcattcttatcaaaaatagcgagatataaagaaaagtaaactttcttaagctaataaaggcaatctattcatctgtcatggttgcagtgtgaacaaaagaaaaggaaaagaaaaaaagacaatgtatttcaagctgataagcaatatacttaaaggtaaaatactgcaggcattccaattaaactcagttgaaccaagatgttgactcttactactctttttaaaattttagttaaataatacaacaagaaatgaaaaaaagctataagcatttcataaatgaatagacaaaagtgtatttgtgtattataaaattgttttgcctaccatcttggtaaaaatgtaaaggacagaaatatgtagtatttgtggttgtatgctgaaatgagcaacctttcacgtacttctattatcaaaaaagtatgaattgatatattcatctgtttttgttaatagaagtataaaagatatttgttatgtctttctgggagacagaaaagacatagcaaaattggaaagatgtagccttttcactcaataaaagcttttaaaagtttatcctaaagaagaaaaaagtgtacagagattttgtacaagtatgtacaatgtcrtatgttttaatagcaaaaattttgaaatgatctaaatgtccattgttaaggagtttgctaagacaattatagtatattattaaatgtacttctattacctattctgatttaaatgtatgtttattgttatagaaacatatctatgacattatttaatgaaaagagcataagatgtaagtgtgtatagtaggacccaatttagataaacatttaaaaaatttggctgggcatcatggttcatgcctgtaatcccagcactttagggggccaaggccggtggatcactttgagcccaagaatttgcgaacagcctgggcaacatagtgaaamcctgtctctattaaaaatacaaaaactgactgggtgtggtggtgtgggcctgtagtctcagctacttgggaggctgaggtggggggataacttaagcccaggagactagaggttgcaaaaaaaccccgcagatatatatatatatagctaatatatatattagctatgtataattatatrttatatatattrtaatatgtattagctatatatatgcagggttttttatatataaatatataacatatttatatataaaaaaatatctttgtgtaatttccctctaacctttctaatatagctaatatatatataatatatatagctaatatataatatatattatatatatattagttatatttagaaaaatttaaaaaggatatatctcaaaatgttaatagtaatttttctttatgaggtgagattatttatgaattttctttttatttatataktcttttatataagtaagttaattgtatgactaaataaaaattataaaaagtgacatttttaaggagacttttattccagaagaaataaattgttttccacattttatttcattctttgatattataggtgctaattatccttcttatagtctatcaatttttataatgtataccttatatgaatttttattttgcttgtataataattagagccttaaaaataacagccaggaaaaactcctgggtataaaaatagccctcaaaggtggaagaggtttcttyacaacttctgattttaactgtggaattgttaaagtatcarttatagcaatagcttacctttgctcccttcaactcagtaaaaatgagttgagaaatcatgtaggcgtaaatatatgtagattcctgaatgtggtagtattggcaggaaaatatcagaaaatgcttaataaactggtacttttttaaaaacaggaagctgaaaaagctaagcatcaacttaactatttcctaaatcaagagaagttacttaaaagtgaggggaaaactgagacaacaatgcaagtgggtaatagtcaaacaaaagttaaaggtgaagattcaaaaaatataccattggagamagaaacaagaaaatcactggtttcagattcaggtggacaaaggacaagtgataaaatccaagaatatccacaggtgaggaaataaccaaaatggagacagtagtatatgttgtgagaaatttgtcttttatattattatttacttcatttgtatatgttatttaaaaattcatgcctctgtttttgggttkttttttttttttttttgagatggagtcttgctctgtcgccaggctagagtgctatggtgcgatcttggctcactgcaacctccaactccctggttcaagggattctcctgcctccgcctcctgagtagctgggattacaggcatgcgccaccatgcccggctaatttttgtatttttagtagagatggagtttcactgtgttggccaggatggtcttgatctcctgacctcgtgatctgcctgcctcggcctcccaaagtgctgggattacaggcatgagccaccgcgcccrgcctttggatttgtttttacttttgccctttaccttctgtatatgtcaactcattattatcttgaataccaaactatgacttaaatatatactgattttgaatgaccacataagcatctgagatttgagtcctttatttttaccttctctttttgtgtataatttttattgtgaactacctcaacttcttcctggaaagataaataataaaaatagtttctccgagggcaataaaaattattaaagttgttagatcatgtatataaacgaagtaaggtacaccgaattgaatataaaaacaaatatctaaagaaatataggattgtctgtcagctgctttaagacaaagaacaaaagaagcagcacaacttaaaatctgctagtcattttatatctgccattattataaaatctgctagttattttatatctgtgtatacgggctagtcatttacacaagaccataagctagctattagcacctccattctgagaatgaaaccaaaggtttaaaaaattagccatgccgcattacagtgagtaatattgagttagatttcaaattcaggtctttctcgctccaaaatcacatctgaagatatcttctttgcttgtctatatggctgcatttgaaacttgctttgttaaaagctttattgttttctatttcccagtatttatctcctaatccaaaacagaggttttcatatatgacagaaaaagttaaatagtaaaatgaacctgagcagaacagtaactaaaacatcacattgctttcacataagtgattctcattttagtgggtttatatatacatcaatacacacctgtcttcttatgtatctagcttaacattcattaataaaacatcttatatgctaggttctttgcaaagatgatgtatataatgtcatgtattcagctggcttgttctggtaatagtgaaacaggagatatcattattggagattttgatgtaatagaagtttatactcattgtccatgttcttatagtaatttaactgtaaccttctttctcaatcactgtattaaaactatttttgctgaggttatagcaaatctatttgatgctattctgaaggatgctttatagtttttttctttctttcttttcattttttgagatggagtttctcttttattgcccaggccagagtgcaatggtgtgatctcagctcactgcaacctccgcctcctggattcaagtgattctcctgcctcagcctgccaagtagctgagattacaggagcctgacaccatgcctggctaattttttatatttttagtagagayggagtttcaccatgttggccaggctggtctcgaactcgtgacctcaggtgatccacctgcctcagcctcccaaaatgctgggattacaggcatgagctaccacacccagccagatgatttatagtttaatctcatttgtcctcttagcagcatttaatatgtttaatcatttattttttaatayttttgtattatactttaagttctggggtacatatatagtctatagtttgagaaatagcataattatttgattttccttgtatatttttgggacacctcttttgtctcctcttgctctgctcattctttaaatgttagtagttctctgggttttgtcctagagtttctttttattccatatactctttctgaacatgctcatataccttcatggcttctagggccatataaatctcttatctctaactcgaataacacctaatttccagacctgttattcattaacttactgaatttttctgtttcaatgggcttcaaacatctagaattcaccatgtccccaaatgaaccaattgcgctcttctcagacctgctttatctctcagtattcagtctcctggcatcctcatccatctaattgctgaaactagaaagcccagcatcactgttatttcttcttttcctttgtcttgatccaattattatccatcaaattctgtccagttttctcaatattaatgacagttctgttagtcaggctcacaccaggactaattggtctctctctttccaggccagtctcatgttggtggctagttgaaaatccttggttatttattagttagtatataggataactattgtgactattatgacatatagacacaaaatgtatgatggctcaaacacaatggaagcttctttcctggtgttaatagtccaaggaagttcaaggtcagtcttcgtggtagggagttctgctcyacagggttgttaaggtatcccagcatatggaaggtttgccatcttatgtgtggcttcctgagccacactaggcatagttatctagctatcagaaaagaatatggaggacaaacatgagtaattttcattgacctggctggaggagatgcacattcttttttctcacgtcctatttgctacatttaactacagggggaattaacaaatgtagactaacaatgtgtctaagaagaagagaaaattagtttgttgaccatttaggagtctttgccacaggggaataaggataaaaccagttaatctctgcataaaagaaactgaattagatgaaaatcaggtccagaataaaacctagaatcaacatttatactataggaaaatatgtattatattcacaagaggtaatttattaataaaaatcacacttttaaggtcactgsscttttttttttttttttttgagagagagtctcactctgttgcccagactggagtgcagtggtgagatcttggctcactgcaacctctgcctccttggttcaggttcaracaattctgtctcagcctccygagtagctgggattacaggcgcccgccaccatgcccagctaatttttgtatgtttagtagagagggggtttcaccatgttggccatggtagtcttgaactcctgacctcaggtgatctgcctgcctcggcctcccaaagtgctgggattacaggtgtgagccaccttgcccggctggcctaaccttttggttacatacttctgtaracatatttgaacatgtattctcagtatacttattttaaaattgataaattacaaaaagtacctccacagtttattatatatartattagcattataaacacttcaacaagaatatttaaaaggattagataattatgtaatagataagtttaaaataaattttgagctactctgcctgtggagcaggcctgctctgtctatggatcagctattttcttgtactctgttgctctaataaacatgcttttctttaactcaaaaaawtttttttttgtttactaaaagtataaaaccttatttgctcttaatttagaaatataagtgtaattttagggcctactctccttctataatgtctcttccaatgctaaaatatgataatttctttgcttttttgataccttaatcttacgaaattgtcatattaaaaaactaccttaaatgatatttttctaaatgactgtaaacatttcatatgcatacttgatatttttaaatgtagtattatctttatcacagatcactgcccaaagcggaagactgattgaaaagaggtaaaacactttttaaaaatttgttccctcattttctaatctttatcagttcacatacctaagcaatgaaaataaccattctaaatttaatgtcacaaaactctttgaaactaattttaagtagaaaatgttagaaactttagatatcaaagttagaagagttgatgcagtcaaaatcaaaattaaatgaaaaatttaaatttaaatttaaattaaggacaatgtagaaacaaacttttttttcctgacaacagcaattaaaatttccagatagtgaggaactaacccttattttcaacttagttatcatcaagatgcatgagctagatacataaacaacttagtgaaaaatcatttttaccttccattttaactcagttactatatgcacacatatgtatgtacatgcatacacataaataattgagttgattgattcatccaattaawtcttatagttttcactagtgagtctctttgattagtatattatgatcgactcacagactttcttgattcacattaccatggagtaaagaggaattacctagaagtatgcatttatgtacttcattgccattttaaatatttatggattatagacccaggtgaattagcaagaattaggtaataagtgtaatgattaatggccagaagttttgaaaatgttcattttaaatgtttgtagtgaatgtttatatttatatgttttaaatactaactaaacatatactaaaaactatatgttttaaatacaatgtccaagagaaaattagacgttggtccacttgttgctttgcaaacttataatgrttggtttcttattattgatttctttatattttaaatatgtatagtcagtattataaacatttgagaatgtataagaaaaagtattaataattatcttcaacagtaatgggaacttatgtatcatgtagaaataggaaggaataaagcaaaagcatgktgcttttttttttttttttttttttttcttcaratggagtctcgcttttaattgcccaggctggagggcagtggcatgatctcggctcactgcaacctctgcctcccaggttcaagtgattctcctgcctcagcctycccaggagctgggattacaggcgtccaccaccatgcccggctaatttttatatttttagtaragacggggtttcgccatgttggccaggctggtctcaaactcctgtcctcaagtgatccacccacctcggactcccaaagtgctgggattacaggcgtgagccaccatgcccagctggtgctcttatattcatactcarattatggtaragcatggaatgctactatagttttccatgcaatcatggtgaygtatagcctttgaaaatcctacagagccagtagtttatcaccctgaagaacatgaggtggttaacttttgatataagttgttttaatattgaacatttagttgctgctgataaatgtgataggctctttgtacattggtaaatctcaraaaatagaaacactggcttacaaaaagcattktaaagagagtttctggtctctatgaagacatggtaaggcagtttcagttactttccatgggtgtttggaaaaatcttaaagaggggttatgataatgttacctagtgagttattacccctggcagccctcattctacttttctgataagtcacattttagaattttaatgggaagtgatagaatggaagaagggttcaatggagaacaacagaatgaggatgatggggaatatagtacatcaagattaaaaaaatcatagaatggatatatcaaataattcctcttaaatgcctttttccccctagaaatgttgattgatgtaataacttcaggaggaagattattttaattcatttcaattcagtttagctctaatgaggaaacactgactgagcatctatgctgtgcaaggcactgtgctgggtattatgggatataaagggcttcaaatatatggtcattgccctcaatgcattaacagtctagtagggccgactagacatgtwcaaaaataagtgaagtataatgcagacgttgcattctataaaacattaccaagaagctacatcaaagaagaggaaaagctatttctgactggattaagaattacataccatttaattttagaaagatggttgggttggattttaacagggaaatgtgaggaaagggtgtgccaagtggacagaactttgctttgaggcaaagatgaagatgtttagaatctatacagtgtgctcaggaagaggccaaaaattcattttgtttgcatcctagactaaggacaataatgggaaatatgagatgaartaggttgtttcagcttgataggttttatagaattgcacttaatagctttaggttaattattatatattatataataatataatatattacatattatattatgttgctaaatataataaaaattcaaactattaagcacatggcacaatattattcatcaaccttcattttgggttacttcttagatgctaatagagtttctgaaatactttggaaaagtctcccaaaccttcagagagtggatgggagcgaagtaaggagaccccacctgagcagatacatggtattgcttacaataaagtacatttttgctctttacaacatttatcagtttattttggcttagggaatgagttagtggtaaatagttaatcaaacaatagattttaataatttattgtttcacatcatgtgcrttgttagcttttcttaaatgttttgtggcattgaaattcacactttttagaaatgaaaatgtgaactaattcatggtgttttattttgaagagttacacagtcaacctagttctttctaaatactttcattaggactttcattattacttgggtttgctatcaagcacgaaaacatacaagagaagagtgttggaacatgtccattttttttctccatagattagatgattagctgttaaatttactcattcatttattcacccaactcattcaagagatacttttgtcaccttcatatgtccagttctcttttgggtattgtgttttactgaaaaatcagacagataagatgccttttcttgtggtacttacattataacaggagagacaaaaaataaacaagtaaaaataaatgaacaagataattttagagactaatacatggagataatgaaactacatatctgacagtcacagggaaggataatttagattgggtggtcaaggaaggtattaacaatgaagaaaaggcattatctaattgtgaaataaaggctgttaaaatattttgtttcttttcaatttttatcaaaataaatttctgcaaatgaaaatgtatgttataactaaaagatctagactagaggagcttttaatatcctcagttaactgttacacaaggggcatattactagtgacccaaatagtacgcataaggtagattttatagaggaaaccttgcaatccaggaagcaatagaggatataatatcccctgagctgtcattattccgtagagaaatagacttagattaagcaaagctggattcaccatagaagatgctcctgagaggaacccccttctcacatatcacttcacaaaattataggggaattgggagggcatagagagcacctagtcaaccatgtatcactgagagcttcctggttggggcagtggccttgttggaaaaagggagaagggagtatgtactttgtataccaatgtagctggtatcagtgagtcaaacagtcctggtgagccagctctgtgaaaccacaaaaagagggaagaaagagaatcaccgggaccatccgtaaataaagatttgcctcactgctgtctatcctttgatcttagaractcattattatagatctctccatcagccctggctgacacctggttctgagcataccaatttccttagtattgtctgggagaagaatattagtaaggtcaccagctgggttagatgaggatgtagaaccaacatcctaataagttcacattatgaactctttttcctggccaagcacagaaacctttgtttaggaatgtctgttccatatctgccataggaaagagaaagtcgttcatcacctcccttgaacatccatctccaaccatttcccagggtcagatatgttcacatctgacaaacagatctgtttttctccatggagatgagccagattgtcctttgtctggaatgatagttcagtggggaccccaaagttaccattttgccatcataggtcacctgcaggtttcaaagaggatgtctgcagcaccatctgttgcttttaaatgagcaatatgttgtgtgttcccatgcactgaggtcaaagcaaagggggttaaaaaaaaaaaaaaagaaaaggagtatactattcctcttgaaatgatatttttctctactccctaacttctaggtgctttggagtttaaccatggtaagaggggcccttgcttggtacggtagcctatagcttgtaaacaattagggaaaactggactgacaagccttgtggaggttgttttcaaaaaggctgccttaaatggcaagtagaataagcctgatggacaacagtggcctgtgtgtctttttttttttttttttttttgagatagggtatcactttgtcccctaggctggagtgcagtggcaccatcatggcttactgcttcttcaacctcccacactgaagccatcctcccaccttagctgtctgattggcggggaccacaggcatgcatcaccatgcccagccaattgttttattttttatagagactcagtctccctatgttgcccaggctggtctagaactcctggactcagggacttttcgcacctcagcttcctaaagacttctatgtcttttgaataaattccttattggccattgtgttccttcatagcgggatggatttgaacaggsacccaagactatactggagatgatggttacacattcttaattggctttttcatgtcacatgttttcctttagattcagttctttctcatggacatataaacatagaatataagaattgagcttgtgactaagttgttgtaactatttccttgggcaaatgttacctcagaaaagcatgtgtaaagagttctgttggccargtgtggtggctcacgcctgtaatcccagcattttggggaggctgaggcaggcagatcacgaggtcaagagttcaagaccagcctggccaatatggtgaaaccccatctctactaaaaatacaaaaattagctgggcatggtcgtgcgcgcctgtagtcccagctacttaggaggctgaggcagaggaatcacttgaacctgggaggcggaggttgcagtgagctgagatcgtgccactgggtgacagagcgagactccatctcaaaaataaaataaaataaaataaagagttctgtcctagggaacccaatagcctgacagtgtaactaggctcattactaatggctcattagtctttataatagtgcaattcagtcaatctgaggagattgtgctctatggccatgaagaatgcctgaagtttacccagttttgaagcatgtccaataccatgggatctcaacaactcaccatcattatggtgaaggaatgtatcactccataagattttatgacctttgagagaggcttttccattagtgaatcatgctttcttgtcaggtggcaaatctttcaggcaagtgccttactgagtcaatggcttgtttaaaacagcagagggatctctgtgcctgtgagtgtagggccatattttatgaatttgtctaaggtctaattgattggatgtgctatatcccccttttaatagaattttcctgggcatgtaccaccttatcagattttggattagagaagacccataatgcgataggaatgtcgggttgaagagtgagaaaagtctgccccattagggctcagtaataggctagcagtcactggcatgtgccactcagcaggagaagaaaatcatttcatccaaagatgtaggaaatgacaaataacttgaagtatttttgccaaaagcttccgtcagaaaatggtttcttacaggtatgtgtaatcccatgagtttgaaagatacggcaaaatctaaagttagaacttgtttttaggatgcctagacctcttccaaggcatgttaatatatgggcttctattttaaattagttgcattgatatagtgctttgaagaatcaccaggtgtaaaatgtgatatcaccactacctaacaaggaaaatcgtttgtggttgggactggaggcccgataaattttcctttaaagcagcagtttyctgcctttttagcaccagggaccagtttcgtggaagactccacagaccaggatggagggggtggtttcaggatgattcaagcacattacctttattgtacactttattattattattatttcattataatatataatgaaataattatacaactcaccttaatgtagagtcagtgggagccctgagcttgttttcctgcaactagatggtcccatctgggggtgatgggagacagtgacagatcatcagacattaggttctcgtaaggagcacgcaaactagatccctcacatgtgaagttaacaataggatttgtgcttctatgagaaactaatgcggctgctgatctgacaggaggtggagctcaggtggtaatgcaagcgatgggagagtggctgtaaatacagaggaagctttgcttgctcactcgccactcacctcctgttgtgttgcccagttcctaacaggccatggactggtatcagtttgtggtccaggggttggggatgcctgctttaagtgatatagaatgtatctttttgatgctgtccagatgatgactgccttctccaaatttatctgaataacagggccctggatcatttaaagttatctttaatcaggtatgcctagacaacatgtaatgtttcttcggtgttgatcacagtcatcagtgtgatataatatctggagattctagcaatgcacattttactgggttttgtcccacattgaaaatgtgtaacaggaattaaaacattctcaagaaggattattaaaggtatatgtactaatcttggcatatcttgcsaaatcctcagctacatatgtgtgtcagtagtggcagcaatttattctatagcttgtgtaaggacagagactggagtaagtagagctgtttctttccttgtttaagtttcagtagtccactatggagtgtcaagtactagtttttgttttttttttcttaaccaaacagactagcattgcatagtgcattgattacattttgtttgaaaaatactttatttttatgtttcttgtatgaaatattatggaatgatcttgccagttcagacaggttttcaccatgtgcttggccagccattatggaggttatcaatagataattatccaactaatatggctgtgtacctgttctcggtttaataattcagaatgtccttatatcaattatataatctgagaaagaaacagcaaacagtattaatatagagtacaaaaatagtagccttgtgtgtttgggttccccaagactactgccctcactaggagagctcacagcactcatcaaatagtcattacgatgaccatgatttattacataaaaaggatgcaaagcaaaatgagcaaagggaaaatgtgcatggtaaaaatccaaaagaaacatcctacttaatctgagattatggtgtcccgtaattccttagctacctgatcactatagccattctcactgagaacaagcaatttgttctttcttgagtttttaagactatatacgatatggacactgagatattggccatttcaacttagtagtttgtctggtataaggcttccartggggttatttcccacttcagcggtagcccaaactctctgtttttcaaaagctgtaacatacacgagtcacataccactagctacacataacaaggtttattgagaaaaacttacaagcagaatagcgagcagagcacattgcaatattgcagttatcaatgaaggaccttgagagtctctgccaagctaccaagtagggaagggagatattaaccgaggccattcagaaacatgtttgtcattctcattaactgatgactttttttttctagtaagagaatagtttttcttttatcctatataatttccccatagtttgagttccatttctgattatttcagtaatagcattgctggtggagctagatgtagctaggcaacattgtcagcataagaattatttatacatttacaaactatttctaagcagtccatcaccctaattttctttaagttaataatttcaagtgttttaaccttttatcttttccaggctcttagtcatcttggacttttactgaacctttaaaactttttgactttcttttcagttgaggagcctaaaactagtcactatgaatattttgatcaacattaattgtattgtattgtaaaaactatcaaaatatttataacttttgacttttataacacctatattgaaatttttctataaaattgatttttagaatcatg

SEQ ID NO: 1623 - DNA, 63584 bp, Homo sapiens
  misc_feature (1)...(63584): n = A,T,C or G, or insertion/deletion polymorphism (see Tables 1-2)
cccaagactaaaccagaaagaagtcgaatccctaaatagaccaataacaagttctgaaattgaggcagtagttaatagcctaccaaccaaaaaaagcccaagaccagatggattcacagccgaattctaccagaggtacaaagaggagctggtatcattctttctgaaactattccaaacaatggaaaaagagggactcctctctaactcattttatgaggccagcatcatcctgataccaaaacctggcagagacacaacaaaaaaggaaaatttctggccaatatccctgatgaacattgatgagaaaatcctcaataaaatattggcaaaccaaatccatcagcacatcaaaaagctaatccaccatgatcaagtctgcttcattcctgggatgcaaggctggttcaacacacacaaatcaataaatgtaatccaccacataaacagaatcaacgacaaaaaccacatgaatatctcaatagatgcagaaaaggccttcgacaaaattcaatagcccttcgtgctaacaactcctaataaactaggtattgatggaacgtatctcaaaataataagaggtatttataacaacccacagccaatatcatactgaattggcgaaagctggaagcattccctttgaaaaccagcacaaggcaagcatgccctctctcaccactcctattgaacatagtattggaagttctggccacagcaatcaggcaagcggaagaagtaaagagtattcaaacaggaagagaggaagtcaaattttctctgtttgcagatgataggatagcatatttagaaaatcccagcatctcatccccaaatctccttcagctgataagcaacatcagcaaagtctcaggatacaaaatcaatgtgcaaaaatcacaagcatttctatacactaataatagacaaacagagagccaaatcataagtgaacttccattcaaaattgctacagagagaataaaatacctaggaatacaacttacaagaaatgtgaaggacctcttcaaggagaactacaaaccactgctcatggaaataagacaggacacaaacaaatggaaaaaacattccatgctcatggataggaagaatcaatattgtgaaaatggccatactccccaaagtaatttatagattcaatgctattcccatcaagctaccattgactttcttcacagaattataaaaaactactttaaatttcatatggaactaaaaaagagcccgcatagccaagacaatcctcagcaaaaagaacaaaactgaaggcatcatgctacgtgacttcaaactatactacaaggctacagtaaccaaaacagcatggtactggtacgaaaacagatatatagaccaacggaacagaacaagtcctcagaaataacaccacacatctacaatcatgtgatctttgacaaacctgttgaaaaacaagcagtggggaaaggattccctatttaataaatggtgttagaaaattggctggccatatgcagaaaactgaaactggattccttccttataccttattacaaaaattaactcaagatggattaaagacttaaacataaaacctaaaaccataaaaaccctaaaagaaaacctaggtaatactattcaggacataggcatgggcaaagacttcatgactaaaacaccaaaagcaatggcaacaaaagccaaaatagacaaatgggatctagttaaactaaagagcttctgcacagcaaaagaaatgatcatcagagtgcacaggtaacctacagaatgcgagaacatttttgcaatctatccatctgacaaagggctaatatccagaatctacaaagaagttaaacaaatctacaagaaaaaaaaatctgatcaaaaagtgggtgaaggatatgaacagacacctctcaaaagaacacatttatatggccaacaaacatgaaaaaaagctcatyatcactggtcattagagaaatgtaaatcaaaaccacaatgagataccatcttgtgccagtgagaatggtgatcattaaaaagtcaggaaatgacagatgctggagaggatgtgaagaaataggaatgcttttagcctgttggtaggagtgtaaattagttcawccattgtggaagacagtgtggcgattcctcaaggatctagaacaagaaacaccatttgactcagcaatcccattactgtatatacccaaaggattacaaatcattctactataaagacacatgtacacatatgtttattgtgacactgttcacaatagcaaagacttggaaccaacccaaatgcccatcaatgataggctggataaagaaaatgtggcacatatatactatggaatactatgcagccataaaaaaggatgagttcatgtcctttgcagagacatgggtgaagctggacaccatcattctcagcaaactaacacaagaacagaaaaccaaacagtgcatgttctcactcataagtgggagttraacaatgagaacacatggacacagggaggggaacatcacacaccrgggcctgtcggagggtagggagctaggggagggargggtagcattaggagaattacrtaatgttgatgatagtttgatgggtgcagcaaaccaccatggcacatatatacctaaacctgcacttcctgcacatgtatcccagaacttaaaatataataataataataatraaggggtattgaaattccccagtatttttgttttgctatgttttcytcatgtccactaatatttgctttatatgtttacacaccttgatgttggttgcatatttataattgttacagtctgattaacttatttgcttattattacttaaagacaatcttagtctcttgtaacagtttttgacttctggcctactttatctgacataaatatagtcacccctgctttctttttttaccgtttgcatgaaaaaattctttcttttcactttatttttgtccttaagcttgatctagtctgccattgaagctctctattgtattttttcatttccttcattgaataatctaatggcaagacatctgtttaatttttcttgatgtctatttctttgctgaatttctaatttataccatgatttttttttcctgatttctttcaatagtctatctatattatcttgaatcttgctgactttttattttttatttattttttatttttttaattatactttaagttttatggtacatgtgcacaacgtgcaggtttgttacatatgtatacatgtgccatgttggtgtgctgcacccagtaactcgtcatttaacattaggtatatctcctaatgctatccctcccccctccccccaccccacaacaggccccggtgtgtgatgttccccttcctgtgtccacatgttctcattgtttgattcccacctatgagtgagaacatgcagtgtttggttttttgtccttgcgatagtttgctgagaatgatgatttctaatttcatccatgtccctacaaaggacatgaactcatcattttttatggctgcatagtattccatggtgtatatgtgccacattttcttaatccagtctatcattgttggacatttgggttggttccaagtctttgctattgtgaatagtgtcgcaataaacatacgtgtgcatgtgtctttatagcagcatgttttataatcctttgggtatgtgcccaggaatgggatggctgggtcaaatggtatttctagttcaaatcttgctgacttttaaaaatgttatattattattattattattattattattattattattttgagatggagtctcactctgtcaaccaggctggagtgcagtggcacgatctcggctcactgcaacctccacctctcagattcaagtgattttcctgcctcagcctttttggggagagtcatgtttctttgctttttcatgtttcttgtgtccctgtgttgatatatgtgcatctggtagaacatttgcctctcctaacttataaagtagcttttctaagaaaaaactttcacttgttgataggtcctygggtgctgagtagggtgtatcggctctgcttctggctggcacagtagcgtagtctctgtgaagcttctcagctataatcaatgtcagtgacaagtggatgcctcagtggcccgtactgcagtaatttgtgggagtggtggtagcaaagtagattacactgagctcaggcaccaagagagcacaactactccaccagctcaggtacagcttccctcgggtgggatgcagrgctggtttgtgtgctgagggaataagaccagtgttctggcttgggcatagcttttctggaggtggggcaccaggccgctttatgtgccaagggagcacagctgctccaccatctcagacattgctttcctggggctgagtctggggcccccagttagtgtgcacacaagggggtattgttgccattctattgcgcatgcttctctggggtcaaggtgcttggctcatgcttgagagggtacaactgcttcaccaggccaggcttggcttccttgctgggttggactgtttggtccttgggggccagagcagcctgtaggttcagaagcctgggtcatgacygttccactgggcctaggcctaggcttcgaatggccatgggtggggcatagctgccactggaatggagaggatactgtgccttctcagcagcttcataaaaaggtattttggtctatatatccttggtaaatctgtatttctgagacagcatgagatcaataattttctattctactctcttgcttacaacattcaacaactcatttcctttttttttttatcacagagtaatattccattgtatagatgtaccatagtttgtgtatacattctatgtatcattattgaatgatatctggttgcaaacatttttggcaattatgaataaagctgctataaacattcatgtgcaatttttcatgtggacatatgttttcaagtcatttaggtgaataaaaagcagtgcarttgctggattaggtgataaaagtatgtttaattttgcaggaaattgctgaactgtcttctagaacaaccgtaccgtcttgcattcctgtcagcaatcagtgagaattcctgttgctccgcatcctcaccagcatttggtgttgtcagtgttctagattttagactaaatgcagtgttttcattttgtcctattctagatgctaacttttattgtgatttagtctcgtgagttgttttaaattgttacataagaatttcttagtgtatagagtttcctatgtttttgaattactttttaattttaattgcattatgattagagtatgtttattttgatggttatctgtggaaattttcattctgatctagttaagtggtgactttgtgagtttccgtgtgcttaaaaagactgcaaatctctcattgtggctgccctggaacttagtttatataataaataagtttcctcatgtctgaacctgcccaggcacctttcccaatgtatcagatgtttaacactaaggatctgttttgttctggaaagttatttttatctggcctcatgattacagtcctggccctgaacttcagagaatggaggggtaagcaaaaggacctcagactgtgccaggaaatgtcaagtcacctgctgtaggctactactaatggagcatggcctatttacttggacaccaaactatccagtgctaacatgaggtttttcaggactagatcccatggccatacagccctgcctgccagattggacgtgaaaagtatttccgcatctgacattcctgtttcacccacacaggscatcgttttgcccaggacaaagttcacctccaatcttatccacactatttctatctttgcttccttgataagatatagacatttatgcagtggttcaaagtctagagtccctacacttctggtacatgacagctgtgtctcgatggagtagactctcagaacagcgcagtttgccctccgctcacgcagagcctctccgtggcttccgcaccttgagcattaggccagttctcctcttctctctaatccatccgtcacctctcctgtcatccgtttccatgccgtgaggtccattcacagaacacatccatggctctcatgctcagtttggttctgagtctcctcaagctgggatcaggtaagactcatctttgtttcctccttactaactaacagtttgagttctttagctacaatggttgcagcataatggaatgaaggcatctttgtcgtttccattcctttggcttctcctagcctcagcctggggaaggatcaggygctgtggaaacaattatagtagcccccaaataatggaaacacgggtgttgaagacgcaccgtgatcgtwgacggggacacacctaacgtgttaaggtgaataaattcagtgtttstcccagatgggctgagtggtgtaggcagggttattggagcaccaaggttgctgacatggatgtccatctgggaagagacacagttaggatttttggggaaaagacaatgtatccagctaaagacatgctgagttagaaatgtctgtggtatgagacacgagggtggaggaaggtgtacaggtcttgaggtgagaaattagctgaaacctggcatattctgggaagaaatccactcttctttctccttccagttactgttaacacagaacctagtatataggatgttgagtgactgaatacaattcacagaggaagcttgaggttggggtagaatgctggtggctagatggtcagtacccagccacagaagattcgattgactgtgttcactttctgtctgtgaaggttcatcctgccacctgtccacctatatcttttttgctaaatgaagctaagaaaacagaaataagggcaatcaaaacatagagcatgtttccttaaaacaaaaacccatatgtgttactaacaggagacrctctcrtttcagtttgttttcatttattttctgacgagcttctttgtttcccttctgtttccgggtgaggcagcaggacatcctggaaatgatcttggagacagaaacattttatttttaaaaactcttatttcattttcttgtgagctttattgttcacagcttccttaggtgttggtttgcttatgatgacatggagatacgatcacattcctgctggggctgtggtgaggactgcatgagcttgtgcatgtagagtgcacacagctgcacgggtgcatggcatgttgcagcaacagtcttgttcctttcttattttcaagggaaggaagtggaaggagtgaaaggagatgttataggcaagagaggtgacagcagcaagggctggccggagaaatggaggtaccctgaaaaatgtttccttgcctcaagagccccacacagccctgaaggcagcatccatagcagcccagctggcatacgctgggtccccaaacctgacctaagacaagggccttcctgccagtgattcgttgagcaggtgattctgggaaacaaagtgagggagtggagagagtgaagccagtagggggaaagccatagagggtgcgctaatgagcgttgctgyggtggcaactgggacccagtcccactgggacctttggaggaactttatagatggtggctcagagtcattccaacatctactgtctcctttccccactgggtgagatgtgccgcccaggactgctaaaatcgcaaaccttctgagctgccttgtgccagggctaagtaggttccaagggtggcaggaagccctcagcagagaggcagaggccaggctccagrgrcggagctgtcagcaggcagggaaatgcccatcccactgcagggggactcagggttgggtggtgaggagcagggcctcaacatctgctacaccaggtcagmagctggtcagacaccaggctgcaaagtcaygcctcatttaataatactcttaaagatgcatgagtgaaatacatttcagcaagatttataaaatgtaattaaactaaaaaattagtgctaaaatgaaaaagtatccactgatctagaaattcacacatgtaattcaccttccctctgatgcacatgcagacagcacacacaggtatatccatataccataaatggatacatgtgaatgaatcaagagacactgccagtcaaagggggtgggtacttagaaggtgaagggagtgggcctccatagtctgtggtctctaagaagcagtgtaatccttacagggtagtaagagtgatttacaccaggaaaattactcaaatgattgttaaacwgatgagcaagtaagaaaggaaatggggctcaccgttcacatgcataactgtggagcctgttctgtgtgactggctctgtgctgatcaagtgggtactatgctgagcaagaaaatcaggccctgtccccagagagccaagagctgtgcaggggaggctcacagaaaacatgtaattgtcacacttgaagcaagacaatgaagaaagtttcaaaagcgaggtgaggacatacatgtaccaagaattttttttaaaaaaaatgaaggcaagacatgttgacaaagcactaggcgaaccacctttcagtgctaaaataargtggaaaaaattactacacaagcgtaaaaggcacatgctatggaaaatataagtcacacgtgaacgtgctaaagaacaaatttacagaaaacagactgcaaaatcttgtttcagtgtcacagcatgtctttcagaacttggcagaacaagcagattttcaaaaaaaactaaggaagtacaaataattgtgtgcgccatgggcagaaatgtaacattcctctatagtagccataaaatattgatataatattgtgcttgaaggaaaccttaacgaattgccgcaaactggagactttatggcccatactcttctctgggccattagaaagacgtcaactttggttttcagcaaggacgatggaaatggggatgtttgggktttttttttaattgaagcaaatgggcagatgggagagaatgtggcaatagaacctcctggaatcaaagggtctacattcagaaagagactttttcctctggataacatggttttctcatcttaaaaataaaaacattaataatacacatttctgcaggtgctcctcaagatcgaatgaagtaactgatgtggacatggtttgtcaaatgtaaggagatacacaaatgcaagtcactggctttagaaataggattgtgatgaatgtttccccctgatgcacatctccagcccagcccaatggagccctgagtaggtcacactataaagggtttttttttttgtttttgcttttatactttaagttttagggtacatgtgcacattgtgcaggttagttacatatgtatacatgtgccatgctggtgcgctgcacccactaactcgtcatctagcattaggtatatctcccgatgctatccctcccccctccccctaccccacaacgtccccagagtgtgatattccccttcctgtgtccatgtgatctcattgttcaattcccacctatgagtgagaatatgcagtgtttggttttttgttcttgcgatagtttactgagaatgatgatttctaatttcatccatgtccctacaaaggacatgaactcatcattttttatggctgcatagtattccatggtgtatatgtgtcacattttcttaatctagtctatcattgttggacatttgggttggttccaagtctttgctattgtgaatagtgccgcaataaacatacgtgtgcatgtgtctttatagcagcatgatttatagtcctttgggtatatacccagtaatgggatggctgggtcaaatggtatttccagttctagttccctgaggaatcgccacactgacttccacaatggttgaactagtttacagtcccaccaacagtgtaaaagtgttcctatttctccaatcctctccagcacctgttgtttcctgactttttgatgattgccattctaactggtgtgagatggtatctcattgtggttttgatttgcatttctctgatggccagtgatgatgaacattttttcatgtgttttttggctgcataaatgtcttcttttgagaagtgtctgttcatgtcctttgcccactttttgatggggttgtttgtttttttcttgtaaatttgtttgagttcattgtagattctggatattagccctttgtcagatgagtaggttgcgaaaattttctcccattttgtaggttgcctgttcactctgatggtagtttcttttgctgtgcagaagctctttagtttaattagatcccatttgtcaattttgtcttctgttgccattgcttttggtgttttagacatgaagtccttgcccatgcctatgtcctgaatggtaatgcctaggttttcttctagggtttttatggttttaggtctaacgtttaagtctttaatccatcttgaattgatttttgtataaggtgtaaggaagggatccagtttcagctttctacatatggctagccagttttcccagcaccatttattaaatagggaatcctttccccattgcttgtttttgtcaggtttgtcaaagatcagatagttgtagatatgcagcgttatttctgagggctctgttctgttccattgatctatatctctgttttggtaccagtaccatgctgttttggttactgtagccttgtagtatagtttgaagtcaggtagtgtgatgcctccagctttgttcttttggcttaggattgacttggtgatgcaggctcttttttggttccatatgaactttaaagtagttttttccaattctgtgaagaaagtcattggtagcttgatggggatggcattgaatctgtaaattaccttgggcggtatggccattttcacgatattgattcttcctacccatgagcatggaatgttcttccatttgtttgtatcctcttttatttccttgagcagtggtttgtagttctccttgaagaggtccttcacatcccttgtaagttgtattcctaggtattttattctctttgaagcaattgtgaatgggagttcactcatgatttggctctctgtttgtctgttgttggtgtataagaacgcttgtgatttttgtacattgattttgtatcctgagactttgctgaagttgcttatcagcttaaggagattttgggctgagacagtggggttttctagatatacaatcatgtcgtctgcaaacagggacaatttgacttcctcttttcctaattgaataccctttatttccttctcctgcctaattgccctggccagaacttccagcactatgttgaataggagtggtgagagagggcatccctgtcttgtgccagttttcaaagggaatgcttccagtttttgcccattcagtatgatattggctgtgggtttgtcatagatagctcttattattttgaaatacgtcccatcaatacctaatttattgagagtttttagcatgaagggttgttgaattttgtcaaaggctttttctgcatctattgagataatcatgtggtttttgtctttggctccgtttatatgctggattacatttattgatttgcgtatattgaaccagccttgcatcccagggatgaagcccacttgaccatggtggataagctttttgatgtgctgctggattcagtttgccagtattttattgaggatttttgcatcaatgttcatcaaggatattggtctaaaattctctttttttgttgtgtctctgcctggctttggtatcagaatgatgctrgcctcataaaatgagttagggaggattccctctttttctattgaatggaatggtttcagaaggaatggtaccagttcctccttgtacctctggtagaattcrgctgtgaatccatctggtcctggactctttttggttggtaagctattgattattgccacaatttcagctcctgttattggtcgattcagagattcaacttcttcctggtttagtcttgggagastgtatgtgtcgaggaatttatccatttcttctagattttctagtttatttgcatagaggtgtttgtagtattccctgatggtagtttgtatttctgtgggatyggtggtgatatcccctttatcattttttattgcrtctatttgattcttytctctttttttctttattagtcttgctagyggtctatcaattttgttgatcctttcaaaaaaccagctcctggattcattaattttttgaagggttttttgtgtctctatttccttcagttctgctctgattttagttatttcttgccttctgctagcttttgaatgtgtttgctcttgcttttctagttcttttaattgtgatgttagggtgtcaattttggatctttcctgctttctcttgtgggcatttagtgctataaatttccctctacacactgctttgaatgtgtcccagagattctggtatgttgtgtctttgttctcgttggtttcaaagaacatctttatttctgccttcatttcgttatgtacccagtagtcattcaggagcaggttgttcagtttccatgtagttgagcggctttgagattcttaatcctgagttctagtttgattgcactgtggtctgagagatagtttgttataatttctgttcttttacatttgctgaggagagctttacttccagtatgtggtcaattttgkaacaggtgtggtgtggtgctgaaaaaaatgtatattctgttgatttgyggtggagagttctgtagatgtctattaggtccgcttggtgcagagctgagttcaattcctgggtatcctttttgactttctgtctcrttgatctrtctaatgttgacagtggggtgttaaagtctcccattattaatgtgtgggagtctaagtctctttgtaggtcactcaggacttgctttacgaatcttggtgctcctgtattgggtgcatatatatttaggagagttagctcttcttgttgaattgatccctttaccattatgtaatggccttctttgtctcttttgatctttgttkgtttaaagtctgttttatcagagactaggattgcaacccctgcctttttttgttttccattggcttggtagatcttcctccatccttttattttgagcctatgtgtgcctctgcacgtgagatgggtttcctgaatacagcacactgatgggtcttgactctttatccaatttgccagtctgtgtcttttaattggagcatttagtccatttacatttaacgttaatattgttatgtgtgaatttgatcctgtcattatgatgttagctggttattttgctcgttagttgatgcagtttcttcctactctcgatggtctttacattttggcatgattttgcagtggctggtaccggttgttcctttccatgtttagtgcttccttcaggagctcttgtaaggcaggcctggtggtgacaaaatctctcagcatttgcttgtctgtaaagtattttatttctccttcacttatgaagcttagtttggctggatatgaagttctgggttgaaaattcttttctttaagaatgttgaatattggcccccactctcttctggcttgtagggtttctgccgagagatccgctgttagtctgatgggcttccctttgagggtaacccgacctttctctctggctgcccttaacattttttccttcatttcaactttggtgaatctgacaattatgtgtcttggagttgctcttctcgaggagtatctttgtggcrttctctgtatttcctgaatctgaacgttgtcctgccttgctagattggggaagttctcctggataatatactgcagagtgttttccaacttggttccattctccccatcactttcaggtacaccaatcagacgtagatttggtcttttcacatagtcccatatttcttggaggctttgctcatttctttttattcttttttttctagacttcccttcttgcttcatttcattcatttcatcttccatcgctgataccctttcttccagttgatcgcatcggctcctgaggcttctgcattcttcacgtagttcttgagccttggttttcagctccatcagctcctttaagcacttctctgtattggttattctagttatacattcttctaattttttttcaaagttttcaacttctttgcctttggtttgaatgtcctcccgtagctcagagtaatttgatcatctgaagccttcttctctcagctcgtcaaagtcattctccatccagctttgttccgttgctggtgaggaactgcgttcctttggaggaggagaggcgctctgctttttagagtttccagtttttctgttctgttttttccccatctttgtggttttgtctayttttggtctttgatgatggtgatgtacagatgggtttttggtgtggatgtcctttctgtttgttttccttctaacagagaggaccctcagctgcaggtctgttggagtaccctgccgtgtgaggtrtcagtgtgcccctgctggggggtgcctcccagttaggctgctcgggggtcaggggtcagggacycacttgaggaggcagtctgccrgttctcagatctccagctgcgtgctgggagaaccactgctctcttcaaagctgtcagacagggacatttaagtctgcagaggttactgctgtctttttgtgtgtctgtgccctgcccccagaggtggagcctacagaggcaggcaggcctccttgagctgtggtgggctccacccagttggagctgctttgtttacctaatcaagcctgggcaatggcgggcgcccctcccccagcctcgctgctgccttgcagtttgatctcagactgctgtgctagcaatcagcgagactctgtggtcataggaccctcygagccaggtgygggatataatctcgtggtgcgccgtttcttaagcccatcggaaaagcgcaatattcgggtgggagtgacccgattttccaggtgcgtccgtcacccctttctttgactcggaaagggaactccctgaccccttgcgcttcccgagtgaggcaatgcctcgccctgcttcggctcgtgcacggtgcgcgcacccactgacctgcgcccactgtctggcactccctagtgagatgaacccggtacctcagatggaaatgcagaaatcacccatgttctgcgtcgctcactctgggagctgtagaccggagctgttcctattcggccatcttggctcctccccctcactacaaagggttttgatgatttatcttttgtatgtcttcccacagggcagtkgcaggtgtttgggccagacaagcctgtccaggccttggtgggggaggacgcagcattctcctgtttcctgtctcctaaraccaatgcagaggccatggaagtgcggttcttcaggggccagttctctagcgtggtccacctctacagggaygggaaggaccagccatttatgcagatgccacagtatcaaggcaggacaaaactggtgaaggattctattgcggaggggcgcatctctctgaggctggaaaacattactgtgttggatgctggcctctatgggtgcaggattagttcccagtcttactaccagaaggccatctgggagctacaggtgtcaggtcagtttcatatttcataacttagttgtcccaaagaaccatcctggactttataagtgttttttkcaataaggaaattttaaaattttaggtcatttagttagaaggcagcattctatactctacgttccttctgtcttgtgtgtatagttctatgtgttttgtcacatgtttaaattcaggtaaccaccatcacatcaaggtatagaactaccccatcatcacgaagatctccctctgtcaccccttcatggtcacacccaccccttctcagcccctgcctggggttttccatctccctgatgctgtaatttcaagaatgttacatacacagcttcacaccgcaggtgaccttttgagattgactttttaaattcagcataatgctcttgcgatctatccaaattattgcttgtatcgatactttatttcttttttttccccactgtcaaaatagttttccttatgaacatttatttttaaattaacaaataaagattcctgctcacttgtcctacaaattttttgtttatctgatacagcagggagcaaacgtcagctccaggaagctgtgacttcccctgacaatcagttgctcaatgctctgtgttaacttgaccatacttccatagtcacacccttcacagtgaaatgtatttgacggggctgggtgcagtggctcaagcccgtaatcccaacaccttgagaggctgagacaggaggattgcttgagtccaggagctcgagaccagcctgggcatatggtaagacctcatctctattaaaaaaaaaaaaaaaagaagatgaaagaaggaaaaaacagaaatttattgtttacagttgttgccgtgtgcagtcagtgagttgtgaataatctgtgtcctgattaaaaacctgtgagtggggctgctctgayggtagtggattatccgaacttagtagtgtcactacaattggcatacgactccccactgctaaatttgactaacttaaatttttttaaaaaccactatgagtgatatttcaggcctgatgataggcaattttcaaaagcgtttcctggaaggcctcctcctcatagcagacttggagtacaaccaatgctttgcagtctctgaggagagtttcaggtgagccctcaggcccggctaagctgtcctggtctttacatatttgcatttctagcccaggcattttaattctcagaatctcaggccttgggcaggactttcaagtgccttataacaaggaggagaatgtggagtcctaattagggaaaaggagtcaggctggcaggaccaggtgaaagcaaaaagaaaaaaaaaaagaggaaataaactataaacatgcctttcttcatgtctagaaaatttaaacaaaagagacagcagataagctacaggtctgcctttcttcgtcatcctggacatacagtccaggatatatggcccagaacatttggccttcctgcccagataacatacataactcacagacttcctgcttatcatcaaacacctcaatttatcaaatatcccagctgacaaaagaatataagttaggctccctgctaccttggcattatcgatcagcccaagctccattctrtraaatccctgagacttttttttcttgcagttagcttccctcatgctaacttgcctattgccttccttgcaaagtactttcctactttctctaataaatctgcctttctctacctacaaccatcttggtaaattcttttacccccacaccactggctgccattcccccatgacagaaaaggcaaactccaagacacttttctctactctgtcttagtatccagtatcttaccctctaattcctcctccctacacctcctcctgagctcaggattcataaagctgtgaagccttttgttcagcactccatcactagtgagtcagccccacacgtgtgatgatccatctgcccctcaactggaattccatttcatgggggaggatgagacagggaggggttggcatcttccttggtttagctcttacttttgtagcaactgattagaggcttcactattactttaattcgggtcatcgttcctttggtctgttactcctacgcctggcggctcagcactctctctactttagctgagctcctgacaagtttctcatagaagcagttttgtcttacttcatcatgactggtgcttaggaatagccacgcatacacagtagttgctaaaaaatggcaacgaacagaggccatgggaaggcttttgccaaaggtcgtggttttagtgtttgtgtgtgtaagagagagaatgggtggggggtggactgaatgcacctgactcagaattgctgtggctttgggatrtgatctttgctttcaaccgttccctgttttctccccagcactgggctcagttcctctcatttccatcrcgggatatgttgatagagacatccagctactctgtcagtcctcgggctggttcccccggcccacagcgaagtggaaaggtccacaaggacaggatttgtccacagactccaggacaaacagagacatgcatggcctgtttgatgtggagatctctctgaccgtccaagagaacgccgggagcatatcctgttccatgcggcatgctcatctgagccgagaggtggaatccagggtacagataggaggtgagtagggaggggaggagaagagaaggaggggtggatgcttcggtaactcagagggaggacaggagcctccatcttggcattgctgttttatctttctcagttctaatgatttattttaaaagtttaaaatcaatgagatgtaaaagtaaagttataaacatttggttaggtggaaatagaattgtttacaattccaggggagtagaattaagtatttccttcagctgtgacgtaaccctgtgatggttaattttttgggtccacttgactgggtcacgatttgctcagatttggtcaagtattattcaggatgcttctgtgagggtgtttacacataagattcacatttgaattggtaaactgagtaaagaagattgccctccataatgcgggtgggcttatccaatcagctgaagacctgaatagaacaaagggtcgaccctcccctgagtgagagaatgatcttgcatagtagccttttaactgggacactggctcttcctggcctcagagcaggctgctggccttcagactcaaactgaaccactggctctttctatgtcttgagcctgcggacttttggacaggagtgacaccattggctcttctggttctcaggtcttctggtttcaacgtaaatgaaccattggctctcctggggctccagattgctgactcacccatgagttgggacctaaaagagcttccatgatgtatgcaagccaattctttatactaaatctgtctctcctcttcctttctctctttatctccatctttctctctcaaatatatagaaacaacaggatgtatatatatatatatatgtatgtgtgtatacatcctagtggttctgttactctggagaactctcactaatacagatttggtaccaagagtatttctagagaaaaagaattttagggataacttttcagtcatccctaaaattctaaaattctctgagctgggattactgtgtacacctgtagtcccagctactcaggaggctgaggtgggaggatcacttgagcctaggagtttgaggccagcctacacaacatagcaagaccccgtcttcaaacaaacaaaacaaaaagcactgaaagttcatgttgtgatctagcaatacagatatgcaaaatttcaccatttgcgacccataattaagcatgggttgactggtatatgatattttcaaacatgtgtgtcracctagtgaataagatgagattggctggttgctcctattcttgctagaaaaagtgaggaaagtgatgaaaggaaatatgagyngaggaatttgaattctgagtttcttggtgttgcataaataacctgaaagcttccatgagtgccctgaaagagacccttattttctgtagccacagggctaagattgctgaaaaccaaattgagaactcattctgtgactggctgaacgacaatggaaatccaaacctgttcctcagggtatctgtcaatgtgagggggcattgactgggaagaaatgagattcagaaagttgaaatggggatgtatgggaagactgatgaagctggggacattgagcctcaaatgctgatgagtctttgccagtgaaagcagtctcagtctctctatgtcaattagaagtagcctctccaccttcatctcaggggattaaccctgcattgcccaaagaaactgtaatggcctctttcctgaggcagtcaccatgcaagacaatgctgatgctacgcaggacccacccctaccatycctctttgcttctagatctgtacctaggctcaagtttcagcaggaccctaaagttggaaacaatgcatgactcattagaaagtgtactacactccaaaagagctagttggtttttctaatctatacagaccagaaatccagagaatccatgtcaaatgatattaagggtgtaaggtggtggtacaaggacrtaaggttggctcaaaccacatgtaatggcctcactaatcagagatcctgcatttaatgttgcagctcagagtgttagaaaggmctctatcgtttggttggctgaagcatggatcaaaatrtggcccacagagagtracaggtgggcatgctgttaggagcctttgccaggcccctgtaagtgaatcatggcacaggccctcaggattgagaagcagagccctgccattctctacgaataactactcttcttttgaaaaatacatcttgggctagaccttaggaaagactgaacacttaatcatgggccgccaagttgcaatgtgacttgaatcagtaagaatatagaayacttgaactaaaaattaacaaacccaatttaatagatattcttagaaggctgcacccaccacaaagcattggaagcacacacagaccataaattaactctcatcaggctcaagcacataaaatgctttacaaaaactttgaagaaaatggtattgcgatatrgttttagtgttgtgtcttctccaaaattcatgttgaaaygaaatccccaatgcagcactattaagaggtgggctttttaggaggtgattaagtcctgaggactatgcccatatgaatgggttagtgccttataaaaggatttaagggggtgaacttaccctttccaccccttctgccatgtgagggacacagtgttcatcgccttcaggggacacagcaacaaggtgccatcttgaaacagaggacagtcctcatcagatgccaaatctattgatacttgaccttggacttcccagcctccagaactatgagaaatacatttctattgtttacaaatgagccagtctgtagtattttgttatagcagcacaaatggacaaagactggtatgattcaaacgatgatttctaatcacaatataattaaattcaatgagaaaaagaaaaacaatttaatattcatatatgtttgaaactttcaaaacatacttcaaaaataactaagtggtcattgaaaaagtcataatgakaattaaaagtgtcttaggactgaatgataatgaaactatacatacaaactatcacacaactataccttttaagaagtgacatgattaggatggtgaaatggagttttcagttctcaaactcccacagaaacactaattttawcaactaccatgaacaaaagtatttttgtaggagtctaggaagccacttgagaggttccaactggttggtcaggcaaaaaagccaagaacagatrcatggaggaaggtaagaactgtttccttctacccgcctcactgctcttcygaggtaactcagtgccaagagagactccctcagcccacaatttttgccatggggaaagtgagagcaaagtgaatgtccagattccccaggcttgtgggatgctgcccaggaaacccatttctgtctcacttaatgcagaacactgaggggaccatgtggctgaatcatctgggggcagctaggagtaggraaagaggagggggcttatggcagccagtgcatggacctgaacaacaagcagcagaacctactggccagcccctgcactctactagaggcccacctcacaacctgctgactacccaaccagctgatatgtgcccccagccctccacacaccacccctgtggctagaacctcttggtccatcacagtggggcacgtgcttccctgcagacagggtgcctgagcctcagcagatgtgcatacaaacttctgcagtcagaacacagatagcaatcagcttgactctgctggattgagagaaggtgcacaatcttgagtattttagggaattgccctagggataaataaatgcaaggctctcagcagccagcctgctttgcaggactgagaaaagaaaatcccaagacttcctctcaccaagaagsaacgagaaaagtaaagcaggtacatccataaaaaagatctgagagacttccagagtatctagccaggctgactggtcaaggtctttgtctaccraagtctgccagtacagactrgaggaggaggagtgacagaaagacaaaatatactgtcaaacagattcacagcacattaaaagattcatttaccatgattaagtgagytttatccttggaacataaggatggttcaacatatgcaaatcaataaatattacactaacagaatgaaagacaaaaacaatatgatcatctcaatagatkcagaaaaagcatttgacaacattcaacaccctttcatgacaaaaccaactttyaataaattaggtatagaagcaatgtagctcaacacaataaaggccatacgtaacatgcccacagagcatatacccagtggttgtcttagtccactttatgctgctgtaccagaatacctgagattgggtaattgataatgaacagaggtttatttggctcatggtcgtggaggctgggaagtctaagatcaaggggtcacatcctgtgagggccttctagttgtgtaattccatggaggaaggtagaatggcaagagagtaagaaagaggaaggaagctgcttctgcaaaaatggcattaatccactcacgagggcaggatcctcatggccttgtcacctcttaagggtcccacctgtcaacattattgcattggggattaagttttcaacacataaactctggggatacattgaaaccacagtgatgatgaaaaatttttaaacaatagcgaaatctatggaatgtagcaaaaccagttctaaaagtttatagctataaatatctacattaagaaaaaagaaagatctcaaatgaacaacctaagtttatacctcaagaaattagaaaaagaaaaaactaagccaaaatttagcagaaggaaggaaaaaataataattagagcagaaataaatgaaatagaaaaacaataaaaagatcaataaaactaartgttgtttatttgaaaagataagtaaaattgacaagcctttacctagattaaccaagaaaaaaagagctgactcaaataaatagaaytataaataaaagatgatacattacaactggtaccacagaaataaatataaaatgtcatgagactatcgtagttctcccttatccacaggggttacattccaagatccccagtgaatgccacaaaccacgtayagtaccaaaccctatatatgctatttttcatgtctcaaatggaacagagcaggatgatagagatttcatcatgctactcagaatggtgtgcaatttaaaacttacaaattgtttatttatgaaatttttcattcaatatttttgggccacaattgatcacgagtaactgaaatcatgaaaagtgaaaccaaagacaaggttagactacggcactatgaaaaatcataggccaacaaaccagataacctagcagaaaccaaagacaaggttagactacggcactatgaaaaatcataggtcaacaaactggataacctagcggaaaccaaagacaaggttagactatggcactatgaaaagtcataggccaacaaactggataacctagcagaaaccaaagacaaggttagacyayggcactatgaaaaatcataggccaacaaactggataacctagcagaaaccaaagacaaggttagactacggcactatgaaaaatcataggccaacaaaytggataacctagcagaaaccaaagacaaggttagactacggcactatgaaaaattacaggccaacaaattggataacctagcagaaatggatacattcctagaaacatacaacctataaaaactgaatcagaataatttaaaaaaaataccagaccagtaattagttagaaatacaattgataatcaaaatcctcccaacaaagaaaattccatgaccagatggctctgctggtgaattctgcaaaatatttaaagaaaaattaacacaaaaaattagctgggcgtggtggcgggtgcctgtaatcccagcactctgggaggccgaggtgggtggatcacgaggtcaggagatcgagaccatcctggctaacacggtgaaaccctgtctctactaaaaatacaaaagaattakccgggcatggtggcgggtgtgtgtagtcccakctacttgggaggctgaggcaggagaatggcgtgaacccgggaggtggagcttgcagtgagctgagatggcgccactgcactccagcctgggtgacagagtgagattctgtctcaaaaaaaaaaaaaaagaaataaacaaagaaagaaaaattaatgccaatacttttcaaactcttgcaaaaaattaaagatggggaataattccaaactcattttatgaggccacagttaccctgatacaaaaaccatataagaacaccataaaaaagaagaaaattacatgccaatatccctgataaacatagatgcaaacatttccaacaaatattagccaaccaaattcatgataaaaagaataattacaaagtacattaaaagaaacattaaacgtatccccatgatcaagtgggatttatctctgggatgcaagaatgtttcaacacacgcaaataaataaatataatatatgacattaacagaatgaagaacaaataatgtataattatgttaacaaacgcagagaaagcatttgacaatattcagcatcttttcataataaaagtcaacagactaggtaacaaaagaatgtacctcaacataataaagatcacatatgtgtcaacaaaaagagtcaaactctataaaacatttaaagaggtttattctgggccaaatgtgagtgaccaaagcccaaggcatagtctcaacargtcctgagaacatgtgcccaaggtggttgagttacagcttgattttatgttttaaggggacagaaattacagacagacatcaatcaatatatgtaaggtgtacactggtttggtctagaaaggcaggacaacttgaaatgggggcttccaagtaataggtagattagaagattttctggttggcaaatggttgtgagttatctaaaagacctggaatccatagaaaagagtgtctagattaggatagggggttgtggagaccaaggttcttacatgtagatgaagtctcataagtggcgacccttagaggcaataggtggcaaatgtttcatattcagatctttaaaaattgctagactctcagctaatcagtctcttcgggatcagacaaagacctggaaagggaaatttacattctgtagagaatttacatttcccccaccagaggcagctttgccaggctatttcaaaatatgtcaaagaaatatgctttggggtaaaatattttaaattctttcagggcctgctatctgtcatgtgatgctatatgatagtccagttgggatttggtatcttattgctacaaagagtctgttttgtcagtcttaagacctctgttgtaatgttaatgctgctcagttgttcctgaactccaaagggaagaggacataatgaggcatgtccaacctcaccttcccatcatggcctggactagtccttcaggtttacttgggaatyccctttcttgagaagagggggtccattcagttgactgggaagcttagaattttatttttggtttacatattataagctcatagctaacattatcctcaacactgaagtagtgaaagctttcctttaagattaggaacaagataaaggtgtccactcttgccacatagtattggatgttatagccagagcaattgggcaaaaaagaaaattaataaaaagcaaccaaatcagaaaggaagaaacataaatgtctctgtttggagatgacatgacacgtagtgagccctagagaatccactaaaacctgttagaacttaataaatgaatttagcaaagttgtaggatacaaaatcaacatataaaattagtagtgtttctatacactaacaataaattgtctgaaaagaaatcaaggaaacaacttcatttamaatagcatcaaaaaattagaagtaaatttagccaatgaggtcaaagatctgtacactgaaaactataagacactggtgaaagaaatggactataacacaaataaatagaaatgtatcatgtgttcatagaattaatattgcttaatgttcatactacccaaatcaatttatagatttaatgcaatcactattaaaattcaaaggcatttctcacagaattagaaaacaatctaaattcacatgggatcacaaaagaccctgaatagccaaataagacttgagcaaaaagaacaaagtacaagcatcatactacctgatttcaaattatgttatattaggttggtgcaaaagtaattgtggtttttgccattgaaagtaatagcaaagactgcaaagacttttgcaccaacctaatagtaattaaaaccatatggtactggcataaaaacagacatatagattaatggaacagaattaagagccaagaaataaacccatgctatatggtcaactaatcttcagtaagattaccaagaatacaaaatggataaatgatagtttctttaacaaatggtgtttggaaaactggatatttacatgcaacagagtgatattggactcatattttccatcacacacaaaaatcaattcaaaatgaattaaagatataaacaaaaggccttaaactataaactcttagaagaaagcatacagaaaaatctccttgacattgatcttggcagtgatttttcaccctgacaccaaaagcacaggcaatgaaagcaaaaatgaacaagtaagattacatcaaactaaaaagcttttgcacagcaaaggagataatcaacaaaataaaaagcaacatgtggaatgggagaatattttcaaagtatatacctgataaagagttaatgtccaaaatatgtaagacactcatacaactcaataaccaaaaataytccaatttttacaatgggcaaagtacatgaataaacattttccccaaaagacatataaatattaatagccaagagatttatgaaaagtgactcactatcactaaccatcagggaaattcaatcaaaagtataaggagagatcacctcatacttgttagactggttattactaacttaagaaatattacaggtgttactacattgttgctgggaatataaattgatacagccactatggaaaacagtatgcagattccttaaaaaaatacaaatagaactatgctacatagtcttatatgtagataaaccctaaagattccacaaaaaactgttagagctaatacatttagtaaagttgcagtgtacaaaattatataaaataagtaacctcattgataatttataatccagcaatcctgcttccgtgcatttatccaaaagaattgaagtcaggatttcaaaaagatacttgcacttccatgtttattgtggcatagttcacagtagccaagatatgaaaacaatctatttgctgacagatgaatggatttaaaaagtgacatatgtaatgaaatattactcaacaataaaaaagaggtaatcccgacacatggatgaacatggaggacattatgttaagtaaaataagccagacataaaaatgatctcacttatatgtgtaatctaaaatcatcagtcatagaakcatagagcataactgtgattgccagggaatgaggggagggaaaaatgggaaggtgatattcaaaaggtataaaaaagtttcatttgtgcaagatgaagaagttctggagatctactatacagcacagtgcctgtagctaacaataaactattgtattcttaaattctgtgaagagggtagatcttatattctgctcatactacacacacacacacacacacacacacacacacacagacacacacacaataattgtaataattataataaaaggggtaggaggaaactacgggagatgatggatatgtctatagtcttgatggtggtgatgatttgaatgggtatatacttatcaccaaactctttgagttgtataaattaaatatgtacagctttttacatgtgaatcatacctatcatacttgataaatggttttatgaaacaaaaaacaaaacagaaaaataaattaacacctttaaataaatgtatccatttcttctagaatttctagtttgtgtgaatagaggtgttcataatagtctctgatagttatttgtatttttttggctcagtgtaatatcccctttgtcatttctgattgtgtttatttggatatttttttctcttttctttattagcctagctagtggtctatatattttattaatttttttcaaaatccaactctggattcattgatcttttgaatggtatttcatatctcaatctccttcagttcagctctgattttgttatgtcttatcttctgctaactttgggattgattttctcttggttctctagttcttttagttgtgataataggttcttaaattgagatctttctaactttttgatgtagttgtttagtgctataaagttccctcttaacagtgccttggttgtgtcccagaggtgctggtatgttgtgtcttttttctcattagtttcaaagaaattcttaatttctgccttaatttcattatttacccaaaagtcattcaggagtaggttattcaatttccatgtaattgtattgttttgagtgattttgttagccttgatctgtaatcgtattgagctgtggtctgagagagcggttgttatgatttcagttcttttgcatttgctaagaagtgttttgtgtctgattatgtggtcagttttaaagtatgtgctatgtagtgataagaagaatgtatatcctgttatttttgggtggagagttatgtagatgtctatgagatccatttgatccagtgtgagttcaggtcctgaatatcttgttaattttctgcctcaataatctatctaatacagtcagtggggtgttgaagtctcccactattattgtgtggaagtctaaatctctttgaaggtctccaagaacttgctttatgaatctgggtgcttttgtgttgggtgcatatatattcaggatagttatgtttgttgaactgaaccctttaccatcatatattgcctttctttgtctttttgattattgttggtttaaagtctgttttgtctcaaattataattgcaactcctgctttttcctgctttccatttgcttagtagattttcctacatccctttattttgagcctatggatgttgttgcgtgtgagattagtctcttgaagacagcataccatttggtcttgtttctttatccagcttgccactctgtgccttttaattggaggatttagccaataaggcagtttaaaaaatattaataagaaattttcagaaacataaatgtaaaattccaattagaaattttataaactccaagcaaatgttttttaaaaaacctaatatattatgactgaattgagcttacccaggaataaaaggttaggtcaacattgggatatgtatatttatgtaagtattaccttaataagttaaaggagaaaatctataagattctctatagatgttaataaaacatatataagtttcaacatctaactatgatttaaaacacttgtgaatccagaaataaaagaaaaccttttatgaattagcaacagaagagcagttctttcatctgatagaaagctatttaaaaatacccatagctaccatgatacatcatggtaggaggtttaaacccaggaacttaatgaagataactgcattaaacattgctgttcaacaatatgctggaatagtaatcattgcaaaaaaagaaagaaagtgaaaaaagaattacaatttccaggaaggaaaaaatagaatgcctatttccaacaggttatatgataatacacattggaaatctggattaatctacagacaaattctttcaatttatacttcattatgttcataaaaataagatcagtaaacaaaatacattgcattttatacaccagcaaagacagaaaaacaaacaaatatgccatgtataataacacaaaatgtcacatagaaatatatttaataaaatatttttatactcttattaaggattagataagtttactaaaataactaaaataagaggagagacacatctggccctactgagccccactggtcaagtagcaacacaattcctgatgctgtctttaagccttactcagcgtgggaggcaagtgcacactggcagttgaccatacagggagcatctggccctggccaacctcagcagctgagcagcgactcagccagccttgggttctctttgcatattccctagataggaagacaatagcagctctgtgattatctacagagggagcatctgatcttgcccagacccagtagctatgcagcaactcaacccaccattggtgttctgcttaaggctactctagactaggagccaagcccaagtccacacacatctgtggagcatagcctctggccctgcccaccctgagtgatcaagcagcaaccccagaaatctcacccagcctcagagctcagcacacgtccctgaccaactacagattccaaacaacagtaccatctagcaagaaagacaacctctaaccctggacaatcaggcaactgcagagcccaatcagcagcaccacstgtcacaggagcacagccagcagttccatttaatgtcagagcacaggtagtggcccagcccaactagagaacccaacacccacatctgcctgtctgaggttgctaccagttggcctattcagaatcccaggctatattaaatagtgaagacctcttactgagaaagaacacttgcaaaggccagaaaaggtggccatttcttcaaatgtgcaggcaccaacacaaagacagaaggattattttaaaaatcaagaaaatatgacaccaaaagaaactaataatgctccggtaatagaccctgaaatatgcaagtctatgagaccactaagaatttaagataatccccttaaagaagttcaggaaactacaagaaaatgcagatagaaaataaataacatttgaaaaatggttaatgaacaaaaagaaaagcttgacaaaggaataaaaacaataaaatagttaaaatcctagaaatgatgaatacaataactgaaccaaaatattaactagaaagcttcaacagcagacttgatcaaggcaaagaatcactgggcttgaagactggatattttaaattatccagtcagagaataaaaaagaaaaaagaataaaaaatgaaaaagacctataggaattattggacaccattaagtgtactgacttttgcataataggagtttcagaaggagatgagagagaacaagatcccgaaggcatatttaagaaaataatggctgaaaatttcccaaatgtggtgaaacacaaaaatatccaggttcaggaagcttggatgtcatcaatcaaattcaacccaaagaggattttaccaagatatatcatattccaattatcaaaaaatcagagacaaagaaagaatactgaaagcagcaagagaatgaaccatatcgcattcaagagagccccaatatggttttcagcctttctcttagcagcaatcctgcatgccaggaaagaatggcattatgtattcaaagtgttgaaggaaaagattgccaatcaagattacattactagcaaatctgtccttcagaaatgagggagaaataaaatctttcccagacaaacaaaagctatggtaattaatcattattagatctattttataaatattactaaagggagccctttaactaaaacaaaaggattataataacaaaaacatatggaagtaaaaaactcactggtaaaaataatatatagtcatattcagaattctctaatacagtaagggtggtatttaaagctaatttatccctactgtcacagttaaaagacaaaattattaaaagcacctataactaaaataaattgtaaagaaatacaaattacaaaacatgtaaattktgacatcaaaatcataagaagtggaaaggagtgaaagtgtagagtttttgtatgtgattaaagttatcagaataaaatagcctgttaaaaggatattttgtgtatgcctcatggtaaccacaacacaaaaaaaccacagcaggcggtggctggcaagatggccaaataggaacagctgcggtctgcagcccccagcaagatcaatgcagaagggaggtgatttctgcatttccaactgaggtacctggctcatctcattgggactggttagacagtgggtgcagcccacggaaagggagctgaagtagggtggggcatcacctcacctgggaagtgcaaggggttggggaactccctctcatagccaagggaagatgtgagggactgtgccatgaggaatggtgcactacaacccagatattatgcttttcccatggtctttgcaactcatagaccagaagattcccttgggtgcctacaccacccgggccctgggttttaagcacaaaactgggtggccgtttgggcagacaccaagctagctgcaggagattttcataccccagtggcacctggaatggcagcgagacagaaccattcactcccctggaaagggggctgaagccagaaagccaagtggtctagctcagtggatcccacccccatggagcccagcaagctatgatccaagggcttgaaattctcactggcagcagagcagtctggggtcaacccaggacactcgagcttggtgggcagagggacatcaccattactgaggcttgagtaggcagtttttccctcacagtgtaaacaaagccaccaggaagttcaaactctatggagcctactgcagcttggcaaagcctctgtagccagactgcctctctagattcctcctttctgggcagggcatctctgaaagaaaggcagcagccccagtcaagggcttagagataaaactcccatctccctgggacagagcacctgggggaaggagaagctgtaggcacaacttcagcagacttaaacgttcctgcctgcctgctctgaagagaacagcagctctcccagcacagtgcttgagctctgctaagggacagactgcctcttcaagtgggtccctgacccctgtgccttttgactgaaagacamctcccagcaggggtcgacagacgcctcatacaggagagctccggctggcatatggtggatgcccccctgggacgaaccttacagaggaaggagcaggcagcaatctctgctgttctgcaccctccgctgatgatacccaagcaaacagggcctggagtggacctccagtaaacttcagcagacctgcagcagagggtcctgactggtagaaggcaaactagcaaacagaaaggaatagcatcaacatcaacacaacaaaaaggatgtccacacagaaaccccattcgaaggtcaccaacatcaaaaaccaaaggtagataaatccatgaagatgaggaaaaaccagtgcaaaaaggctgaaaattcctaaaaccagaatgcctcttctgttccaaaggattacaactcctcaccagcaagggaacaaaaccggatggagaatgagtttgatgaattgacagaagtaggcttcagaaggtgggtaatagcaaactcctttgagctaaaggagcatgttctaacccaatgcaaggaagctaagaaccttgaaaaaaggttagaggagctgctaactagaataaccagtttagagaagaagataaatgacctgatggagctgaaaaacacagcatgagaactttgtgaagcatacacaagtatcaacagccaaatcgatcaagtggaagacaatgatatcagaaactgaagatcagcttaatgaaattaaacatgaagacaagattagagaaaaaaagaatgaaaaggaacaaacaatgcctccaagaaatatgggactatgtgaaaagaccaaacctacgtttgattgctatacatgaaagtgacggggagaatggaaccaagttggaaaagattctccaggatactacccaggagaacttccccaacctagtaagacaggccaacattcaaattcaggaaatacagagaacaccacaaagatactccttgagaagagcaaccccaagacacataatcgtcagattcaccaaggttgaaatgaaagaaaaaatgttaagggcagccagagagaaaggttgggttacccacaaagggaagcccatcagactaacagtggatctctctgctgaaaccctacaagccagaagagagtgagggctaatagtcaacattcttaaagaaatggattttcaacccagaatttcatatccagccaaactaagcttcataagtgaaggagaaataaaatcctttacagaaaagcaaatgctgagggattttgtcaccaccagacctgccttacaagagctcctggagaaagcactaaatatggaaaggaaaaaccagtaccagccattgcaaaaacacaccaagttgtagaaactgcatcaactaatgggcaaaataaccagctagcataataatgacaggatcaaattcacacataacaatattaaccttaaatgtaaataggctaaatgccccagttaaaagacatagactggcaaatttgataacgggtcatgacccattaatgtgctatattcgggagacccatctcacgtgcaaagacacacataggctcaaaataaagagatggaggaaatttaccaaccaaatggaaagcagaaaaaagcaggcgttgcaatcctagtctctgataaaacagactttaaacaaacaaagatcaaaagagacaaagaagggcattacataatgataaagtgatcaatgcaacaagaagagctaactatcctaaatatatatgcacccaatatagaagcacccagattcataaagcaagttcttagagacctacaaagagacttagactcccacacaataatagtggaagattttaacacccaactgtcagtattagacagatcaacgagacagaaaattaacaaggatattcaggacttgaactcagctctggaacaagtggaccctataggcagctacagaactctccaccccaaatcaacataatatatattcttctcaggaccacrtcacacttattctacagttgatcacataattcgaaacagaacactcctcagcaaatgcaaaagaatgtaaatcataacaaacagcctctcggaccacagtgcaatcaaattagaactcaggattaaaaaactcactcaaaccacaaaactacatggaaactgaacaacctattcctgaatgactactgggtaaacaatgaaattaaagcagaaataaataagctctttgaaaccaatgagaacaaagacacaatgtaccagaacctctgggacacagctaaagcastgtttagagagaaatttatagcactacatgcccacaggagaaagcaggaaagatctaaaatcgacaccctaacatcacaaataaaagaactacagaagcaagagcaaacacattcaaaagctatcagaagacaagaaataactaagataagagcagaactgaaggaaatagagacacaaaaaacccttcaaaacatcaatgaatccaggaggtggttttttgaaaagattaacaaaatagatagamcgttagtgagactaataaagaagaaaagagagaggaatcaaatagacacaataaaaaatgataaaggggatatcaccactgatcccacagaaatacaaactacaatcagagaatactataaatccctctacacaaataaactagaaaatctagaagaaatggataaattcctggacacatacaccctcccaacactaaaccaggaagaagtcaaatccctgaatagaccaataacaagttctgaaattcaggcagtaactaatagcctaccaatcaaaaaaggcccaggacaagatggattcacagctgaattctaccagaggtacaaagaggagctggtactattccttcagaaactattccaaacaatagaaagagagaaactccttccctaactcattttatgaggccaccatcatcctgataccaaaacctggcagaracacaacaaaaaaggaaaatttcaggccaatattcctgataaacatcaatgtgaaaatcctcaataaaatactggcaaagcaaatccagcagcacatcaaaaaccgtatccaccacgatcaagttggcttcatccttgggatgcaaggctggttcaacatacgcaaattaataaacrtaatccatcacataaacagaaccaatgacaaaaacattatctcaatagatgcagaaaaggccttygataaaattaaacaccccttcatgctaaaaactctcaataaattagatgtcaatggaatgtatctcaaaataataagagctacttatgacaaacccacagccaatataatactgaatgggcaaaaactggaagcattccctttgaaaactggcacaagacaaggatgtcctctttcaccactcctattcaacatagtattggaagttctggcctgggcagtcaggcaagagaaagaaataaagggtattcaaataggaagagaggaagtcaaattgtctctgtttgcagatgataggattgcatgtttagaaaaccccggtgtctcagccccaaatctccttaagctgataagcaactttagsaaagtctcgggatacaaaatcaatgtgcaaaaatcacaagcatttctatacactaataatagacaaacagaaagccaaatcatgaatggactcccattcacaattgctacaaagagaataaaatacctaggaatctaacttacaaaggacgtgaaggacctcttcaaggagaactacaaaccactgctcaaaggaaataagagaggacacaaacaaatggaagaatattccatgctcatcgatagaaagactcaatatcatgaaaatggccatactgcccaaggtaatttatagattcaatgctatccccatcaagctaccactgactttcttcacagaattggaaaaaactactttaaagttcatatggaaccacaaaagagcccgtatagccaagacaatcctaagcaaaaagaacaaagctggaggcatcatgctacctgacttcaaactatactagaaggctacagtaaccaaaacagcatagtactgatacaaaaacagatatatagagcaatggaacagaacagaggccttaaataatgccacacatctacaaccatctgatttttgacaaacttgacaaaaataagcaatgggggaaggattccctatttaataaatggtgttgggaaaactggctagccatacgyggaaaactgaaactggactccttccttacaccttatacaaaattaactcaagatggattatagacttaaacataaaacctaaaactgtaaaaaccctagaagaaaacctagggaataacattcaggatataggcatgggcaaagacttcatgactaaaacactaaaagcaagggcaacaaaagccaaaattgacaagtgggatctagttaaactaaagagcttctgcacagcaaaagaaactatcatcagagtgaacaggcaacctacagaatgggagaaaatttttgcaatccatccatctgacaaagggctaatatccagaatctacaagaacttaaacaaatttccaagaaaaaaaacaaacaatgccatcgaaaagtgggggaaggatatgaacagacacttctcaaatgaagacatttatgtggccaacaaacgtgaaaaaaagctcatcatcactggtcattagagaaatgcaaatcaaaagcacaatgagataccatcttgtgccagttagaatggtgatcattaaaaagtcaggaaacaacccatgctggagagaatgtggagaaataggaaagtttttacactattggtggaagtgtaaattagttcaaccattgtggaagacagtgtggcgattcctcaaggatctagaaccagaaataccatttgacccagcaatcccattactaagtatatactcaaaggattataaatcattctactataaagacacatgcacacatatgtttattgcagcactgttcacaatagcaaagacttggaaccaacccaaatgcccatcaatgataggctggataaataaaatgtgacacatatacaccattgaatactatgcagccataaacaagcataagtggaagttgaacaatgaaaacacatggacacagggaggggaatattacacactgggtcatgtcagggtgtggggggctaaggagggatagcattaggagaaatacgtaatgtagatgatgagttgatgggtgcggcaaaccagcatggcacatgtatacctatgtaacaaacctgcacattctgcaaatgtatcccataactttaagtataattatttttttcagatggagtcttgctctgtcgcccaggctggagtgcagtggcacaatcttggctcactgcaagctccccctcccgggttgacrccattctcctgcctcagtctcccaagtagctgggactacaggtgcccgccaccatgcctggctaatttttttttgtatttttagtagagacagggtttcaccatgttagctaggatggtctcgatctcctgacctcgtgatccgcccgcctcggcctcccaaagtgctgggattacaggcgtgagccactgcgcctggccaattttaagtataatttttaaaaagccacagcaattgcacaaacaataaaaaacaaaggattcaaagcatgcaactgtgagaaawcatcaaatttcaaaggaagacagccagagaagaattaaaaataaaagatctacaaaaccaacataaaacaaattataaaatggaagtctgtacctataaataaccttgaatgtaaatgggttaaattctccaattaaaatacatagactggctgaatgtatttttaaaatcaaccatatactactgtctataagtgactcacattactagtaaagacacacaaagtctgaaagtgaggggatgaaaaaggatattccatgcaaataaaaaccaaaaaaaaaaaaagcagtggtagctatacttatatgagacaaaatagactttaagtatgtaactataaaaagagaaaaaggtcattatgtaataataraggsttcaatttaccaagaacatataacaatataaatatatatgcacaaaacatcaaagcagttagtaaatattttaaggagagataaactgcaacacaatagaagtagggaacctcaaatcccactttcagcaatgaacagataatctagacacacaatcaataagaaaactttggacttaaactacatgttagagcaaatggacttaatagccatatacagaatattctatccaacaccagtagagcacacattcttctcaagtgcacattctccagaacatatcatatcttaggccacataaaaagttttaaatttaagaggattaaactcataataagtatattttcagaccacaatggtacaacctagaaatcaatagaaatcttggaaaacaggcaaatatgtggaaattaaacaacatgctttcaaacaaccatcgggtcgcaggaaaaaacaagaatgaaataaaaaatattttgagacaagcaagaatggaaacacaacacacaaaacttatggggtgcattaaaggcaaaaatgagagggaaatttatagcaatagacatctgtatcaaagaagaaggatctctaataaacagcctaatgttacacatcaaggaactagaaaaagaaaaaagaattacatccaaagaacagaacaataataagtaaggagactgacttagtaataaaaattctcccatcaaagaaaagcccaggacccagtgacatcactgatgaattctaccaaacatttaaagaaaaactgccarcatttctcaaactcttccaaaaaatgacagaggacatacttccaaacttattttacaaggtcaacattaccctgataccaatatcagacaaggacactgaaaaaaaaagaaaactacaggccaatattcctgatgaaaatagatgcaaaaattccaccccccaccaaatactagtaaaccaaataaaatagcacattaaaagaattgcccactgtgaccaagtatgatttaaccctaggatgcaaggatggttcaatatatacaaatataaatgtcatataacatataagcaaagtgaaggataaaaatcatatgataatctcaattgatacagagaaaatatttgataaattcagcacmctttcatgattaaaaatctctgaacwtattaggtatacagggaatgtacttcaatacaataaaagccatatatgacaacccatagctaacattgccatggcatcctttgggtgttgcttttcctctggaaacctttgcccaagtttttcttaggcccattgggcttgttctgcccccttggccttgcaggctgtgcttggcttgtgataccagtccagatcccacacctgccaagggcgagccaggcacagagcagtgaggagtgcatgagtgagcgagcacaaaatctggccactgtgcacagccaggcatgctggctgctgtggtggagcaggcagctctaggcaccagcacaggtgccagctccatgtaaacctctgtgtggctagatcagatgcactgcaagtagcttccactgtaggcasctgtgtctggacgaggggaatgtggtggtgcctggaagcttggaaatgccagaaaccatacaggcccaaagagggtgtcacagtcctggcatgggaagcccctaggtctgggctcctggaagggctgcagctcttctctccttctcaytgtctgcaacattgcaaacagggcrgtgtgtatcagccctgtttgtgttacagctttttcagtcccacctttcagtggttcccaagttcttgtcccatatccaggaagaatgtggtacacagacaactggagggtaaggcagtgaggagctttattgagcaacagaacaattctcaggagacctgaagtgggtagctcctttctgcaggcaggtcatcccaacaagtgggtagctccttcctgcttctcacttcatagtcctgatgtctgtctgagtctaggggtttttatgggcccagaaggaagggagtgcatgctgattggttcatggatggccatgggtggctgggaaaaagcaccataaattctgactccaggcagtggactccacccggaactggcagcccagcccccaggcttcaggtcatccctggcttgaaggtagttagggacctgcccctttccacccaggaacctgtttcccttccaccatcaacatgccatccatggtacctgggctgttcatgctgagttggacctgcagacctgtgcagagctgccctcagccatcgtcctccctcctgtgctcactggtgctcaaagtccagaaggagctgaggaggcagaagctgtcatgtcagcactgcctccagcacatgcatacctggctgggcacaacagtgccyggactcggctacaactttgctttgcactggagtggacaccaggagcagggagagggtaggaagcagaagcaggcacttctgagcctgcaggggcagagagggtttccagggcccygagagcacagtgatgcctgggtctggagctgcrgctgggtgactgcagttgtgccccagagcacaggactcctgccccgtggacttggtagagagtggggctccccccattcccagccccctcccagccccacctggctccatggagcacatggccccagccacacctcccctgctgcagccagcatcttcacagcaactgctccagacaggctgccactgttatcaacatcatacttaaacatgaaaagtggaacacttttcctgctagatcagggacaatacaagaatgcccattcttataactttttttttttttggtgtcttgctctgtcgccaggctggagtgcagtggcatgatctcagctcactgcaacctccgtcttctgggttcaagtgattctcctgcctcagcctcccgagtagctgggactacaggcacacaccaccatacccagctaattttgttgtatttttagkagagacaggttttcaccatgttggccaggatggtctcgatctcttgaccttgtgatctgcttgccttktcctccgaaagtgctggggttacaggcgtgagccaccgccccggcacttctttctaacatagtactggatgtcctaaccagcacagttaggcaaaagaaagaaagaaaaggtatccacattggaaagaaaaaagtaaaattgtctctatttagtaataacatcatcttatatatagaaaatcctaaagacttagccaaaaaagtattggaaaaggtaaacaagtctagtaatgttgaaagatacaacatcaacatacaaagatcagtttcatttctatacactaatgaaaaactatctgaaaaagattaagaaaacaattccaatagcaacaaaaaagtacttagatataaatttaaccagagatgaaagacctggttaaaattatggaaaattataaaacactgattaaagaaattgaagaaaacacaagcaaatggaaaactatcctgtgttcataattggaagaattaatattgttttgatgtccttgactagcagagctgccgcttgccgtagtgtgctctgcaggaattgtggacgaacacagctgaagcttgccactggccactccatcccctcaaccagtgaccctgaccacttgattggtggagctgctgcctgccacatgtgactccagtgatctaaggacttgtggagtcacatgtgaccagaccaccagtgagccgaaactttcaactgtcagaggtgctgtacaccacacatgttccccaggaattgggaattagcctgcccagcatctgctcccaccagaaataccaccccctggaacagtggaggcaccacacactgcctgcatcccccagggttccaaggactggcgcactcagcacctgctgccatgacttcatatccttgattggcagagtgactacatgctgcacgcagcccyccaggagtctcaggaacagcccatttggtgtccaccactgatggtggccatatctcatttacttgcagagctgctgcatgctacgtgcatcgtctaggactccaggtactggcccactcagcacctggcacctctagtaaccttgcctcctcgactggtacacccctgggaccaagtgaccagtggagctgtcatgtttggtgtgcactgcccttgcctaaaaaccagcctagctggtggccccagctccctgcaaagctgtgccattgcctccaaaactacacacagcctacaacattgacacacttgaaggtacttccaatgttgattacagctgaagcagttacatggaaattattaatataatacagcacccacgtatccaaccaacaccataggactcatctacaggaaaacatctttgcctataaaagtttccacctcagggaactagaaaaataaaaaaaagaagccccaagttgaaaatgtttgaaataacaaaaattagagcagaaatagagagtagaaaaacagaagaaaacatcaacaaaactaacaggtggtttatatataatgttattccataaaattggaagaggttattgttccaccaaatttgcagatatcaatgtaggaacccaagaaacatgaaaatccaaggaaatatgacacctccaaaggaacacagtaattcttcagtaacagactccaaggaaaataaaatctatgaatgcctgaaaaggagttcaaaataatgatcttaagaacacttagtgagacacaagagactagaaatggagaatttaacaaaatcaggaaaacaatttttcatctaaatgaaatactttttaaaagcccctttccccatttaaaaaaaaaaaagaaatattcaacagagagacagatactacaaaacagagctaaacaggaatcttggagctaaggaattcaatgaatgaaataaaaacattgccatttgatggattactatagtgataaaatttgattcctttcaaatttatacaggagatraatcagaagaaagaatttctgaacttgaagacaggtattttgaaataacccagtcygatgaaaaaaagaaagagaaaaaagaatgaagaaagtatacaggacttatgaaataccattaagtgaaaaaattttcatattatgtgagtttcagaagaagagatgagagatggtgtaaataacctatttaataaaataatagctgaaaacttygcaagtcctggaagagatgtggacatccagttccaggaagcttaaaagtttccaaaatattcaacacaaaaaggtcctctacatggcacattttagtcaaattgtcaaaaggacaaacagagaattctaaaatgagcaagataaaagtgtcatgctacgtacaagagaattcccatcagactaacaacagatttctttccttcttccttccttccttccttcctttctttcttttttttttttttgatggagtcttgctctgtcgccaggctggaatccactggcacgatttcggctcactgcagcctctgactccctagttcaagtgattatcctgccttagcctctcgagtagctgggattacaggcacgcaccaccacacccagctaatttttgtatttttagtagagacggggtttcgccatgttggtcaggatggtaacagcagatttcttaacagaaatcttacaggccaagagagaaagggatactatgttcaaagtgctggaagggaaaaaaagccaactaagacatgatggccagcaaagatattcttcggaaataaagaagaaaaagatattttttagataagcaaaactgagggaatttatcaccactagatcagtcttacaagaaatgctcaagggagtcctatgtctggaagggaaaggatgataactaccatatgaaaacacctgaaggtagaaaactcactggaagaatagatatgaaaatgagaaagagaaaggaatcaaattttatcactatagtaatccatcaaacggcaaagggaaatgataagagaggaagaatcaaacttggatatacaaaataatgaacaaaaagttaacaaaatgacaggaataagtcctcactcatcaacaatacccttgaatgtaaatagtttaaattccctaattaaaatatatagattggctgaatgaatgaatgaatgaataaatgaaaaaagatcccattatatgstgcccagaagaaactcacttcacttgtaaagacacacaaagactgaaattgagggatgatgaatggtattccacacaaaaggaaaaaaaaacaagcaagaatagctatacttatattagataagatagattttaagtcaaaaactgtaaaaagggacaaagaagattattatttaatgataaaggggtcaattcaacaagaggatatagcaattgtaaatatatatgaacccaatacaaaagcaccaaaattcataaagcaaatattactagatctaaagggaaaggtagatcccaatacattaattaatgtaatgtctagctgaactgtctagctgttgaagctgggggcttcaacaccccacactcaccattggacagatcatctagacagaaaatcaacaaagtaacattggatttattgtaccctatacaccaaatgaacctagcagatatttacataacattttatccacaagctgcagaatacacattcttctcatcagcacatggaatattctgcaggatacattttatgttaggccacaaaacaacctcaacaattttttttaaaataaaaactatatcaaatatattttcagggcacaatagaataaaacaagaaatcaataacaagaacactggaaattgtacaaatacatggaaattaaacgacattcttctgaacaaccattggcttaatgcagaaattaaaaacaaagttaaagaactccttaaaacaaatgaaaatataaatacaacataccagctgggcacagtggctcatgcctgtaatcccagcactttgggaggctgaggtgggcagatcacgaggtcaaggggtcaagaccagcctgaccaacatggtgaagcaccatctctactaaaaatacaaaaaattggctgagcatggtggcrctaatcccagctactcgggaggctgaggcaggagaatctcttgaaccagggaggcagaggttgcagtgagctgagatcatgctgctgcacttcagcctgggcgacagagcaagacttcatctcagaggaaaaaaaaaaaaaaagaaacacaagataccaaaacatatgggatatagtaaaagcagtactaggaggtaagtttatagcaataaatgcctacatcataaaaagtataaatatttcaagtagaaaaaactccaaacaattagcctcaagaaactagaagggcaagaagaaacaaagcccaaattttgtagaaggaaataaataataaatatcagaggagaaataaatgaaataaagaccaaaattataagacaaaagaccaacaaaataagagtttgtgttttgaaaagataaaattgacaaacccttagctggaataactatgaaaaaaagagagaagatccaaataaagaaaatcagaaaccaaaaggaggcattacaactgataccagagaaatagagaaatacaaaggatcattggagactattaagaactatatgccacggggcacaattgttcatgcctgtaatctcagcactttgggaggccaaggcaggcaaatcacttgaggtcaggagctcgaaaccagcctggccaacatggtggtgaaaccctgtctctacaaaaaaacaacaataacaacaaaaaaaacccataaaaattagctgggcttggtggcatgcacctgtagccccaactactcaggaggctgaggctgagaatcattgaacctgggaggcagaggctgcagtgagccgagattgagatgcagcctgggaaacacagcaagaagaaagaggtggaagggagggagggaggaaggaagggaggaaggaaggaaggaaggaaggaaggaaggaaggaaggaaggaaggaaggaaggagagaaagaaagaactagtatatgccaacaagttggaaaatgtaaaagaagtagataaactcataaacacatggaacatactaaaatagagtcaggaaaaactagaaaacctaatcagactaataatgagtaacaagagtgaatcagcagtaggaagtatcccaacaaacaaaagcccaaaacaagatgacttcactgctggattctattaaacttttaaagaactaacaccttctcttcttaaagtattacaaaaagttgaaggggtgggaattcttccaaactcattccatgaggacagtattatcctgatgccaaaatcagaaaagaatacaacaaaaaggagaatgctacaggccaatattcattatgaacatagatgcaaaaattctcaacaaaatactagcaatccaaatccaatagcatatcaaaaagaatatacaccatgattaagtgggattgattctagggatgcaaggatggttcaacatatggaaatcaataaatttgatatatcacatcaacagaatgaagaccaaaaagtatatgatcatctcaatagacattaaaaaatatttgatgaaattcaacatcctgcatgatataaactctcaacagtttagatgtagaagaaatgtacctcaacacaatcaaggtcacatatgacaaactcacagctaacatcatacagaatggggaaaagttgaaagcttttcaataagaactggaacaagacaaggatgcccacttttactactcttattcaacaaagtactggaagtcctagccggagcaatcaggcaagagcaaaaaataaatggcatctaaattggaaaggagaaagtctaattgtccctgtttgcagacaacatgatctttatataaaaaaactaaagattccatcaaaaaaacctcttagaactgataaacaaattcagtaatgttgcaggatacaaaatcaacatataaattcagtagtgtttctacacaccaataacaaactagttgaaaaagaatcaagaaagcagtatcatttacaatagctacaacaaaataaaataccaaggaataagtttaaccaaggaggtgaagatctatacaataaaaactacaaaacattgatgaaaagaactgaagggaacacaaacaaatgaaaagataccccatgttcctgatgtaagagaattaagattggtaaaatgaccayactacccaaagtgatctacagagtcaatgcaatccttatcaaaataccaatgacattctttaaagaaataaaaaccaaaatcctaaaattcatatggagccacaaaagactccaaacagccaaaacattactgaataaaagaacaaagctggaagtatcacactatggagcttcaaaatacactacaaaagcatgctagccaagacagcgtggtactagcataaaagcagacacacagaagaatgagacagaatacaaaacccagatataaatccacatatttacagtcagctcacttttgagaaaggtgccaagaatatatattagagaaaagagtctcttcaaaaaatagtgctgcatttgctagtatcaatatgcagaagaatgaactaacccctatctctcaccatatataaaawtaaactcttgatgaattaaaggctaaaatgtaaaacctgaaactataaagctactagaagaaaacataggaaaaatgcttcaggacattggactgggcaataatttttttttatgtgatttcaaaaccacagacaataaaagcagaaacagacaagtgtgattatatcaaactgaaaagcttttgcacaacaaaggaaataattaacagagtgaagaggtaacttacagaatgggagaaaatatttgcaaactatacatctgactaggtattcatatccaggatataaggaactcaaacaactcaagagtgaaaaaacccaaataatccaatcacaaaagggaagatagacttttttttttttttttttttttgaggcagagtctcgctctgtcgcccagactgcagtgcaatggcgcaatcttggctcactacaacctcagcttcctgggttcaagtgattctcctgcctcagcctcccgagtagctgggattacagacaccatccaccacacccagctaatttttatatttttagtagagacggggtttcaccaggttggccaggctggtctctaactcctgacctcaggtgatccatccagcctcccaaagtgctgggattacaggcatgagccaccgtgcctggccaggatgatagaccttatatacatttcttaaaagaaaacatacaaatgaacaacagatatataaaaatctrttcagtatcactagtcatcagggaaatgcaaatcaaaactacaatgagataaaacattactcaagttaaaattgctattatcaaaaagacaaaagataamaattgttgatgtggagaagaggaacacttacacaccattggtgggattttcaattagtgtgttcattatggaaaacactatggagatttctcaaaacattaaaaacaaaactaccatagatccagcaatcaaagtactgagtatacccaaaagaaagaaaatcaacatgttgaagaaatctgcactcctatgtttatttcagcactattcacaatagctaagatatggaatcaacctaagtgtttattaacaaattaatgaaaagcaaatatgatgtatatacaaaatagaatattattcagtaataaaaagagtgaaatcctattatttgcaacaacatggatgaacttagaagacactacgttaagttacattaaaccatacatgatctcacccataagtggaatccaataaatggatctcatagaggtacagaatctagaagacattaagtaaattaagccagacacagaaatacaaatatcacatgatctcacccacatatggaatccaaaaagtttatctcatagaagtagagaagtaggggttaccagagactggtggagctggggatagggtagagggaggaatggagaaagactggccaatgcatacaaagttacaattagataggaagaaaatgttctggtgtcctgttgcatagcaaagtgactatagttaacaagaatgtatagtatatttcagaatagctagaagagaggattttgaatgttctcaccacaaagacacgacaagtgtttgaggtgatggaaatgatcattacacaatgtatacatgtatcacgacatcacattgtaccacataaatatgtacagttattatgaggcaattaaaattcttttaaaaagctgatctcatagaagtagaaagtggaatagtggttactagaggctggtaagggtagagggattgcaggggatgaggagaggttgatcaggtacaaaattayatttaaatagcagcaataagttccagtcttctattgcacagtagggtaactataattaccaataacatattacatatctcaaaatagctagaaaagaggattttgaatgttctcaccttaaatgatcaatgttttaggtgataccttaatttgatcattacatattgtacacatatatcaaagcaccattttgtaccctgtaaatatgaacaattattacatcaatacaaagtaaaataaaacttaaaaaactgaacacaaataaaggaaatatattccatgttcagggattggaaggattagcattgttaaaatgtttatactacccaaagctatttacagattcaatacagtctctctcaagattctaacgtcacttttcacagataaagaaaaaaggaatccttaaattcatatggaatcacaaaagatctcaaatagccaaagcaatcttgagcaaaaataacaaagttagagtcacaatactctgatttcaaaatataaagtgattataattaaaacgtcctggggctggcacaaaagcggacacatcactcaatggaacaggatggaaagtttggaagtacgcccatgtgtttatgaacaattgatttttgaaaaaggtgccaagaacacaggatgaagaaaggacagtctcttcaataaaygatattgaaacaagtggatatccacatgcacatgtgtgaaattgaacccttatctcacaccatgtacaaaaacgaactcagattaaaaagttaaacrtaagacctgcaactataaaactgctagaagaaaatatatgggcaaagctccatgacattgatcttggcaataatttttttgaatatgacataaaaagcacagacaaaaaagcaaaaatagacaaatgggattacatcaaactaaaaagcttctgtacagcaaagaaaacagttaacaaggtgaaggactacccacagagtgagagaaaatatttgcaaaccaaacagctgatagagggttaataaccaaaatatataagaaattcaaacagctcaatagaaagaaaacaaataacctgatcttaaaaaaggggaaaggacctgaacaaacatttctcaaaattacatttaagtggacaacagggagagtgtaggcttgcgctaactctcttctttcacctagttgcactcctgagagcaagatgggtcaccagcagctgtactggagccactcatgaaaattcggtcagggttcttgctcttgtcgagtctgatccggaaatatggcctcaatatgtgctggcagtgtttccatcagcacgcaaaggacatatgtttcattaagttgaactaagtgctcttccttgaatggattatccaaggcatctacgcaatgaaaaaccatgatagctctttgtacataaaataaacattaataaataaataaataaataaataaataaatggacaacaggtacatgaagaaatgctcagcatctctaatcattgtggaaacgcaaattaaaccacaatgagatatcaccttacacctctttgaatggctattatcaaaaagattaaagataagtgttggcaaggatgctgagaaaaggaactcatacattattggtgggaatgtaaattagtatggcaattatggaaaactgtatggagttttcttaaaaaactaagaatagaactactctatgattcagcagtcctacttgtgggaatatatgaaaatggattgtaatcaatatgttgatggaatagctgtattactcacaattgctaaattcagtctaagtgtccatcattcagatgaatggataaagaaaatgtgatctataaatacaatggaatacaatatttagcctttaaaaaaaggatggacattttgtcgtttgcaactccgaggataaacctgaaggacattatgctaagtgaaataagccaagcacagaaagatgaatctcttgtgatctgatatatgtcaaagctaaaaaagttgaactcataacaatagagagtagaatgttaccagaggctggggcagagggcaagagagaatggggagttgttggtcaaagggtgcaaagattgagatagacaagaggaatatgttttgaagtctactgaagaacagggtgactgtagttaacaataatatattgtatatttcagaataacagaaagaataaaatttaaatgtctcatcataaaaatgataagtaagggagatgatggatgtcttaattagcttgatttaatcattccacattgtaggcatgtatcaaagagtcacaccrtacccattaatatgtatgtgatttgtcaatttaaataatagtaataaaaggagggaagagatagtttttcagacaagatgcaaatattttaagacatcagttctctctgaattgatctatagattcaatacaattccattcaaaatctcagcagaattttcttagaacttgacaagtcaatacaaaaatttatgtcgcagagcaaagttgccaaggcacaactgaataagaagtgaggaaacttagtctagtttataccaagacatatcccggaactgtggtgattaagccactcaaaattattggcacaaaagtggacaagtagacaaatgacacagagcagagagcccagaaacaaatccaaacctaaacagaaagcttattgggtcagaggtgatgctgcacgtatcagtgtgtaaaggaatgtccattcaataaatgttggcacagtcgttatctgttgagaagaaaattaaatagaaccactacctcattttataacaaaagtacaatcaaagtattaarcctataggagaatttatagaaacctatttcttccattgtggggaacaaggtgactccttaaagaagaattgaattgtgtcttttgttcaccaataamtaaaatgtctgtgggattgtttttcagatacctttttcragcctatatcrtggcacctggctaccaaagtactgggaatactctgctgtggcctattttttggcattgttggactgaagattttcttctccaaattccagtgtaagcgagagagagaagcatgggccggtgccttattcatggttccagcagggacaggatcagagatgctcccacatccagctgcttctcttcttctagtcctagcctccaggggcccaggcccaaaaaagtaatcatccttctctagggtattctaacatctcttcctctggaaatatcaactacgacagccccttgctacttcatttaggtcaaataataaggggatgaatgattttcagtacctatagagagagcttggataattttccrtgaacaccaccaagactcctattaaaaagttttaatgtggtgaacaaattcataaaggaggaagcaaaagtgactgacaataagataaaattatattcagtctcaataagacttttcacccccaaaaccaatttcctcctccttgggagtgacacttccccttgggggtgaggccacccccgcctcccctcccagcygccttctcccatctccatccccacctccacagcatcccagctgttgtccctctccttagcatgcaccttcctgatctcttgctccaccccagagagccacactccgtgcaggagctggggagacgagcacatataagtgtcctaggagaggccctgcccttcacacctgcagctcgtcccacctgtgcaaggagccagcgtcgtgtttgtgccttgtacactcctgtgtccaccactgaatatactgtttctgtttcagggaaaatccaggcggaactgggtaagtatgtgtcatgtcctgagcctcccacacatggttctcccgggtccctccctgatccacagtttgagcctctggacgaccctggctgcaggctggacaggaagcaccggcaggtggaggrgagcagctgctcrctctctccatccactgctcatgagttacccctcggacatctggagggcttaggataggccccggggcctggaagtccccacaaattgtctgtgcctgttgcccgttggtttgctgtgtgtgtggtgggggraggtgttgatcatgagctctgagggtgtstgggccacagtgaggaacctgagaaaaatttgtgggtgatcctcgacctcccctggcctgatgctttgagactttatccagttctgtatcaaccactaaatagtctgctttttgttttgtgggaactccaggataaactgggtgagagtgttaccactcgcagggattccctcccacgccctccctgggcccccgctctgtgacgtcagcctcttacatgttttttgtttttgtttttgtttttcagactggagaagaaagcacggacaggcaggtaaaagaaaatattcctcttcacacatttatgactcctttccaagtctctcgtttatggatttttatatcctgaggcccgtgggtccctgcagagccaagcttgtgatgggaactctgaaattgcagattctgggggaggtgcattttgtagagaagccccatagccttcttcggatctctggagggtccacaacactcaaaaagggtcccaatccttggtctttcccttctccctgcgccctgtttcccacgtgagcactgaactgcctgctctgtctgcttgctttcagaattgagagacgcccggaaacacgcaggtaccaacgcctgagagggtgacagtgggacagaatctcaggtggacatgagagggggaactgaacagggacagatacgggaacacagagtgatgctgagacccatcctgcctgcagatggagaaactggatgcttgatcgcccccaagggttcagtgcccccagacacacttctttcccttggtctagaaggggagaagacaggggctgggtaaacgggagacgggggggtctttggcacagtttcagggaattgagggcactagtgactggtcaggggtctgagctgaggggaaggaagtaaagtcaggcagaaaattctgagtgggaggaagttagatagtggggtccctccagctcttatgaatcaaatagttttatgtatgaagggacagtggcagggttgggtgatatgccgagattgggacgtcatattgagacatatctagacattgatgagtcctccaggctgcactggtgatgagaggacctgaaaggcagtgtctgcgggaggctcaggtccggggcctcacctatgmcacccagagccagtctgcagtgggagggtcgacctcttgctccagcccagatttcstcttcagtaactcatgcttcctctctcccccaccgcaccccagtggaggtgactctggatccagagacggctcacccgaagctctgcgtttctgatctgaaaactgtaaccsakagaaaagctccccaggaggtgcctcactctgagaagagatttamaaggaagagtgtggtggcttctcagagtttccaagcagggaaacattactgggaggtggacggaggacacaataaaaggtggcgcgtgggagtgtgccgggatgatgtggacaggaggaaggagtacgtgactttgtctcccgatcatgggtactgggtcctcagactgaatggagaacatttgtatttcacattaaatccccgttttatcagcgtcttccccaggaccccacctacaaaaataggggtcttcctggactatgagtgtgggaccatctccttcttcaacataaatgaccagtcccttatttayaccctgacatgtcggtttgaaggcttattgaggccctacattgagtatccgtcctataatgagcaaaatggaactcccatagtcatctgcccagtcacccaggaatcagagaaagaggcctcttggcaaagggcctctgcaatcccagagacaagcaacagtgagtcctcctcacaggcaaccacgcccttcctccccaggggtgaaatgtaggatgaatcacatcccacattcttctttagggatattaaggtctctctcccagatccaaagtcccgcagcagccggccaaggtggcttccagatgaagggggactggcctgtccacatgggagtcaggtgtcatggctgccctgagctgggagggaagaaggctgacattacatttagtttgctctcactccatctggctaagtgatcttgaaataccacctctcaggtgaagaaccgtcaggaattcccatctcacaggctgtggtgtagattaagtagacaaggaatgtgaataatgcttagatcttattgatgacagagtgtatcctaatggtttgttcattatattacactttcagtaaggtctttgcttgtttatttcacatgaatttattgttccctacttcaaatcacccatgaaacaggcacctgctctgtgccagagccagagggaaggtggcacttccattgcattctatagagcccgcattactttcataccaaaaccagacaaggacattacaagaaaagaaaggaaaactacacgtccatatcccccatgaacttagacacaaatattctaattaaaattttagcaaactgaatccagcaatacattcaaagaataatacatcactactaaatatgttttttctcatatgtggcttaatattcaaatatcaaccagtttaattaaccacattaacaaactgaaaaagaaaactatacgatcatttcaatagatgcaggaaaaaattacatctgtgagcaaagaagctacacagatgacaggcacatgaaaagatactcaacatcatagtaattgagacaattcaaattaaaacaatgagataccattcctacctattggagtggtaataaaattacacagaatgatcatacccagtgttggccacaatgtgcagaaactgaaactcacaccctgctgataggaatgtaaaagagtgtaaaaatgtaaaaactattttggaaaactgtatggcagtttctttaaaagtaaacagtcacctaaygtatggtccagccatcccactcttaagtattcaccaagagaaaaggaactgcatgtcttgacaaagccttgtacctcaatattcatagaagcctcattcagaataggtgaaaggtggagacmgcccagatactcacaacagatgagcagataaacaaaccgtggtgcatccacgcatcaggcgctccatgacagtcaaaaatyaactcttcgggcaggcagtgaagggtcgtcacacagcagctgtgggtgcagaaggtggtggattccatggtggagagtctggacagagagaacatccagaagatccaggtgagcagcccgaggcccagccaaggcgtggccagggtgaaagacaagaaaggcgaaggctcctggccttcgaacctcatcctttgagtgctatgcccacatttaaatatacatgctttattttaaagagcagttctaggttcatagaaaagtcacgtggaaagtacaaagagttcccatataccctctgcccacacaggtgcatagctctccctactgtccacatcccaccaagatggaacattgtaactatcaataaacctatgttaacacctcattatcacccaaagtctgcagctgacattagcgttcactcttggtgttgtacattccatgggttttggcaaatggataatgacatggatctatcaycactgcatcacacagatgctttctttgccctaaaaatcctctgtgctctgctattattcatgcttccctcaccactaacctctggcaaccactggtctttttactatttccagagatttgccttttctggaatgtcatataattggagtcatacaatatgtggtctttttagattgttttctttcactttataatataaacagtcacatttttaaaatcacagtgatatgcctgatacactactattgctttattgattttatgtaatgtccaagtctgtaggtactcaggtacctgagtacggacagtgtcaagaggaggagagggatgtgcttcttaatgcagcatttgctgagtgagaagaggtgaccaccccaggagctgccaatgttcaatcccttctggccttagcccagggagcttgagggtgattgaagtggaaatccacagggtcttccacagtcccttctccccagtgctggtagagtgtgtcttaaagcagctgtagatggaatactacttggttaaaaagaaggaacaaactattgatacatgcaacattttggatgtatcttgtaggcggcatattcagtgaaaaaagtccatctcaccaagttcataggatatgactccatttatatgacattctcaaaatcacaaaattatagagaggaagaaaaataagtggtttccaggaattaggaaagggggagagggtgtgtgttttagtctgttttcacactgctataaagaactacctgagactgggtaacttataaagaaaagaggtttaattgactcagttctgcacggctggggaggcccaggaaacttacaatcatggcaaaaggcaaaggggaagcaaagcacgtcctacatggtggcaggagagaaagagaacaacgtgggaactgtcacacgcttttaaaccgtcagatgtcgtggaactcactccctatcatgagaacagcatgggggaaccacacccatgacccaatcaccttacaccaggtccctcttttgacacatggggattataatttgacatgagatttgggtggggacaagagtcacaccatatcagagtgatttatagatgcacattgagggaggtcttcaatagtgatggaatagtatgttttttccttgagacagggtctcggtctatctcccaggctgcagtgcagtggtttaagcatagctcactgcagcctcgaatttccaggcttgaacgatcttctcacctcatcctcctgagtagctgggaccacaggcatgtgccaccatgccctgctacttttttgacttttatttttagtagagatgaggtttccctgtgttgcccaggctggtctcaaactcttgggctcaagggatcctcctgcctcagcctcccaaagtgctaggattacaggtttgagccactgtgcttgttctggaacagtatcttgtttatgatggtggttacttgaatttatatatctaataaaattgcacagaaccacatgcatgtgcacacacacacacacacacacacacacacacaaatgaatgcatgtaaaaactgctaacatgtgaatcaggcctggagtctagttaacrtatttatatcaatatcaatctcctggtttcaatattgtgccatagcaaagctacataagatgttgccattgccttaattttaaaaaattgttaccattggagaaagcttggtgaagggtactcaagactcaacaatttttgcaatttcctgggagtttatatgactgtttcaaaataaaacaaaaatttgtaaagcagctttaaaaaaacaacatttattttaaaatgaagttgggttgtcgaaataaataaatgtgtgtgaaacagagtttcagagattcaactggtatcagctcacatcaaatgacaatgaaacagaagacttaaaaaaatttctgtagctttgagtatcagaacaactatcttcaacaaatcaaaattgaatgatgccattagctgtgccatccaaagtaaataaggactaaaatcatgaataagaaaacttggaataataggtgataaagctaacattaatgtaacatggtagtccgactagaaacaataagtgccaatataacgaattcccctgcaaaacatccccaccaccaagttagttttcattataaagatgattaaaacaaactaaagcagccacagacaggaacaccgggcctgcctcctggtgcagccgtctgagcttcccaccttaggacagcagtgggaagcaggatggtggggcccaagtcaggagctaagtccccctactgtgcctggggaaggatgcaaggctcctgaggcacctcaggagaggaagcagagagggttgtagtcgatgagctgagtctggaggccagagggagccgagggtctaggagcacgtggtgagtggcagagatgctggtaggytccctgtgtgtttttcagggagtaataaatacaagcccagaaactaccagragccaggcattagagatatgaggatggactgctgtgaactgtctaggaacaaaatagctgaaagggcactgtggaagaaggtgtcagaaaattaacttctgaaaggaaaggagagagggctaggaaggccttgggcagccaagttcatacagagacgtgtgtgtgtgcatgtgtgtgtgtgtgtgtgygcgtgatgtaaggagaaaggaggaaagaagtgggggtaaaagtgaaattttctgagctattctgtggtttttttctctgacatgaccaaaataggaagaaaaagaaaataaaactaaagaaaaaaacaaaaaaaaattcacacacaaaaaaggagcagcaatgtcactcacacatgaaacctgacttcacatcccagatctgcttgggatgcagaagtccatttgactgttaaaaatgtatttttatcaaagtgatgcaaactaatatttaaaggagtttttaggtccggtgcggtggctcacatctataatcctagaactttgggaggccaggtgggtggactgcttgagcccaggggttcgagaccagcctgggcaacattgcaaaaccctgtctctacaaaaaatacaaaaaattagccaggtgggtggtgcatgcctgtggacccagctactcgtgaggctgacaggaggattgtttgagcctgggaggttgaggctgcagcgagctgagatcacgtcactgcactccagcctgggtgacaaagagagaccctgtctcaaaacaaactaacaaacagaatccccccccaccacaaaaaaccaaaccaaaaccatgatttttaaaagcattgtaataaaaagcaatagtaccccaatgccttactactgtgtccctttccaacccaccccagtgttgtacccacagggaaaactttatggcttctctttttggttgtttttccttatagctaagttacttgtttcttcttctggcattttattttatttatttatttatttaattttttttttcgagtcagagtctcgctctgtcccccaagctggagtgcagtggtgcgatctcggctcactgcaacctccacctcccgggttcaagtgattctcctgtctcagcctcctgaggagctgggactacaggcacccgccaccacacccagctaggctaatttttgtatttttcgtagagacaggttttcaccatgttggccaggctggtctcaaactcctgacctcaggtgatctgcccacctcagcctccctaaaagggctgggattacaggcatgacccactgcgctcagctattttgttttatttttaattgacaaaaattgtatatatctgtcgtgtgtaagatgttgtattgaaatatgtatgcagtgtggaatggctatagacagctaatcaacatatgcattacatcacatacttatcttttttgtgatgagaacacatgaaatctattgtttcagtaattttcaagaatacaatacattgttactaactatagtcaccaggttgtataatagatctcttaaacgaattcctcctaactcaaactttttaccttttgaccaacatttccccaaacttcccacatactcagcccctggagaccaccatgctattttttacttctgttagttcaacttttctagactctacatatacataagatcatgcagtatttctttttctgggcctggcttatttatcttaatataatgtcctccaggtttatctacgttgtcacaaataacaggattttcttcttttttaaaggttcatactacttcattgtgtatctatatacatacatagtgtctacccacacataaatacacaaacacaatgttgaatattttcttcggagaaatgtttatgtatatatacaatattttctttttctttccttttttttttttttttgagacagactttcactcttgtcggccaggctggagtacaatggcgcgatctcggctcaccgcaacctccgcctcctgagttcaagcgattctcctgcctcagcctcccaagtagctgggataacaggcatgggccaccacgcctggctgatgcctgtaatcccagcactttgggaggccaaggcaggtggatcatctgaggccaggagttcgagaccagcctggcc

SEQ ID NO: 1624 - DNA, 13485 bp, Homo sapiens
aatgacttttaccaagtatactgcttgtaaacatcttgttaacaaggcacatcctgcacagccctagatcccttaaaccttgatttcatacaacacatgtttttgtgagctccaggttgggtcaaagtggctggggcaaagtggctggggcaaagctacaaattaacaacatctcagcaaagcaactgtttaaagtacaggtctttttcaaaatggagtctcttatgtcttccctttctacatagacacagtgacagtctgatctctctttcttttccctacagagatggtcacataacattgtgaatgtaattaatgccactgaaacaaagtggctttaattgcaaaaaagaaaatgaaaaggcaagacatagtggggaaaatattagcaaagcgtattgtctgataaaggacttttatctagaacacataaagatcacttagagtctcaagaataagaagamccccctagaagwtttaaactggacaaaatatttgaacagatgttccaccagagaagatgaatggcaaaaaaaacaagcaaatggaaagacaaaatcatgagatgccattagacacccactagaatggctgtaatttaaatggtttccaaggatgtggaacaactggcactgtgatttagtgttagtgasaatgtgaactagtgcaaccactttggaaaacaagttggcagttcttaaaaagttaaaacatacgacttaacatttgagtcagccattctacttttgagcatttacccaagtgaagtgaaaacaagtgtccatacaaagaattgttacacaaatgatcctagcaagtctgtttataatagccaataattggaaacaacccaatgtccatcgacaagtgaatgcacaaattgttgtatattcaaacaatttaatacgactcaacaccaaaaaccaataaactggatatatgcaacaggctccaggggagtcaagatttccccttagttatggttggagagggtgttactgggcttcactgtaggggtgacttgggagcagtgaaaggatcaaattgcccagccctgactccacatgtgaatcctcatggtgccctggaggaggcagtgctgctgaggtaggcacttccctcgctgccacattccttctgctcctcttctctctgaccctcagaggtcaagtgggacaccctggaaagggaagcagctgcccacaaggccagtaccctccccagtttttttaggtaacaatctgaaaggacaaagccacagggcactacttggtccagcaggggcttgtcaggtaaaacgtccaaagagaggaaagggaacaaaagtttttttcttyagttacctagaattacaatttattctaaagattttacttaaaaggaaaaaaagggactgattatcttggggcggagcagccatactagagagtgcccgcttcccgcctccctctgttgctcttatcaaccagagactaagaaaacttcagcttcagggggctgaaaacctaaaacaaatgaaagaaaaataggaaaaaaaaataggaaagaaaaaaagactgtcgcattaggcagctagctacaagtcaaaagtgggaaaaaaagaggaacttcaaggactaagctaatgccagtgtagcaaacataatgctagcctcagatcacctattgacttaygaacaaacctctggatacaggagaaagtaaaagataaataatatgtttrtagataatattttgatgtaaatatataattaaatattaggtattttccataatcaaatccagttagaaattaaaacttcatatatttatatactgaagaatttatgtaacaaaggcttttatgcttctacaacataggttctaactttaacattggttaatatgcactaattgaaaaaaattcatgaacttaataagctggcgctcaaattacaagcctggggattccactaaattccactgctcccataagcttgagaagataactacatatgaaattttttaaaatgagtatgcctcactttaactgtagccttgcccaagtttctcatagtcatgtatctgttgctgtaaaatatactatattgggcctagatggaagctctgacacaataaayaattaaagtaagtctttggcacttaaaaacttggtaaaatgcaaccccgtgaacctccagttaagataatttatgtgatccaatataagttgaaacaagacattcaatgattaaaactaattttataaaataaataaagaggtgattatcctcactgctgctttcaacagcccaatttttctgtgtttccaaatctgaaaaaaaaaaaatttataaatacayacacacacacacacacacacacacacacacacacacacacacacacacatatagaaagggcacctcatgatgatggattactacaaccttaatgctgtggtcccatccattagggctgacatagtcaatacctaattcatttaaattgctaattttattcagttacctggtaaatcgtttgctcttaagggtttggctgagggttctgtttagtgcctatttccattgcctctcagcttcagtttacctccccttctgcagggacccagtgcagccttccagacagcctaggaggtctccctggctctgttattgcacatgacctttgcggacaagatcttagcaacatcccccttctccaggagcrggrggaggatgtcctcctccaggagattcatgtaatactttaaagtactttagtacttttgagtactggtggaaatgtattcctcatttacaaattttactttaaagtcaytagacactcctgtgaatggcgtcaaaaaactcccctggagaagctttggcagccttttgcaatgcctcctggaggctttggaccatttaggatggccattagttgcccagagctgctgatataagatattacccccttggtctcctggtatccaccattaaaacaacaaaggatcgctgcctactgggctgtcttggaaatgggagactttgagagtccttgagcctgttaccctccagacccagctgccccttatgctttgcgtcatggaaactgcagcttacaaggttggcacagctacctaggcctccttaaggcaggatggattaaaacctgggcccctgatacttccacctgtcggagtgggcagctttctctggcccaagtcccttgccaaatgccaggagctcattcgtcccccacactccctgactgcctgggaatccccttggggttaatggagtgaacagtaatgggagtcgtagaccatgcaaacgtcactgctaatcatccctggtgaagcttacggaaagctgtygctttccatcccttagccaggatatccctaaaaaaggacaggaccccaaaaccaccgctggccaaaacttaaggcagtcagcacgggatgtcctggtcaacaactggcttcatcttcatatttattgtaaatctgaaaactgtccccttcacatcaaacaaaccctctaggaatctcttgcatcacagacacccaaagtattaaaatcacttatctccacacagactaaggtcaaaatgtagcgccttgctaggacattccttgttcccttcagagttaacagattttactaataacacccaaggcatgtgttttacttcttagaatacaccacccttggctcttgaaaaagacattgaatagaactttcatgtccctgatargtcccaagtaactagtttaattgaaagatgtaatgatgtcctcaactccttgaaattccagtaccacagataaactcytgaagttttctagtttgtcccgggctttatctattattgtgcttttttttttcttaaatcttgtccccatccggtgagggctggaagccaggttgaggaggtgtcctgtcctggggctcrttaaccacagattgtcctgcaggccaggcagctgctcattggatatggaacacattttgggtgatggcagagccctcaggaatgggattaatgcccttattaaagaggactgagggagcttgtttgtcccttccaccatctgaggacacagcaaggaaacagagggtcacagcgtctgtgaacctggaaatgggtcctcggcaggcacccaatgtgccagtgccttgatcttggacttctcagcctccaggactgtgagaaatacatttctgttgtttacaggccacccacttcatggcattttgttatagcagcctgaatggcctaagacaggtgttcaggtcaaggtttggttttttagcttttgtttattttgcctatggatgtccagttgcccaatcaccatttgatggagaggctggctttcctctcatgaattgcttttgcacgttttcaaaaatcagttgagcatatttgtttgagactgttctgtcccattgattaataagtctatccctttgccaataccatatggaatttattaggtakgcagtaagtgttagagttggcattcttgtttttcaaaattgcattarctgtcctagttcccttgctgtccatatacatttttattacaagataaacatgcacttcttattatttcaaagtayagtagtaagaaaacctcagagtagcttcatcacaaatactgagctacagttactgggaaatccaaacagtcctgcatcagaacctgttttcctgattaacccaataataaaatagagcaaagcctttcttgctaaacaggtttcactttctttttatcatcctagtctctgtggcttggtaacaagaaaacttaatgtgttcacatttatctcttcatagcaagtgtctatgacatagtttggtggggaagaaatgaaaacccaagcwcagaaataagggcttggtgaggttcaaaaactccaaaattttcattctaactaaatgagttgggtatatatttccattgtcaatgagaggggaagggatattttaaatgaatcatatatggagaaagaatgaatggacgcaaatgcacttatgcttgcctagttcttggaaataatatttttatatacaaagaatcaggatcatcaaatcaccatcttcatcacttcaattttcttaagcatgatgacagcctcgtcactgtcytttaatttgaaatttgttaactgtcttctaatttgaaatttgttaagcatgagcatatgcttaagtgctgatatctttcatttgaaatttgtaaaattataactgggaygaggaggtctttagaaaatactgtaagaatgttagatattttgtaggaatgtgagattaaattctctaacacaagttttgagttaaaaaaaatcctcatttcttactgargaatttaaaactggttatgtatttacatatatattttaaaattacctacactatgaaaagktacctttagtatttatgcattgttttatgaacataaaacaagcgaaactgagtatgttgaatgaaaatttagaattgaaacatcccattcctgatgaatatgaattactaaagttttagtctaaaatgactagatgatataatgatatatagcttgagaactgataatagcaagtaaatgaaagtcaatttattcagagaattgaatgggaaactaaaaccatttaagccttttctataaaaaaccatcagctttatgaatcaccaaattaaagaataaatatactaagataaaastttccccattatattacagagaaaaccatgttctgagctatggacttttatacctggatgtctaatctgaggccatcaaaagaactcactcatagatcagtttgcctcatttcatggtctgccttggattcccccacacccactgatccaaagtctgtggaatagggaggcaccttccagcaaagaaggcagacatgaaagtgtacattgtgatctctctgttacgaagttgaagaactggccaaactgatgtatgttaataggaatcaaaacaggggctgcgtgtggaggggtggacgatgttatttgaaaagttacaggacagattttctgtgttaatggacatgagccatacattgagagggctgctggctactgaaagaaatataaaattttaaaatttctgaaatcatgcagttaayatctgcacacttcactatattttaagtttttgttaatataaaagaataagwaaacagaaaagtattactgttaaacaataatagagaaaygtatactttatttayaaatttctccctctagctgatcatacagttgaccagttcagggtgcccgctgctggttggatgccaggcggaatgtcagggtgttctctggtgtctgttgtggctgtgggatccacggttactgggcggagccctgtggtggctgtggtgccatggaggggctgcgatcttctgtggagctggaccctgagctgactccagggaagctggatgaggagatggtggggctgccaccccatgacgcgagtcctcaagtcactttccacagcctcgatgggaagacagtggtgtgtccacacttcatgggcttactgctgggtctcttacttttattgactttgtctgttaggaaccaactctgtgtaagaggtgaaaggcagcttgcagaaacactgcattcacaggtgaaggagaaatcccagctcattggcaagaaaacagattgtagagactgaggcatctttaaaagatgtcagggtacagaaaaagtctttcaacacccccggctttgtagatgcctacaagaaggtgaatagcaccaacgagatgctgatggagaaatttaccaccctcgttcaagaactgaaagaagagacatcctccagactctccaggcaacaagaggagctggtagagatgctaacaacgctggaggccctgggagaggccatgagagccaccccgtcacaaggagcttttccacacctgccatgcagctgagagccaagccctgctgctctctcccccacgagggggctgggtcttagagcagcactgttcttttcccctccacccaggcctcccgagctgccaggctctgtgctcccacactgactccatctgaggggtccttgaggccagtggatctggagtaccccgcccctggcctggagttcctcctccttctcacgctgacactgcagccagctcctcaatgggcggtgcctccaaatctaaagaatatggaggtcctggagcacaccaagaaatgagggactttttctttgcagaaagtttgaattctgtcttaatgagacagaatgccatacttgagcacctcatcttttgctcaaattgaaatgtcatcgaactgtatttctcaagtcaawggtctgtaaatatgatttatgtattaatctcctaagtgaacaatttatattttatcctctacataattatcgtattatgctttaaatatatatttagtttatcaataaagacattcagtactcaatagcaacttttttctggagttttattcccaacagttctaagtcgtaagttaaagtgccagtttttggcctgagtatttgttgaaaaatgttatgcaaagggagatttattkgggggataaagtgaaaggaatgtttagagagaagatttttttttttttttttttttttttggagatggagtctcgctctgttgcctaggctggagtgcagtggcgtgatctcggctcactgcaacttctgcctcccgggttcaagcaattctcctgcctcaacgtcccaagtagctgggattacaggcacatgccgccacagccagctaattttttgtattttagtagagacggggtttcaccatgttggccaggctggcctcgaactcctgagcttaggcaatccacctgtcttggcttcccaaagtgctaggattacagccgtgagccaccgcgcccagtgaagagattttttttttaatgtttattttaggtttgggggtacaggtgaagttttgtgacataggtaaacaggtaacatgtgggtttgtttcatcacccaggtattaatcttagtasccgatagttattttttctgcccctctccctcctcccaccctcccccctcaagtagacccctagaaattgaaagccttctaatcgactccaaagttaaaaacagtaacatcagatactttcttccagtacaattgctgtgtaggtggagagatggatttctggtatttcctacttctccatcttcacagaatctttatttcattcttttaaataatttctgtctcattgatgatgcattttgttcatatgtcattttcccaatttttgtcagttctttgtgttttactttaggtctttgagcatatttcagatagttcctctaatgtcttcatctagtgagccaaatgctgaaagccagtagggatttacttcattcctttgaagggatcatagtttttttgtttgtttgtttttgttttgttttgtgtttttaatcctttgtggtattcatttgaaaactgggcatgtgagaaaacaaacacctctctcagtctttgcagatcggtgtaaaagatcttcactaatcagcaggcccttgrgttttaggatcagcttgtcttcatgggtattttctgggaatgtgtccttccagggccttagtgtgccttttcctccccaatttctctcatatagacggctgcttagatgtcttaattttccaaagagtctcaccccagctgctttttgggcctcacatgttctattatatccttctgcycataatttctgtgcctagacatacatatatctgctttccccctgcagtttccatgtggcatggtgcctaccactgccttccactgtttctacagcttaagatccacactgagccttgagtctggcaagacagaaaccagtccctctgggtgcccacaaatagctttgaatgtggcaaatattctctattctgcttcttctggtttgagggagaaaactgggaattgggctgcttactcctaactgcctcatgcctcactggtggggcaagagcaagtgaaaatgccataaaatttcctatgtatatatttaacgtttccattaggaacaagggctgaagcttcctagtcgtccatcttttttatgtcattcctcaaaactaatgtaaatcttgtaactgtgtatgaagtgtttattatcaaatactaccagttttcccttaaatcttatcaatggaaggtacctctataaattccttagctttatttcttgcttctaagtaagactgtacatgataatgacacctgttaagttaaaatcttggaaatctttgascaagggtatacaagcatgaccctaggctctctgaaaattttctctcttctttccagacctatttgaaaccttgtttctccatactagtgatgctaactctaaaggtaaccagatacaaataaragtttacaacccagctcataatccacatccattaatcaggaccgtgccctatttggkgtttttctctrtatatcttttaacccctttaatttctgctttgaacaactttctgaacttacatctgtgtggtgcattcttcctttgccagtaagcagtaaattcagttttgttttaaaactgctgtttggccaccctttttatgttgcttcttacatgcctcatatcttcatggcacttttacaattactctccaattgatcttytaactggtggttataataatgctttttccaagacctttaagcttaattttccttccccgaggagacaaatacagtatgttytacccactttggaaatagaaaacctaacctggcagtacaatggttaaattataaaatccaacatatagcctcaaaacagaagctgttcttctgtccacatctaaaatttagggcttcttattcatcttctcattttgctctgcaaatgctctgtggtcgattagtttaaatttacagacaagttgctaaaatagttcaaagactttccatatgcctattactttggggctcaatccaggctttccatcttgcttatctatacctatttcacactccaaacatgtaaaacccagctcccactcttcatcatacctttacttattaattcagcctcagtatatacataaagtgttttcagaattgttaacctgtactcctacaagaaacaaatttaattactagaattcagtgtttacatagagggtttttgtcttgaatattagtttctcatgtgatttcagttttgcagtcaatattatgttgttaaaacatttgaggattattcttaattaagcagagtattgatataatattaggaatatattctataatggaataagatataaygtatccctattctgtctttgagtctgagtagaactttccttaatgatcccactcagcaacaccactttcaaatatactatttaatcttcacagccatagagatcattctcataaagcattttcaatggatctgttgaaaataaacagataatgtttttggtgccaggctacacttttattatctcatttaatctcctttaaaatatttttaaagtttcattctagcttcatcaatgggtataacttatacgatggcagaattaaccccaatgttatgaaccatttctaacagtgagagacttcctacaattgagagagtaagatctctgtaaccagatatataattaagtagaggctgaatgatcatctttcaaatattaagttgtgacaagaatcctacaggaagtagaaaattacacatcatatatgatttgttataatgtaaactctgagctctagagttgcttaaagaaatatacagaacagaggtgggtgaaatgggataaactgttatcctttacttaagtctcaaattaaagcctgtcatttttcaagactaacttactatcctgatggagaatatatctgtttttctttaaaatgtgtctgtgtactactgagaggcaccacggatatgacaaagaacccaattcgaatctatctgtgggatccacaactactgtctgagctcctctaatatactgagctcctctaataacatgtgaaacagttaaactattaaacacaaaaactgaaatacytactgatttttttttcactgaagcagtagcctaccaatataagcaggctttgaaatggtgtgataatttttggattctgaataagatctaatataaatatataatactattctttcattttgtcgtattcatttgggttatcaagtaaataagaaaccaaaatgttaatgctattcagaaatattagaagctgatacaaattccaaaaagtaagacaaattgtcacataaaaagaggcatatgattagagatgatggtgactataatgaaaattcatcagtctcagggccaaaagagaaaataagayaatatgaagatactggattcctaacatttaatatttacaagaaatttttcacataatacttttcaatgttcctcttaactagtgtcagtgaagtaattatcattttaactagtatcaattaaacttaattttcaggaaaacattcccacacagcataagttctttgagtttataaacaatatctttcatagttcacctaaatctggtaaatcgctttgtagcctcactaggtttaataaatgttatataaataaatactttgttctgatctcttccacacatttctagttttaayatgaaaaaaggtaaagcaagatactctcttttttaaattaaattcctttaactggaagtgtaagaaatgtatggaggtgacttttctctattagaggatcatacagaatagacttgcaaataatacgacacttaaagaaccatacattttcaaaacatgcagagcacaagttttgtttaattgattttacatcacaccagaaagcattacagggacactggcgaatagaagtaagctggaacctcatcacagagctcctttcttaccctcagcaacaaaaaggcttgatcttagaagttcaaaattgttccatatggtaaagacacattctgaaaataaatcaacaagtaattataatttttttatttaattcaacttctaatatacacacatacaaacctttctgaaatgttcagtcttgtgcatgtgttgatgttgaggcgtatcttccactaattgaaaggcatttttcaaaatattatctagagctcttttcaaaaatcaatgatctttcaatcctaaaatattctttttagctgaacattgacaatgactccctccgtgttcaaactttagctaggcttctctacgcccycttctcaactaggcctcatccttggcctgccttaagcaaaaatcctactaagtcagtttagcgagaatctctcatgcttgatatctaaccaagtttctcacccytcgccgttaatgtctaagtccttaatctgcctctaagaagaatcttgttaggccggttaagcaagaatccctctacacttgatatctcctcttaacaattttccatctgctgaccccttcactctgctctttgtctataaattcttagctttccttgctgtacttggagttgaatctccctcttctattgcaatggtctttaataaagtcttccttaccatgtttatcaagtgtcaaaaatttttctttagcattatgagactggctcttatggactttgtccttgtgatggagtatatrctagaggttaaactcattgtctgtagagtccaatcatctagttacccaccctttatctgttgcttatgagctttatgtccttaagcaagttagatgaacttgtgtcgtgatcctcgatgatgaatgtgtgctctgaactgatagacttaactatgagaagatgagatctcacaggcgagaytgtatccacacatacattttaccactgtgacctctgcccaaactgaagggtttgagaattctgtgctctttgcaagcaaagtatgcctgtaattgtggggtgtggggggcgggtaaagaaatgttgaccatgagcacccagcctgtaagcttaccatctgcaatttgggtacatgactggctggctaggaaggtgataaaagggttaggaaaagacagcaatcaaaaggccttttctgagtttgaatctgtgaattcagagacttcagtctttgtctcagtgaaactctgagtgggagttcctgcctttagatttaaacaatgataaatgaaagtttcaggcttcatgcaccaagatctcactcagttaaaagttatgagttccctgaattttagtgatcaacaccacttattccttggcccaatggctcaataattttgttgaaaattcatatcctatatcctwtaagttataattaatgcccacaacctattaaaatttaattttatttgccaccccagtgctcattgacatagataagaacacaacacactgagaaccatttttaaaatcagaagtaggcagtt

SEQ ID NO: 1625 - DNA, 17700 bp, Homo sapiens
acaaaagcaaggaatggggaaaggatttcctacttaataaatcatgctgggaaaactggctagccatatgtagaaagctgaaactggatcccttccttagaccatatacaaaaattaactcaagatggattgaagacttaaatataagacctaacaccataaaaaccctagaagaaaacctaggcaataccattcaggacataggcatgggcaaagacttcatgactaaaacactaaaagcaatggcaacaaaagctaaaatagacaaatgggatctaattaaattaaagagcttctgcaccrcaaaagaaactatcatcagagtgarcaggcaacctacagaatgggagaaaatctttgcaatctacccatcagacaaacaatcccatcaaaaagtgggcaaaggayatgaacagacacttctcaaaggaagacatttatgccacmaacagacatatgaaacaatgctcatcatcactggtcatcagagaaattcaaatcaaaaccgcaatsagataccatctcacgccagttagaatggcaatcattaaaaagtcaggaaacaacagaagctggagaggatggggagaaacaggaatgyttttacactgttggtgccagtgtaaattagttcaatcattgtggaagacagtatggcaatttctcagggatctagaactagaaataccatttgacccagccatcccattactgggtatatacccaaaggattataaatcatgctactataaagacacatgcatatgtatgtttattgcagcactattcacagtaacaaagacttsgaaccaacccaaatgtccarcaatgatagaatggattaaaaaaatgtggcacatatacaccatggaatactatacaaccaaaaawaaggatgagttcatgtcctttgcaggggcatggatgaagctggaaaccatcattctcagcaaactatcacaaggacagaaaaccaaacacctcatgttctcactcmtaggtgggagttgaacagtgagaacacatggacacagggcgggaaacatcacaccctgaagcgtgttgcgggggtgggagcctgggggagggttagcattaggagaaacacytaatgtaaatgacgagttaatgggtgcagcaaaccaacatggcacatgwatacctatgtaacaaamctgcacgttgcacatgtgtaccctagaacttaatgtataattttwaaaaaatctcaaagaattagatyccctagcatgaggaatttatcttactggattttttttttttttttttttttttttttttgagacggagtctcactstgtygcccaggctggagtgcagtggcgcratctctgctcactgcaagctcygcctcccgggttcacgccattctcctgcctcagcctcccgagtagctgggactacaggsgcccgccaccacgcccggctatttttttttttttgtatttttagtagagacggggtttcaccgtgttagccaggatggtctcgatctcctaacctcgtgatccgcccgcctcrrccacccaaagtgctgggattacaggcgtgagccaccgcgcccggcctcttactggattttttaatgccactatccggcagtgattaaatagcaagttcaagtgattaaatctgatccaatcactacacttttcctttaaaattgctattaggttttgtaagtaaggaagtggaggcatttttgtaagtgcattaactctcaaaggccacaaaagtaygtttttaamcttatggatcaagttgtgtggatacgatttcagacccccagaggttctttcaacgtgtctagtgtccagcacagcgcacctggtcagagtttcgttgtaacttacagcaccatgttttcttyggagtgttgttcaggggtctcttgcatcagaatggcctgaactgcttgttaggaatgcagcttcctgatcttaccgtccagtttctgattcagtaggtctggagtgagccttggaaaactgcattttatttagcataatcccctgggggattgggggctccccaaagtttgagaaccaccrctaagggctattatgtttctgcaggcaaayrtatttttctttttttgttttatgtaatacaaagtaggagtttaaaaatttatttttggtaaaactagaacaytgtcttcaaattagtaagagccttgtgtaggagaaatattctcttcaaaaatccctccacgaaattgatcttaaaaagactagctgagtcaaatcctaacagatctgtcctgtatctggctgccacctttcaaaattgctgaccttaygcttacatattcraatgcttcctggaagtcaaaacatattttcaaaagtttctaatggaaaagaactaagcctgtcacttggttttaaaaggtggaaattgaaataagacaaaatggttgagattaatttcacatcacaagaatacaggtaagaaaagaatacaaatttccataacttctatcaactatcttttaggttgaggatattatgaaataatccttcccttcccaaccaacaatgaagatgattgatacagccatcatactgaaggattcctactgtgtcagcaattatattaatttcttatagaaatataaagagtataaycttcaaaaactgggtattgttaaattatacattggattctgttaaatgataacaaataaatatraatataaatagttaaattaaaaatatatagatattacttaataggtataagayactcaaatttatgaatgtacttaagtttctttgttttacartgagaacacttggacacaagaagggtaacatcacacaccagggcctgttgtgcagtgggggggagggggaagggatagcgttaggagatatacctaatgtaaatgacgagttaatgggtgcagcacaccaacgtggcacatgtatacatatgtaacaaacctgcatgttgtgcacatgtaccctagaacttaaagtataattttaaagaaagtttatttgctttaaaatttcatacattatgaatttactatgtcccctattacaatggtctccrcaatgaagagaccctcactgtcctattatgttcccccaagtagttttataatttctttcatatgagtcctctatctttcttcagtctacattccactgttactattgttactctygtrtataactctattgctaytgattaacttgttttggtgraagtgtttccctgttgtattagatagggttctccagagagataaaaccaatagaatggatggatggatggatggatggatggatggatggatggatggatggacagatgaatggacatacagacagacagttcagaaggaatttrttagaggaattggctcactgggttatggaaactgagaaggtccaggacagggcaattgtaagctggagaccctgggatkccattggtgttgytcagcccaaatctgaaagcttcagaatcagggaatctgatggcataattctcartaygaggccaaaagcctaggaacctggggaccactggtgttaagtcctggagtccaaaggccagagagcctggagttctgatgtccaagggcaggagaagaagaatgttccagctccaggagagagagagaaatcacctttcctctgcctttttcattcaatctagcccccaccacacacacacttacagctgtttggctgacgcccacccaagttgagaacagatcttcataactcactccaccaactcgcatgccaacctcctctagaaacaccctcacagacacacccatgataatgctttaccagttttcwtrggtattccttaattcaatcaagttgacacctaaaattaaagataacacctgtgctatgataaattggcaacattgattaaatgtccatgaacaccaagtactaagataaaaattgcagtgtccaatgaagcataaatgaaggtcatctaatccaggcaagaaaatggcatgcaaattgttgaaagaatgcctagaaacacacacacacacacacagtcacacacacataggtaagtccaactatccacaagcaatctctctgtatgtgttttgtatcccaagtcagacaagtctaagctcttctggtttgaggaggtagctagtgtgggtcaatgtacctwtttctatgaagcccatggtcyacgcttgcctgtcacacttcctcacttagcatactgggagccagagccctgatattttgaaatgctgtttattaataacaagtccatgggtctagctagaaattcgtgagattatttgcattaaggaatttggggcctgggagtttacttcatgtctttgtcacttcttgtaagacagcaccatttcttggtaacaatggacactatgagttggacactaaaaaggctctggttacattagtaactttatttcaactgtagcacttactctatgcttttttttcttctacctagtgttttaaaatgtatatctatatcttctctttaaggatatgtaacttagtgaacactcatcttctttctcactactttcagcctaccgtgtttatctaattcctatttcatttcgatcagggctttayacatttttataagttgaaagacttaatcraattacttctttactcttactttttagactgtatttttaaaaaaaatctcatgtgtttatttgattttggaatactctttttccaaaagagggctggtaggtgtctttgtgttgcaaatattctgattgttaattgcctgagtcaatatcaaggaattgtctataggccatcacatttaaatgccagtttggctagatataaaatttcagtttcaaaattatcttttcttcaagttagattggcggcacctctctgaaacccttggagtcacataaagtttcagaatctgaatgacttaagaaagsctccttaatacacacaccatatgtagagtgttacatagctagaccaattaggtccaggttatgactctcaaatcaaatacaccaatatatctgcagcaagacatataaacattcttgctaaaatggggtttttcaaagattatagacttttgccacctcacattagatatttttctaacaaattttgttrccaaattttcacaaatgcacaagcttttatttcmatttggagggtgtttcaaaagtatatatataagatttagcgtgaacagtataaaattacttcaggtatttttatttgattttgatccctccttcttttctttaactgtttatgttaacaaattctaaacttacagaaaagctactgtatcctcaactatattttctaaatggacttatttttttctcctttctcaggtatgccaatgagtcacagatttgatctctttgcataatcccatatttcaaagaagttttgttcatttttaaaattcttttctctttacttctgtctgactgagttaattggaagactctcaasctctgagagtctttcctcaatttggtctattctgttgttaatgcttctgagtgtacgatgaaattcttaaagtaaatttttcaattctagaagttcagtttttttctttcttaaaatggctattttgtctttcagctcctggattattttattgaattcattgtrttgggttttgactttctcctaaatcttgatgagcttccttacctccagagtctgaattctatgtcagtcatttccgtctgcttaattatcattactgtggggttggggtattygtttggagataaggcgacattctatctttctgaattgccagagttcttatgctgattctttctcatgtgtgagggctggtgttcctttaactgtaatgtaagtttastatagacagttggcttcatttctaggtgctttcttagggccaacactctgcattgataaaagaaaaacttcagccaaattaaatttaaatgagtttaattgagcaatgaatgatcgtgaatyggggagccctcagaatcacagcagtttcagagatactccaggggtgccttgtgatcagaacgaatttatagacaaaaaaggtaaagtgaggtacaagaatcggaagtgmggtacagaaagagtgagattggttacagctcggcgtttgccttrttttaacacaatttgaacattccgcagtctacgagtagttgaagtatggctgctgggactagccaacactcagccattgttacaggtgcataccattaagttaggttttcaattttgtctcacaaggttagggttcatccacaaggactcaaatatagaagtatggagtatggagttcttctaaggccrtgtttagtttgctttaacagtacagaatctttatttgtggctgaaatttttgccttaggtttcacaggcactgtatactggcaaaatatttttggtgttgtaatttgggtacaatatagtaagagtggtggtcagcagacagacttactcagctgcacagctctcgcattttggcatgttcacagtagtgctctgttggggcggaggggaagagaactaaccccctcaccagatccactcctgaatcttggaggatccccctcaaatcactggcaccatgctctcattttccttactcgggtgttctgggccacagggctccctcaggcaggggacatggctgacaagctgtactctttccagactagccytgcagaaagagcaacattctgctcctccaccagcccagatgtctcatccttctcagtgttctgagaktgtggatttttttttttccagatggagttttcgctcttgttgcccaggctagaatccaatggcgtgatctcagctccccgcaacctgtgcctcccgggttcaakcaattctgcctcagcctcctgagtagctgattacaggcatgcgccaccatgcscagctaattttctatttttagtagagatggggtttctccacrttggtcaggctggtcttgaactcctgacctgaggtgatctgcccacctcagcctcccagagtgccrggattacaggtgtgagccaccacacccggtcgaatgtgggtgttttaagagtgtgggctcccccaactgcttgaatgctttccaagctggcaaatctgccaggctaggagcagcagggatgggttgagttgcccaatctgccatccaggtgcttttcaggggaacatggagatgtatascctagcagaggtcaggtaggggtagagctggaagctggtactgagcctggtctggtagagaggagtgtagcaatttgacttctccccagcaccatgactgcaggctctattgggactatggcagctggtactgggctgctctggggttcaagacctgtgaggctccctgtggagtaaagtgttgcctccatcaaaacttctgggggctctctgaattcatctagaggcctgggagggccaagggaattctcctcttcycaggattgcaaaggtcccttttagaaactgtgtatcctcttggggggtctcactcaccctttctccttgttagagagctcctgctggctccaggccagrcctcagtgggcygttgcttggcttcactctcctctgttctccatgtccctttattcccttgatggatctcaacctggtttcttagataatcttcctgtacagtcagtttactcaccactttgtttcctctccatgagagcagcacacacttgctgcttctagtctgccatcttgactccatcctcctatatttccaattttttagttccaccctaactccttatgaggaagttttctatcagatcctatctcattctataactagaataatttatattattattatatagcaaactattatgtgtggagccaggtcttttgaactccaaaacttaagctcttaacactcatgttctctttcttgtatcaacatgttaaaggaaaatattggagagaaaaagaagtgtcatttttcacaaatagtgtttctcatatgctatattatattcagagttttggacattatatataaatatatccaatgtaaggtattccatatagttggtttcaaattgagtatatcaacataattgtataattttgtataatcttaatttaaacttcattaattttatgaagttcatatattctttatatctacctttcaagaagaaaggcaggaaaatatttgatgcagaaagctttaaaaggcaagatatgctatataattctgggtcttaaatatgcaaaataaaaaaaaaacgaggtaaaacagagaaattattgagggctttccatgccagagtgaggagyaatgcacttttcccaaagaaaatggagaagtattcaatgatttcaagtagggtagaaatatgaattatagagagagctggctcaatgaaaacaactgattagagaaattaacctggaaaggggaagatcaagcaatttttgaaaatatcccagtcagtaaatgctttgattctacattttggaggaagttgatttccagcaaagggacaatgatatggccacagaggacacagagaatatggtccaacaataattgagagagcatcttaatgagagctgattagggaaaagccaaatgagcaagtcagtacctcaacaagactttcttgtgctgtggcagaacrtttcttctaaaatgtaagaagctacagccyattttgtgcataggccacataaatcatagtaggtggaggaagagtcaggtatcaatatgcagatatccagaaaaaggttccagcctcctaaaagatggcaagaataaccagagttcgacaccacacacagcacatactctaaacactggaacagttacctatttccagacacacttccaccacatccaccctaacccaactcaactatcataatatagggaaaaaaatttttagatcrtcttgatgcaacaattcataatcaataytccaaatgatgtaactggtgattacagtccatcttcatcacacacacccaagagcaacactttgacatcggccactcactcacataggcatagccagtctttccaattgtctgtataaatgtgtgacactgtacgccacttttctcttgtaggttctacccrtcacctacagataatggtgagtaaatacaagaacaatgttctgctgaaaggattagaarccatcaatgactatcacttcagcataattaattccttactgatcaatgatttaaaacttaattcaacaaggagagacgaatatgacaaaattcagattgccgacttgatggaagaaaagttcccaggtgatgctggtttkggcaaactgagaactcttcaaagaaataccaacactgggagaggagaccttgctgaaactcttagaaaagtcaaaaggtaattgggaaaagggaattctcccctccctgccactgtccctaaacccttcccaaccttgaatagaacctcakcttcattatggttaatatatccatttcccaatttatgcctcagcggtcatgatattgttggtactttgcatgtcaacaagttgacagcatagagcattcccattccagtggattcatatgttttgaagggtgtatctggggtatggagtaaaagcaatagataaaagttgtcgatgaaagaccgaggcttctggtatgataaaaaggttagaaggtggtgaatcaagccgggtgcagtggcttacagcactttgggaggctgaggcgggcagatcccttgaggtcaggagtttgagaaagtggtgaatctaaatttaaaaatgatgttttatatgttaaatatatcaattaacctattgtttcacttgctctattaaggctatttacactatcaccattatcctctgtagtaacaaagaggagacaatacttcaatgaaagcctacctgtcagagagacaaactacctttttaaaaaaacacagatttaattttttttcaaaaggcaaagttyagaatcaccatatagtcacytcataaacctatatcatatttcatttcactggtttctgtaatttgaatagattatctctggagcatgtccaagaagttagacttgtgaaaatatgacagttttacaagtaaatgataggagaaccgggattgggaaacatctgactgaggcacatggagttcgcaggacagaaaggatgttctccgtgaacaggggaggagtaatgaaagcactgaggagcatgagactttgcctgtgcctgtgcctgtgcctgtgcctgtgttatgactatcgacctcattgaggccaggctggattaatacagttgagtacactaaagcacacctgaatgcttaagcaggaactgagacaaaacagcatagagattgtttcacctcccatagatcatctgctctgggtttagatgtcctccttttttctttattggttgtgaataaaattaaatccattccagcaaaaggaaaaacctcatcaaagaagaggaagcagagaaaagtaggtccaactacacctttagcaaccacagacaagaagttcacagctgaagraggagaggagactcctatagctcaggtaagcttgagtaagaggagcaggcttcaattcccacagaagaaactgccatggctcttccactctgtctctccagcaggcagtttttcttcattagtttctcatcaagcttcagatttatcaaattgcataataattaatcttgtttgtaaaaagcaatgagctaaacamtttagtaaatatatatcgcacaaatatagtatcttcaccccccaatagagaagagtgttaacttcaggttcagaggggaaaatgctttgtycatatttataaaaacctagttttttaattgcaagtcagtacatccccaaacactagtacttagaggaatgatgtgtataactttcyagtgtctctttttttttttttttttaatkaagccatctatgccctgtcttacaataggccaggaaatgtgcaccaatcctttgtttccagaaagacaattgacatataacaaacctactacccagtaatgaaaatgtgctctacttcatttgtcactgaaaacaaataacaggaaaatcaaaccactttcagaaaagaaaaaacccaaccaaagaaaaggctggaaccaaaaggagtaagatatcygaggagcagactcagcctccctgtcctgcaggagccggcatgtccacagccatgggcattccccacctccccagacctcatcatcagctccacccaacacttcctcaactgaggtacactctccctggtccccttttgctttgttttcttcaaccccaaatataaaaattttatctcctacttaaaaataacatggataattagccaaataatccaatgtatatactgagaattagctagagtttaatcttttgcttccataggatactcgataaatttgatattatctctgacatcaggaggttttctgtcctgtgttgtttgggagaaatayagagaggtatggagttcagaatagtacaggtagatacagcagtgtgttcacagtttactgcttcagtctcttttacgcctcttccctctgctcaataacctgttaaagtttctttgatccacaatatgttcttttcttcctcagcgttttcacacaccatagtccctctccctgtaaaactcttaaatggctaaatagaggtactctgtggatcccaatattgatattccgtcctcagggaatcatccctggaaccacgttcagactaggtaaaatatttacggtgttcactttagtagaatctcattttttcctaccaattatgttaactacaactaataaatgtttgtccattcaatttattctgtgwtgtaagattacaagctgcttgttgatctggtgaatccctgtaacccagagatttctttgagtgacagaaagtactgaaatgtgaatctgcacagctaatgaaggacaaatgagagttatctaatccagccatgaaaaccatgaaggttatatttttgtgaggcctaaaacagtacaaaaacaaacaaagtggtggaataggatggagagttgaaattgtggaaatccaggcagaaggaagacyatacaccacrtcttggaaaataaaggaagtgggttgcaatttataattacrtgttcattcttattaggttgtactacttttaaagtggcttctcatattttgctatatctcacatcattgttcatctgataatatatgaaaactmcaatgtgtttcttattccagaaaggggagtaattcttattcatgaataaacactgamggagaaagattatggatcatagtgggaaaagccacaataccatctacattctctctctctcattttttctacttaggtaaaacatgattactttagaacttgaggaaatggttaaaacccacaagtcaaacaaaaagtaattaatttttaattaattgaaaccttcccaagcmratattaataaatttttctctgtatttttagatatactctttataagcttgcattttttgcaatatagtatcctayaatgattactattttagtacttgttttattcatttaactatcagatckatcttttcaagtctatgaattaaaatacaaattattatttagtggcaatgtaatgttgaattgcacaaatattggaatttattttmaaaataattctctatttacttccaatatcccaacctcaatgcctgtcctaggaacattcatgcacctgtgccctttgaggctcctattatgtcctttagagtagttgtataatttatttcatatgtgtactgtaactttcttgtcaacttgaaatttgttgttactagtgttttagaaaagtgttccttgtgttatgttatttggcaatattaatataatcmattaaagttaaatcctagtaaagtccaaacacccacagatgttgattgtgttcagtgtgacaggacagatcatttgcctcacttctggtgcacagagacaactagcatatttctatacaatacagggtctaaataaktaggttacgtgccaataatttcatctctttgtactctatcccaactggagctcataattttactttggattttgatatatttactttgtataatgaattgtactaccaaggttgaattctagttgtgacgtgcaataagtataataaatggattggctaaytttctcctaagtgcaaatactttcagcagctatgcatatgatctaaacatttgtgctgtctcccttctgtcttatttacttatttatttatgaagatagtattgaataaaaattttgaattccatgatacttagaagataaggtaatcgaatcctctcatttacaaartaataataataataataattaaaaggcacagttttactgatatgtccatgtccaaattcaaggtgacagcatgacacattcaattcctccctaacagtcctcaraaaaattacaaactgctatgaattcaactaacatttcacatgattgactgctttgtaaccctacatacataycttctaagttagccccttaaatttacctccagattttcctacacactctataagagatctcgcawakaaatggaattatacarttgatgaataatagcttctgtgtgtaagatactacaatacaggaaccatggatgtagtcaggaatgaaaaatggcacaatatcaagtgtgaggaaggagataagttttgattattctgctttcatctaagaacaattgactacaagctaaaattgatttgtagaattcacatttttatcaaggtgggaactggatagaggaacattagtttgccaaagaagtaaatgattttgtttaggcttcaggaacactagattcctatcctgttactcagacagtccagcaggtgggaggaaaatccaaacaatgtccytgcactcayttctacgtagaagagtttttaatgatattaaggaaatagtattcttataagcttcaaaggaayattcaaaaggattataatacttgtgctaagtaataaagtatttaaagaaattaggatgacagggaagtaatttcatatagtgttcaagagaaagggttwtgaataagacaaatctgatttgaatcctgaattcaacactcattagttgattgatattggrgaaatagtttcactgatccyctaaaataatggaagtctccacttcatcagcatggttaaaatattaagtgagacaatgcrtatttatgcatataagtttacatatatgtaaaatttatataacatatctcactgcctagtacatcatgagaaattaatctatggtaagcactacttttcctatcacggcaaagatattggaaggggatctaagcaatgaaaatgacacaygcaaatgctctaaagtgtgaaactgcactgtgagttctgtacaactaaaattctataaagagtttctatgaagaaactatggaaagatgcagcacagaataaaaattgggggcgggggcaggtggtagagtatagctgtttgtcagaaataaagaaacagaaaattcattgtgaaaaacagataaaacctaaagattttatgcagaagaatgtctgatcacattgacactttagcaaaaaaaaaaaaaaaaggtattatggtaacaattctagaagtatgcattagagaggcattaggttagagcagagatatcaattagaagcaatgatgtgcccaagtcagctctcaccagaacacttattgctaagtatttggggaktttatgaactgtttgyaaaatctttggaagtttgaaaytagccatagtggaaatatttakgccagcaaaatatgcaaaggctacaaatagatattttctaaaattgggcagctagtttaccaggacaccacgaaaggtttcttcagatttctatttaagaaggagaaagacaaacagggctgtgatgaatggagtaaaatattttttgaagctatatcctcatgatygtgtgactaattaagtgatgatgttgagaaagakaaaagatttaaggagcattcaaagatgattcwwgaatattatccagrcaactgtataaatggtgctactgttcactaacatcaagaaagcagagaacagcacagtctaggaagtgaaaacatgttgtttggacaagttgactttgagctacctgttggatatctaagaaatatctctctatcaatctgaagatatatagatctgtataaacmgatctggaacaaaaaaagtaattttgtactggygagttatgcatttgtacatttagagatacatgttaaaattatgggtttagatgatattatctaaaataattgtataattctacatttatactaatagaaaaytgagcactcactatgtttggggaagtgagacaataatgaagctataataattattcccatatcatagataaagataccgatgctcagaaaatgtaagcaatacacaccaattgaaacaaccagttagtggtggaactgacattccagcccaggctgtgtagatttagaatgcagattcttaagcaaggtgaatgagaagatcaaactgccataggtggagccatagaaaagttggatatatatttgggrgtgactacaagtaaaggatgctacaaatgaggatgaaactatgtacacagagaggtcaaagawaaagtggaaatatgtataatatgcatcaaaaataagtttaacaaggaagagggtcaacacagctcatgtcasactcaaataaacaaggaagtcttggaataacttcatcttagaccaaaaattgctatactttagtgaarggcaattgctgattcacagaagaaaacatggctggctctccataacatcatactaaatatctcattctccaaaagcacactaacgacaagcacaaaggttcacaataggagycttgataacactaaccaaagttaaatttaagtacaaatgattaaaatggaaatagtgacataatcaggcacacagacatatatatgcacgtaaatcrttccacatctcagattccctaattcaataatcctttcatttcaattgaaacaaccatagwtgtactgtgaaaaaccttacctaatatcctcctgccaacattctgcctaattaaaatcttccctgaatgttttgcactgagtaaataagctattccctgtmacctgtggtactgccttactgcctttgtkkaactcctgctctgtttaaatgtacccataatgggcatgagagcatatctctattcagrctccagaccacagctgggagcaagcagactcaaaagatggtaatacgtyaaaggagattgctgagagagaagcaatgaccrttgagattggagtaaaagaataatgtagccgaggaggaggagccaagatggccgaataggaasagatcgggtctacagctcccagcatgagcracgcagaagacgggtgatttctgcatttccatctgagataccgggttcatctcactagggagtgccagacagtgggcgcaggtcagtgggtgtgtgctccgtgtgcaagccgaagcagggcaaggcattgcctcacttgggaagcacaaggggtcagggagttccctttccgagtcaaagaaaggggtgacggacgcacctggaaaatcgggtcactcccacccaaatactgtgcttttccgaccggtttaaaaaatggcgcaccatgagattatatcccgcacctggctcggagggtcctacgcccacggagtctcgctgattgygagcacagcagtctgagatcaaactgcaaggtggcagtgaggctgggggaggggcwcccgccattgcccaggcttgcttaggtaaacaaagcagctgggaagctccaactgggtggagcccaccacagctcaaggaggcctgcctgcctctgtaggctccacctctgggggcagggcacagacaaaaagacagcagtaacctctgcagacttaaatgtccctgtctgacagctttgaagagagcagtggttctcccagcacccagctggagatctgagaacaggcagactgcctcctcaagtggttccctgacacctgacccctgagcagcctaactgggaggcacccccagcaggggcacactgacacctcacaaggcagggtattccaacagacctgcagctgagggtcctgtctgttagaaggaaaactaataaacagaaaggacatccacaccaaaaacccatctgtacatcaccatcatcaaagaccaaaagtagataaaaccacaaagatggggaaaaaayagaacagaaaaactggaaactctaaaaagcagagtgcctctcctcctccaaaggawmgcagttcctcaccagcaasggaacaaagctggatggagaatgactttgacgagctgagaaaagaaggcttcagacgatcaaattactctgagctacgggaggacattcaaaccaaaggcaaaaaagttgaaaactttgaaaaaaatttagaagaatgtataactagaataaccaatacagagaagtgcttaaaggagctgatggagctgaaaaccaaggctcgagaactacgtgaagaaatgcagaagcctcaggagccg

SEQ ID NO: 1626 - DNA, 33733 bp, Homo sapiens
gataaccaagagtggttcttagaaaggggaggggtgttggtttaaaagtaaaataaaaattgtatggaattataagttcataggtataagccagatgctccctatgtctttcagctctcctttcttcaatgtctgcacatggtagctcaagtgaagagctttcgtagtggcaagctgagcactgcacatacacacctccccaccacaaacctgcacctgctctggaccagccacggctcgctccatgccatgtcctggttcctgtggctctgcccattatgccttgatgtttattggacatcactccaccccactcagtcacccaaagagctacttacctaatgctgaccaaacyggatttagtgacaaccctggggcaaaatatagaatgagagccctggaaattgagagctaaataccactttccyagagcttaagaaaagacagctagagcgagcaagagagaagccactggctctagcgccatcataaatgggggcacatccaggtcctcctccgtgtttctaagtcctccttggttcaagagttttcttctccatgtcctcttgacagcaccgtcccattccttgggtgttctccctacttatttaaaaagatgtctgtattagtttgctagggctgccatttaaaaatgaccacagactgagtaaaacaacagaaatttattgtctcacagttctggaggctggaagtgtgagctcaggtgttggcagggttgatttcttctgagacccctcatcctggcttgcagatggtgtcttctccctgcgttttcacatggtctttcctctgtacatgtctgtgtcctcatctcctcttaacaaggataccagtcgtattggatgagggtccaccctaacaacctcattttaccttaattatctctttaaagaccttgtctccaaatatattcacactctaaagtactggggaattagggcttcaatacataaattggtggaggggagtgcagttcagctcatcacagtgacttactcaacctagactgtgcccaaaagttcatgtctttttcaatcaagatatacaaagatgtttttctgaataaaaaccctgcaaacttatgagatgaatgttgcctttccccataaaacttagaggtaagacagatatgttatcttcaaaacattaatcctcccaaaattgtaagcatcccttctaatttgattttaatttgattctagatgtaggcaaaacacactyccgtaaacattaagcagtaaaaaagcacaatgcattttaaaggactgggttttcacactggatagaggtggcatggaatcccagcccatcatcaccacagggactttgagcgcgttgcttagccaggttgagctgccttcttttctcctgtcaactgggtattgttaaggtaagaagcttctcatctcaaccaggcttccagttaaggtgaagaaaataaaagctcactctcctcctcttctcccactaataagaaaaaaattccggccggtcgcggtggctcacgcctgtmatcccagcactttggggggccgaggtgggcggatcacgaggtcaggagatagagaccatcctggctaacacggtgaaaccccgtctctastaaaatatacaaaaaaatasccgggcgtggcggcgggcgcctgtggtcccagctaccggggaggctgaggcaggagaatggcgggaacccgggaggcggagcttgcagtgatcgcgycactgcactccagcctgggggacagggcgagactccgtctcaaaaaaaaaaaaaaaaaaaaaaaaaagaacaaaaactcctggacataaaacagaaagcaacccacagaaggctctgaaatgtggagattagaagktgtagcggctrgggrcctcagaattccagggaagaggaaggatgctgtttacttttgcatcctaaacascctggccctccaacctaggaccaccaaggagcacaaagacaaaaagctccaagaaaatgttgttctaggtagacagccgactgggaggagggaggcgctgcagattgatctcttttaactgtaaccactcctctaacagttaaggagcgccgcttcctcacaggagcagctgggccgatgcccctccccacctgagtcctccaccaaggggcgtggggggctgggcccagtcaaccagcctttcccagaattaggcaaagaatagaaggaggtggtgccccgccccccgccaccccaccagatactgatcccaagggggctgaggggtgggaccttgtccagccaccaagctctacactaagccccccagkaaagggggcaggctccaccctttcctaaacagcacttcctgtagcccaggagattgtggggtccaaccctggcccctggccccaggggcaccaagagaaagccagcaaagtgatggggacccgcctgggcagagyctgacagccagccctgcccagccctgagcaaaagttgcaaagagagggtttccccacaaagcccctcctacaggagctgccgcctgcagcccgtgaattggaggtctcaggaggacaactagcctctcccagcagagcaaatgccccacagagagggtaccttcccctaccgcgccctgcccccggggagcctagtgaggacccctgrccagttttaagaaaaaggccacactggcgtggggcccctccccttcttactgtgggagaggtctctccgttggccacgcccatttctggtaaacgtcacaaagaagtgtgcccctcctcctccctagaagcctgtggggccgagaygcccggacctgcccggcccgaactaggcaaagtccagcgaataggtgaagaggtggtgcctcctcctctcacagggctctgcccctaggagtccaggaaacgggggygtcttgtccgctgatggttcccgctaataggcaaacaccakgaacgtgcagcccctcccctccgcytcgcgctctttckgggaggagcctgggggggagggtcctgcccackggccccgccctgcactaggcrgaagcccccaaagtatcagcgccgcttcktggagcctggcgactgctttgggaagtcctgctggcaggcactstgcccctgggggtgtgcaaagagttgtccagttaccttgatcttctcacagcctcctccccagggcaccrggagagaccaggattggaggacggtaaagaacacacttcccagaggattcttggaggtagagtcaacaggaaggggtggtgagacctgcacagacctgctctgtcccctgggcctggtgacagatgacctggatgttgggtgcagctgggcagggactgcaattctgtgtgtccctttttctgggagccacaggaaacccatgccctaatccacatcagactaccacttgtccttatcctccaaacgcagcaaaatattacacaaggtccagggcaaggcaggatggccacctcgctcactcatcacagctgtcctctgacctgagcagggccgttctgtctcagacctggagaccccgcactcagggcgttcaggaactccccgacccaccaggagcctctcctggtgtctcccagggattgtcaatagttccattttccttgaagaacttgttttcaggtatgcacttctctaaacacgtawgcattattttttctattttaaatttaaccaygttgttttatttttaatcacatctacaytttgtaaatttggaaacggrgtgattttccatgttcagtaatgatagcaagcttccttttaaaatacgttttactttttatcttcttttttttttttttttgagatggggtctccctgtgtcgcccaggttggagtgcggtggccgatctcggctcactgtaacctccgcctcccgggttcaagtgattctcctgcctcagcctcctaagtagcaggactacaggcacacgccatcacgcctggctgatttgtgtatttttagtagagacagggtgtcaccacgttggccaggatggtctcgatctcctgayctcatgatccacccgcctcggcctcccaaagtgctgggattacaggcatgagccaccgcactgggcctaaaatatgttttttaaggaaacaaacaaaaagcaagtcagtgtgatgaggtggtaaatataggacaaaaaatcatgaaggtgtttctcaaatgagaaaattagaaaaaaactgtatctcacctttccccctaccttacacatgggcgagtggcaaatgtttattgaacaattgcacatgtaagcaccctgccaggtcgtctttacatccccaaccacgttacaaggtggatgtgatgatccctgttggtgaggacacgggagctcagggaagccagcccaaggctacagagccagcattgcacagtcagatatcagtgagggagaaggaaaagaaaaatcatttgggaaaaagtcagactgcagaagcagtcggcctgaatagtcacagcaacaggcagaaataaaacaacctgggaaaacactcaggctgtacctggacagataaacaagcaatgtccagcccagaatctctttgttctttgtaattagtgagctcccaggaaaaatttcctccccttttcaggcatatacatgatgagaacttgcacargggggagggagcttacctaaaacaaacccacagttatacaaacaagagaagctgtactttgtgcttgcctagagacatacccacggccgcataagagaaggggagttgcacagacacctttactgataagaaaagttacccaaataattacagggaggagagcagtttcttgtaaaaagcttttgaggctgggtgcagtggctcatgcctgtaatcccagcacttcgggaggccaaggcggacagatcacctgaggtcaggagttcaagaccagcctggccaacatcgtgaaacccagtctctactaaaaatacaaaaattagccgggtgtggtggcacgtacctgtaatcccaactactcgggaggctgagggaggagattggcttgaaccggggagatgaaggtggcagtgagccgagatgacgccactgcactctagcctgggagacagagcaagactccatgtcaaaaaaaaaaaaaaaaaaaaagcttttgaattcagctgtaaactggcagtccacttgcactcccctctccactgcagagagttttcttctttcacttattaaatttttgctccaaccccaagtttgtgtccaagttccttaattttcttggatttaggacacagaacccaggatactagttyagacaatgaggaactgctaggttaaggtgcattggtgagactgcaacatcaggacctgggttttcctgaaggttggagggagagaaaagccagttccctggcttartctctgtggttggccaccacccacttaagtttcaagccacataggatcaaatccacagagacgacgttcaggaatagaagcctgagctcaaccacagcagtgtggtgataggaatgagagagtggggagatgccacaatatccagttatatgtagaaaaaggctattgtgtcagcagatkttataraaagggctggaatgaacaggctgccacacactgtctctgcaggaacaagattcgcaaggatacaaacaaatgcatttataggaactcactaggcaacagcaataccattgcattgataggtgtgcagacatgtttgtgcagggagtagagagagaagatgggtagccaaggagagagagagaacagcaaatcccagtgtttctttcagcacaacctctcaggaactcataattaatgcattaattctcacacccctgtttctggacttttgtgtgtttcctcacacttcctttgatctcattttccaaaggataaatgaagtctaatggagataaagcactgacatttacagagggttagagactaatgatattaatgacattcttgtggtttgtccaacattatttttgtgcagatttcaattcatgctgcactcatcctgggggcaaaagttaaaggttttctaaaaagctamttagtgaatgtcttagttaatggaaaagaaaataagtcaatccttttttttctaaccttgaagttgcaaagattgacaatgaactctgtaatggtgcattctcctcttgtgtggtttttgaaagctgagttatccttcctgtaatgattctgcacctgcaaactatacgtacgtgtctcattttgtttcataataagaaatcataaacaaacccgaaatagcttagaaataaatgtaagcaattcatgactagaaataaataacatctctcacatttcttccctagaataaatatcrttgtttacccaaggatgccaactatttgcatggtggtgtttagtcaaattcatttgtttaatacatgtatattgggctagtgtctggagacacagtgggctacaagggaagggtctcttccattttaaccgaatatcaacgttagagacaaatattaggtcagatatttgtcttctgtaaagtggcagcacagagtcaaatctatgtttccctagaacagkgagtacctcctaaaattgaatccatcatcaacatttaaatatcagaatattgcatgtaaaaatagtgtttccttcttccctttgaaacaaagattaattcacactgggcctatattactgcatgaaaacagctgactgcaagtgctgtggtttggatgttccccccaccsccvcccccccggccccaacaacctcatgttgaaatttgatccccagggttggagatggagcctgttggtgtttaggtcctgggagcatgatgtggtttggctstgtccccacccaaatctgatcttgaatactagctcccataattcccacatgttgtgggaggggcctggtgggagataactgaatcatgggcgtggtttcgcccatactgttcttgtggtagtgaataagtctcacgagatctgatggttttacaaaggggaaccccattcacttggctcgcattctctctygyctgccaccatgtaagatgtgacttttgccttccaccatgattgtgaggcctccccagccacgtggaactgtgagtccattaaacctctttttctttataaattacccagtcttgggaatgtcttcatcaacagtgtgaaaatggacgaatacagggcatatctctcatgaatagatgaatgtcctccctgggtggtggtgagtgagttctcactctcttactttccgggagagtctgccttcctcagtttctctctcttgtcatgtggtctctgyacacaccagctccccttcaacttcccccatgaatagaagcagcctgaggccctttccagatgcaaatgcccaagctttaaccttccagtcatcrgaattgtgggccaaataaacctttttatcctttataaactacccagcctcaggcattcctttatagcaacactaaactaagagcaagtgagcgccagccattcttttcagttgggccacacgactttcagttcactaccatccctaactgactgcttctttcactaaattcacttttcaaactaatattatatttagatagcaatttctgaaaaaaattgattgcacaaatttgtttaattatatcagcaatccgcattgcaaaggaaaaattaaagaacatgctacatggggtggagagatcttccctagtctcaggtcccagcccctgagacttctccaaaatcaggctgcaggattcagcactgatagggccagccaggtaaagcttctgacccgcactgagctttacagattgaagtcatttcaagctccattaaatagctattcatgtttgcctgataatgtgcatattattctggctaaatacatctgttaccaggagctggtctgcttcaaaaattcttggccagagaaagggccaagacaacatcttctagttattaggaagattatttaagctgttgaaaaatggttttgtggctaagaatcatataaatcccgatattttaacttgaagcaaggtgctgagctattacagtattcaattatctaaatgctacaatgctacaaggcaaatgttcccaggtctgacatattaatctacttgacatttaacaaattacactgtgtttttatagagtgacagctatttgagaaggccagaacacatgtcacccagcctgtcccctgcctgccctgaccacctccattaacgcacctgttattgatataaaggggacacacttaaatgtttccagaagaaaaagcacctgcagcttttaggaaagatacctcaaggtcagggattgtgcacataaggctaaatctgccatgcctttcatcttgaacgatgaattttggtacaataacakaattacttcatcttcagtaaaattccagcacatagtcacttctcagctaagtaaaccttctctgttaactttcccttatgaaaacaaaggagcaaggacattggtacctatgatccgtctttgccaagccacatatgacaatctcatatgacacatgcaaaaggctctatctcataaccacaatctgttaaacaccttctccatgtaaggcacagcaagaggtattttgaatgtattatcttgttgtcatcataacaaaagtaacaacagctaactttattaagggcttaggatgttcgggcatgtacaacccatggatcattgtgtttaacatttacaacaaccctgcaaggtggctgctcttactattctatttattaacttttactactcatttaccaatgaagaaactgaggctacaagaagttaatttgccccaaacccaaacgtttataaactagaactagggaataaaacattgtaggagcacgggtcagcatcaactgccatgtctaagagccacagtggacatcaacccagcccagccttcagatgaaggcagacttagccaccatcagttaagaaatatctgcaattgagcttgcagtgagacacaatcacgccactgcactccagcttgggtgacagagtgagactctgtctcaaaaaaaaaaaaaaaagaaaaaagaaaaagaaaagaaatatctgcaatcacgtaagactcagactaaagaagaatctgggtggctgagcccagacagcccgcagaaccaagggagacaataaatgatcattttaagccgttacattttgagcagttgaataaactagatactactaatataccagttttacccataaggaaactggggctctggagagttaatttgtctaacatcaaagacttgtcagtgaaagacccgggaaacggtttcaggttcctctgactcaatggcccttattcacacaggtgcaacctacgggccactcttctttgccaaatgtatttgaacattctatgccaaatacatgggatgtgtctccaagaccatcagccactaagcatgcattatatgtaggcatatgataacatacacataagagttttgatatgtggacactttaatccagccttatataatttctaactaggaatttatcacacctgtgttcatgtaaaaaaaatgtaaaatcagcttattaatgataatgttcaatgaagacagcacaaacactatcttccatgaatctccaacccactgcactgattaaaattaatttttaaaacatccatgcatcacagaagttgtaatctgcagagcaggggattatttttcttcgttgggtaaaaatcatgcctctctccagttatcagaaggaacagacggtgcatagcacagtaaaaatgagcacaaaccacagcctgattgccagctccaaatccaagaactgtcactgcctctgtgactttgaacacgtttctttcatttttgagtaatgactttattgakatataattcatgtgtcataaagctctcccccttgaagtatacaattcgatggtttttgttatatgcacagagttgtaaaaccatcaccactaattccagatcattttcataactcccaaaagaaaccctgtacccagtagcagtcactgtccatttctgcagtcccccaagaccctgcaagcactaatctsttttctgtccgtatggatgcggttattctgaagtttacatataagtggaatcatacgatatcattctgtgtctggcttttttcacttagtgtgatgttttcaaagttcattcatattctagcatgcatcagaattttattcctttctatggctaaataatatctcrttgtgtggatgattatccaggccatatgggttgtttgcactttctggctatcgtgaataatgctgctgtaaacatttgtgtacaagttttgtgtgaacacgcttttgattctaccacatgtagtgctgggttgtcgctagtgtaggcatgtttcttactctctgagaacctccatttccttgtctgcaacggggcacaatagcagtgcctccttcatgaggttgttgtgaagattaaatgcattaactctagagaaagcatgttaggacctttttctatgatgctaaacattgtagcattttctccccagcaggtctagcatggcctaagctgtgcctccacttcacacgcttttgtgcctttccccgtcggcacacacaagccacactgactactggaactttccagttatctctagtctctgggctcttttgttattcccttgtcctgaaatatctttttttactgctctattcttggctgaattttctcatcctttacgtctcagactaaagaactaactgcctcctaggtgggcccatctctgagcaccctgagaacaataggcttgtctttcctgttctctgattattttcagtatagccctataagggctgtcatattcatttcacctgttctcccrtttattgtcgacctctccactgcaccagaagcatcagaagttagaatatacgcctttctcactataggccttctagccaaggtgaggacacatatttcatgctcaagaaatatttgtcgaatgagtgaattagtgaattaaaaattttaggtggccgggcacggtggctcacgcccrtaatcccagcactttgggagactgaggcaggcagatcacgaggtcagaagtttgagaccaacctgcccaacatggcgaaaccccgtctctactaaaaatacaaaaaaaaaaaaaattagcctagtgtgatggcgggcacctgtaatcccagctacttgggaggctgagacaggagaatcgcttgaacctgggaggcggaggttgcagtgagccaagatcgtgccactgcactccagcctgggcgacaaaagcaaaactccgtctccaaaaaaaaaaaaaaagaaaaacaaatctagtgactgcatattgcaggatctggccagcagcccgcaatgcaacagggctctctctttgttcccaggcggatcggcaggttgagaaataacagacacacacaagatagtgaaagctgggtcccgggggatcaccgccttctggtcccgcggtgccaacaatgcactggatataccagcatttattattaagtttagtgagggtgggggtaggttagtgagggatttagggtcatttgattatgaggtgagatggtcacatgcggatgaagtaattctttaacataacatttgtatgcagaagtacagtatacagagataagaatttacactatagtgtgtgggtcagtaatttctaacagagccttagaacagaaacacagtctttccataacctaggattagcaagatattaatcagcagtaacaattgcaacaaaagctggttacaaacaatccatggaaacaggacatgaagctagacaaccggttagaccagaaattctcagaagggagtatgccttaaccctgaagaggcctagaagagccgtggcaagatgagggtgtttatagccctatcttatccatatggacaggcaccccccatgcgtccgtttataggctccccacaagggtcgcattccattcccagagctatgaacatctgcttttctgggataggaatcttggtgatgtgaaacctccctgactgcacgtccattcataggctctctgcaaggggaagcacatcacgcgctgttggctcattctggcgtccaacctsgcattgtctttacacaatcctgcatgcaattttgtatttacaataatcaggagcatttcatcttttacataacattccatagcaatagtttcagggggtctccctacaactgcataatattttgttagatataaggtcttaccaattttaacaattattttacatttattatggctttttggtgattctaattttatctattataaatataacaaagtatttcgaatggacctgtgctgagagtcatagaggtccatgcacagacttgggtatcacacaygcactcactttagtgattcacagagaggtggaagaaagggaaaaagtctaagctcatgcagcatgggargkgtgagctatgggctcactgcacccagggacaagctggtcctgggacccacaaactcatgggacctcagagaagtttctggtatacctgtaaggcctattagaaattctgagaaataactgagtcaccctagaatattggctattattattatattaaccttaagccccatgggtctatactaatgctaaattaacattacccaagtagtggcttttctcttttttaatataaatattgcctatatatggaataagctctagaaaagtgaatttcttttytttttttttttttttttgatatggagtcttgctctgtcacccaggctggagtgcagtggtgctatcttggctcactgcaacctccgcctcccaggttcaagaaattctcctgcctcagcctcccaaaataggcactggccaccgcacctggctaatttttgtatttttagtaragatggggtttcaccatgttggccaggactgtctcgaactcctgactttgtgatccacccacctcggcctcccaaagtgctgggattacaggtgtaaaccaccgtgcttttgactagaattcagagtaagaaattcatcttacgttacacaagtacacacaaataattcaagtaacatttcaaaaatctaaatttatcttagtacctgtaataaggtagtaaggtattctaattctctgagctattctattccatcctatcccattacttttttttttttttttgaggtaaggttctgctttgtcacccatgttggagcacagtaacacaatcatagcttactgcaacctcaatctactgggctcaggtgatgcttctgccttagcctcccaagtagctgggactgcaggggtgcaccaccatgcctggctaatatttcaaatttgtttttgtagagacagggtctcactgtgtttcccaggctggtctctaactcctgggctcaagaaatcctcctttcttggcctcctaaagtgctgggattacaagtgtcagccaccatgcccactacattttttttcttttaatgttagtctcagcatttatttcataccacaaacgcatcatgacttgcagcttattaaaacactgccttgaagacagatcccagcctagaagctgtacaagcctttgcataaacatgcctaaaagcagatcttcctagctgagggagcccaggaagagccctcctcactatgtgttggacacacccactacccaaaaaacagactattttcctggcacctttccaaccttgtggattacatagtaaagtctcccttagacacataccacctggggggtgcgtgtggtggctcatgcctgtaataccagcgctttgagaggccaaggctgccagatcacctgaggtcaggagttcaagaccagcctggccaacatggggaaaccctgtctctactaaaaatacaaaaattagccaggcatggtggcaggaacctgtaatcccagctactagggaggctgaggcaggagagtccttgaacccaggaggcggaggttgcagtgarcggagatcatgctactgcactgcagcctggacaacagagcaagactgtgtctcaaaaaaagaaaaagaagaaagagagagagaaagaagaaacaaaaggaaggaaggaaggaggaaggaaggaaggaaggaagaaggamggaaaaaggaaggaaggaggaaggaaaaaggaaggaaggaggaaggaaggaggaaggaagaaggaaaggaaaggaaggaaggaaggaaggaaggaaggaaggaaggaaggaaggaaggaaggaaggaaccacctgggaagctgggcgtctagagccttcaaactgtgcccacctcattaataatactacatacagcaaaagcaagttccaaaattagaaataacacaaagaaacaaaaagatttgtacacaacatttattacaatttataatattaggagaaagaacaaacagtattggccaaagatctgaaccaattttaatgtgatcaataaaaataattcacagatgagctgatgttccccttatccttcaccactcatcagttcgatcacccttccaaaaaaagaatggaggaaaggcacgaaaaccctactgtaagtgcaacatgcctgagttcctatgaagcctgcagttgagacaacaaagcctccctggtctctccaggtggagtacggcactggttcagaggaaactgtagcagcctctctgggggcagttacattgagaagtcccttcctgctggaggttctcagcctgaatctgctattccagtggcttggtgggaagcaggagacaccatgtaaacatatccttaaaaaataggagaggtgaacaaaagacaggcaggaaagacacagatggaggcagtgtgagtgacaaaaactctgaactctttctgttttttaacttctacaaacttttctatatactctgtcccaggtggctgggcaaatacttgagccttgaaatgaaatcttggagtattcagtaactcgcaccagctaaatcaatcatgaattgtgtaataaactttagcctttggcatttcagaatttcaagacttttattgcggcagctgttcttatagtttatcttctaagttatttgtgttttctttataatctgtgtatactttttataaaaggagtaatacatgaacctctgagtcagggaatagagctagaattgtatgttttttgctatatgcaaatgataatttactttgtttcatatttttactttcaaaattatttttaaaaggtagtatttcagatagatgwtatagtgtttaattactgtttaacaaacatcattgctgtgtgagatctcccaggaaacttgtaatcacgcaaacattgtttttgtaaacttttaaaaatcaaatttaccttcatacttgtctagcaattatcaatatgtggcaaaggactcacacagaagatctattaaagaagaactaaatatattgaacaaaattatacaatagaatcagtctttcaacaatatgactactccaaacctcaatattactaaatttattgttttgctaatcttgttccacatatttcaatttttttaaatgagtttctctaaggacttctgtgagcgagaagagtttgtatgtttctttaacattttcatttctcttcttatgttcaaatgctctgaccatttttctttgagttgtctatattgttatttctgaaatatattagttctttagatatgtgaattttaatcatatctggtatatatactatagatataattcctaatttatcaccattattttaactttattgattcattttaatttttaatattcaagtttatgaaaatatttagtaataacttttatacctcattaattactaagtaggaatattcttcctcgtatctaatatatagtctgatataattcttaaaaatatttttgcagtcgcattgtacttagctctgcatttcatcaggagtttatttttctaacgcatggggtagaaacctaaatttttttcctgaagtagcaaagcatcatttattgaactgtcatcggtctattcataccacatttcccactgatttgaatattgtcttaattgtgtgctaaatttatgagtatgtggatctgctgaattctgtgatattgaccagtctatcaagatcaatattggcatgatactgttttaattgctataaatttatagaaatatatgttatgatatgtagcaaatcaaccatccctcactattatttttgtattcttaaagtaatgctggattgcaagaataagtatatctccaaatttcagtgtctgaaacaaacagaagtttgtttctcgtccatgtraccaaggcaaatgctcctggttggcaggtggcttcctccaggcagtaaatctacagcccaggctccctgcatcttatggctccaatcactttggatctcatcgtcgcctgcacattgccatacacagggaaggagaagagatggagaaggcaaagactttctgaaagccgtggctaaaagctggcatgtgtcacatcagctcacattccattggkgagaacatagaatatgtaaggcaaagagaaacccaggaaactatcgcgtgccgttcttagatctctccatccctagctggtctgccttcttctctccacatttctgagtctttcttctttgcttaatttacaatgtccagggtgttttagtgaaagtaatcttctctgtcacactccgcacagcagtttctccatatccttttaatatattcctttttttgtggttagaattgaaataatggttactactaccgaaacccctaaataataagtaccttgatggaagggaaaaatgcaaatgacagacttctagcaaaagttaaaaacaaaaataagaaagaaagaaagaaaaaataggaaagaagaaagaaagaaagataggaaggaaggaaggaaggaaagagagagagaaagaaaggacaaaagaaagaaagagaaagwaaaagaaagaagaaagaagaaaaaagaaagagaaagaaagaaaaaagaaagagaaagaaaggaggaaaggaaggaaggagggaaggaaagaaggaaggaaggagctgtgtatagtggtacaaagaggaaatcccatgttgggatgagaatttgagagtcttaattcactcccttatagaactaaagtcacgagccctcagtggttaaactttgaggaacgtgatatctaattatcaaggtattagcattccaggtctctcttgtarctttaacaactacaaagtacagacacagacatggcccastattgtcatctgagagcaggtggtgcatgagtgtgaactggtaacttgggaagaggagccaagtagaaccgtacatgaaaaggtgtagcatctcctgtaaccatgcacaaggcagaatgtggcagcttcattctctaccaccattctttaccctatttcaacaatttctaaggctggtgkgccygtgaggaaaatataagatctggacagatgggatgaggacatctgggaggagccccaactctctgagattacccctatacctcactccgtgcccccagccacatcagtgaggtgtttcttctcattttcaagcycatttaactaggacatagtttagatatcagggagagttttctaaaccagattaaagatcctctctgcctgttatttccaatctgtgctctgaggacccaggattaattggagagctgggcaggtggcagatctcagaattagtgacgtcacagcaaacccaagaattcacagagcaaagcccaaaataatttttttgcactgcttatcagtagattccaagtgaaatgaaattaacttagttgattaggttttcaagggttttggtgacagaacccaccccctcctccatatttactgatgaagagcccataattttttagcctctgaggatttagcctctgacagggaccaggtgtaggaatcaacaggaaggatgcatgtgtgtgatgtctctaagggtgtattttgaagaagtcaggattggagttccccaaccgctcttcctctttttaaaatgtccaartgcaatggccctgtcagtactggctaagtaaaggaaatttcccttgcaaggtgaagccagattagtgaacgcaacacttctaggaaatatgaacaaatggggtcccacaatctcaatgatcctagtatttatctttctagcctaataaagaataatgtgtaccccagggaaggagaccctagatgcttataaataagccaaatagaaggtgagatcctcttccttcgtgagaccgaatgaacagctcaagattccacagccagccacatattcccaaccacctgcggcaagccagaatagcagcagaatatataatttaggtaaagagagagagaaaaaaagtcaaagagacagagatagagagaattagagctatataaatcaccaagatatttagtataattttttttattggagaggtaatttaaccyttttcccatttagaaaaaaaagaaaagtacagctcactgccagcactcatttaattttacataaacacattctttgaggctgaagccaatctgactgattttcaatgtgaaaatagaatataaaaactgttattgaagctatttctaaacagaactaacatcagaatcgtctgaataatcagaatcgtctatttcagaaaactcggattcatcaaataatattcggccaacaactgttccagagtgatgttaacatcacgtgtagaattgctacattttctgggttttgatattttccgtgatcaagaattactatattttgtaaatggaaataccactactaaaaacggaatgctatgaataaatgatgtcttttttccccaaagttgatataccagagcaatgcgaaaataataaaagccagatattttgtggcacttatctcggggtaaaggctgcagccgcaagcaccaccggcaatcattctttttttttttttttttttttagtagagacggggtttcaccgtgttagccaggatggtcttgatmtcctgacctcgtgatccgcccgcctyggcytcccaaagtgctrggattacaggcgtgagccaccgctcccggcctggcaggcattcttgaggcaaacgggaaatggggtaagttacacaatcgatacagctccgtcatcgtggtttaattacttttccacgtaccatgtttcctgacaggtagaacgatcagcctgggcctccgtttttcattctacaaagaatgaagtgcatgaactgtcctctatagaattgtggaaaaagttgtttttattgagttgtggttatctttgtcttcatggtctaattacggaaataaatgcttttccgagtctccggggatggtctgccctagtccagctctctgcagtgtctttctgggtttttcctcagtgaacgggaggaacattggcagcacttgtggtctgcaccaagaactgaatcgaatttccatgtgttattgaatgttcacaaagaccttgtacagcgagtgttactacctctggtcaatgattcawctcaaggctcagaaaagtcaagtgtcttgtccagggacacttagtcagaagtgaatccaaggtttaagctcaagtctgcctaactctgaatttcacagccttttgctacatatggcgaataatatatccctgagcactaaaggcagactccaaggatcttgtctctgcaatcatcattctggccataatttatgaaaagcaacccaaagtatgtgatgtaataaaaagtactatctatgagtttacccttccaaaaattgaactgaattctgagctctaaatttggaatcaaaagaacttttctctgcactaatcatttggaacatcacttaaagaaaacaacgaaaaactggtgtcccctgagagaaagcaatacaaaacattatgcataaagaaatccttccaaaaaataaaccaaatccagtcaaatctctagttttgactcctagcttaccggaaatacgtgatgggaaaaaaatgaaatgacaccactatgattcaatcagccaaatccagcatatgcaaatttctaccagataaatggtttagtttcttccccaaacaaatggcacaaggaaacggaggtaagaatgggatgctgttatagatttwaaaagatttaagaaagtataaactaaatacactatgtgcatcctctckgaacgtgcttcaaacatatcaaggggtcaatgagcagttttgaaacaataagggaatttgaacactgaatggttgtcagaagatastaagagatcattattaattttactagacataatgatgttctgattttgttttttttwwwaaaaaaaacagtgttatttcctttatagatacatcatatagtattaactaatgaaatgctttgatatctggaacgtttaaaaaatattcccgatggagtaagtgcaaagaaacaggtaagcaaaatgctgataattgctgaaacacaggatgtgtacctggggcttcatttactatctcttcattttctattttgatatttgttggacattctcataaaaaggaaagttatgttttattttctcataagctagtaatgaaatagccctamgtaactgatattgtagagacaagaataggtgtaatagagcttaaggttttcatttaaaaaactatctgtagacttcaatggatcttaggtggcatccatgcaataacactcgtggaacatgcaggacaggtgtggagctccatcttcacacagtgacattttttatgcttctgttttccctaagagtggagtgagaggatgattattttatatcatggactycttccctgctatactttttttaattattttactttcacttctgggatacatgtgctgagcatgcaggcttgtttacataggtatacatctgccatggtggtttgctgcacctatcaacccatcatacaggttttaagccctgcatgcattaggtattcrccctaatgctctccctcgcctttccccccaccccctgatagcccccagtgagtcatattcccctccctgtgtccatgtgttctcattgttcaactcccatttatgagtgagaatatgtggtgtttagttttctgttcctgtgttagtttgctgagaatgatgttttccagcttcatccatgtccctgaaaaggacatgagctcattcttttttatggctgcatagtattccacggtgttatatgtgccacattttcttaatccagtctgtcattgatggacatttgggttgtttccaagtctttgctattgtaaatagtgctgcaataaacataygtgtgcatgtgtctttgtagtagaatgatttataatcctttgggtatatgcccagtaatgggactgatgggtcaaatggtatttctggttctagatccttgaggaattgccacactgtcttccacaatggttgaactaatttatactcccaccaacagggtaaaagcattcctatttctccacatcctctccagcatctgttgtttccaaatgttttaatgattgccattccacctggcgtgagatggtatctcattgtggttttgattttcrtttctctaatgaccagtgatgataagctttttttcatatgtttsttggccacataaatgtcttcttttgacttttatgtggaaacaaatttaactgcacagagaggtgaaaattaattaataacttttaaagtaattccctaagtttctaaggatctatatgtttccatctgactttattttatttaagctcttgattgatgctgcatttggagcaggttcatgaacatgaatagagttaatctgggacagatttccctcatttgattttttcactgtttccatcacagaacttatttcatgctcaccatgtttgcaggcattgagcttggtactggagccacagagctggatcagacagacttgtgcaaatatttcaggttttttttgtgggggggtcatatttatagataaataacagtaaagagtgacrggttcttwtgaaaatgcatacacagtgaagtagagggtgaaaaggagggatgtgttctatgaggaggaagagtgataagaaagtgtaaggggatgtgtctgtgtctagacatatgtgtgttcacgtgtgtgcgtgcttgtgtgtactgcatgtgtatatgtgtggccatgcacctgtgtgcatgttcatgtgtgtgtgtgtatgtgtctgtgttgaggactaaattaattgggcttatggaagcagggagccactgataggtttaattagagactgacatgatatgatagtttaggtggatttctctgggggctgtgttgagggacagtggggaggagagctagaaggaagaaaaggacacatgcatarcagaagcaatatctgtctatgggatggtggaaagaatcagaaaagacttaataaaacatgtgacactttaactgaatcttgaaatagacaagtgttggaggagggagttggaccagatacttcatgcaaagggaagaaaagtgcacaaacaaaatatgagaaacaaggcagacaggcatttttttwaaattttcgcacccactgatrgaccagtgatgcattcacatcgtctgcattcatgatcaacaraagtgctttcctagaacatgaacctcaacccaagtgtcgcctcaagtagtgtatgcatgaactcaagcattaaattagaattgattttttaaaaaactcacacaaacagatgtattatttaaaaatctttaaagcrggtttaaacagttttcaggattaaaagcagccactattagaaagaacaaaaatacatttgacataaatataaggagcctcaatagaacctcctgtacccagtcattgtcamtgccacatccattcattcaccagcccttatatcaatgcttgctgggctcacttaccacgatcagcacgtgcatgtccttayctgaaagcttgccactcaaatgtgctcagtcttacctgtgtggctgggagtgttggggatttaatgtcaagggaaagaatcttccatcaatgaatgatgaaagttagttttcacaacttccggtccccttggccctcatcaaagggctccaggtgaggtttgggctccttgctatcctccgagtttccacgrtagttttaagcaccattgcccgtggtaatggctgacattgatactgcactttttttttatttaagatggagttcccctctgccacccrgactggagtacagtggcgcgatcctggccatygcaacctccgcctcccaggttcaagcgattctcctgcctcagtctctcaagtagctgggatatgggcacctgtcaccatgcccagctaatttttttaaaatttatttttagtagagatggggtttcaccatgttggccaggctggtctcgaactcctgacctcaggtgatccacccacactttttattgtttgcctacactttctagacttgcttcatcagcctactccgtttctggttgatatggtttggttgtgtccccactcaaatcttatctagaagtgtaatccccaagtctcaagggagggacctggtgtgaggtgattggattggggggtggttcccgccatgctgttctcatgatagtgagtgagttctcatgagatctgatggttttataagrcagttttccctattcttgctcactcttctctctctttctgccatgtgaagaaggtccttgcttccccttcaycttctaccatgattgtaagtttcctgaggcctcccctcagccatgcacaactgtgagtcaattaaacctctttcctttataaattactcagtctcaggtcgtatctttatagcagtatgagaatggactaatacactggtctatccttcatccaaattaactacctgcactgcagtccttgtctcaggctctgctttgagggaccccaactgtgacagccgcattagaatgcatcacatactgcagtgaaattctagagtgggtgttgtcaggtggtgatgattgttagatatgtcagtctgttttcaggctgctgataaagacatacctgagactgggtaatttataaaggaaaaggaggtttaatggactcacagttccacatggctagggaggcctcacaatcatggcagaaggtgaaaggcacggcttacagggtggcagcaagagaggaaatgagaaccaagtgaaaaggtttctgcttataaaaccatcagctcttgtgagacttattcattacaatgagaacaatatgggggaaactgcccccatgattcaattatctcccaccagatccctcctacaacacatgagaattgtgggtgctacaattcaagatgagatttgagtggggacaaagtcaaaccatatcattagataggacactggagaaaggcaagaaagaaaagacatctgaagaatgaagggagccaaagaaatgccaacattttgctttttgaagaaaagctaaattaaagtcaaaatggatttatcaatttccttgggttcgtgaatgtacagaactttattaaggtaagtcaaaacttctctttttatacttaacccaactcaaattggcttatgtaggggaaacaagaaatcaaaacccaaaggaacatgccagttcaggaatatacagttagctaagcttcttactgaacaaataaaatcacaaagcatgtatgcagatagaccacaagtgactatagtgaggtagtttatttcagctctatttatctggaattaatgctacaccatctgacatattaagcagttatgcatcaggtatcagtagttacatcttccagtgcctcttacagttgcccctgatggtatatctactcgaaagtatgtaagtgcactcacattcttcaacatttcctcattaaagccagatggaattgggcttcttatacttgctattcattcatttaatattattagagtgtctaccatgtagtaggcattttctgtaaatgctggggatatcttgataacaaagacaaaacctttccccacatagatcttaaattttagtgcgaagagaaagacaatgactattttgaagttacgaaggggatttgctgatttgaatgcctacttaggagattcagaagtggttggatttaggtgcttagattaagtcatcaggaatttccaccttctacccataacagtgagcatctgaaacttacaaaacaatatttcctattttacttcattttattttagagacagggtcttgcctgttgctcagtctggaatgcagtggcacaatcatagctcactgcagcctcaatttcctgggctcaagggatcctcccaaagtgctgggattacaggtataagccaccatgcccggccaagatactctatttttaatttacagtttatatcaagacactgagccaggggaatttgaagtcacccatccagtggtcttagcatctttgctcacacactgaatgacttgatgtaaatgactgaatcagacttgtttgcttatagctgacaccaccgagcaaacatattctctctttctctgggacaacacctgatatggtctggctctgtgtccccacccacatctcatcttaaattgtaatccaaattgtaatccccacatgttgggggagggacctcatgggaagtgattggatcatggtggtggttccccctgtgctattctcgtgaaagtgagtgagttctcatgagatctgatggttttataaggggctcttcccccttcattttgcacttctgtctcctgctgccttgtgaagaaggacatgtttgcttccccttccaccatgattgtaagtttcctgaggcctccccagccatgccaaactgtgagttaattaaacctctttcctttataaattatycagtctcgggtatttctttatagcagcatgaaaatggactaatacagcacctatctcccagtattgtattttcacaatggaagttttaatccagggatgtytaatcttgtggcttcctaggccacactggaagaagaattgtcttgggccacacataaaatacactaacactaatgatagctgagaagctaaagaaaaatcacaaataaatcttacaatgtttcaagaaagtttacgaatttgtattgggctatcctgggctgcgtgcagccatgggctatgggttggacaagcttggtttaatccatagatggagcattctacacagctcccttaaagatgttccagaagtgctgactctgtgtcaggcaccatgttcaccacttagatgttcgtttaatccttacaaaagrgccatggagcatggactgttactgtggcagatgtgttagcctcctgtggttrccataacaaaatactacaaactgcgtggcttaaaacaccaggaatttattctcactgttctaaaagacggaagtccgaaatccaggagtcaacagggctgtgctcctttttgaggctctagggaagaatacttcctcccctcttccagcttctgctggccacaggtgttcctcggcttgtggccacatcactccaattgctgcctccatcccacatagccttcttccctatgtgtgtgttctcacatggtctttgtataaggatatcagttatgggatttagttcctaccataatccatcatgaactctactgcactaattacgtctacaaaggccttattgccaaataaggtcacattctggggtttcaggtgaatataaattttggaaggacactattcaacccagtacaacaagtaaaatttaaaaaggcacccttttaccttggcatgttatctcacttgatttttataacagccctgtagattaaacagataatatgttatattcccacttctagatatcatcacccattatttgagagaatggaaatgaagttcagggctgttaacactcctgccactgaaacatcccaggccagtgaccttttcatgtctgacctaacaggtggtttccaaccacagttacttgtgacatcattccatcactccccatacacattccctgtagatcaacttatctggccctacaattayagttacagggarttttacattcttcatcttccacaggcaactgaatcttctgggacaaaaagcatatgttctcccatagtaataaaatttcccttttttagcctggcatgtgactgccaataataacacttcccagactctcaggtgtccacgtctatccaaagggaaatatagtcagtgataacttccagacatagatgaaacatgccacaccttatagtcactttatggggttcattctctcttcccatagactgtcatgctgtcatcatggctggatctgatacggccaccgtggaccttgaggtgacctcgggaatggagacagtgcatgggagagaatcacattggaaggggcctgggtttctgaagaccctgtaagacagatctccttgcagccctgactgcccacattagggcttttatgttagggtgaagttaccttgcattgtcatataagcaattgctatttgtggtgtcttgcaaataaacctattctgatctagtatgtttcctaaaaaacaaaagtttgaacccagctctttacgtgttacatgttctgaatacaaaaataagacccagtttctgccccctagcaggacccaaaacycctcagtgaaggcatacaccataggaataatctcacaagtactttagccccctacctaatgcaaacctactgttcataactggattttctgagagtggagaccaacccaactgcaccctatttaagactggaaccaacggacagtaaaaacaaagttaaatttgtmtcaaaarcaatacctttattgctgcctctgcagaattgaagaaacatgattggatctgaggtaaaaattgtcttcctgatacttcacacaaaaactcgaactgtgggtccgctcatatggcaaactgagctgtcttttatctggacaagcaccgagagcagaagtctgccaacagaagccacttgtgaccccaacatacagatattaaccctgcctaacaggggaatatgggcaaatgtctgtcatcatcctgccctcccctcaatacacatccctcccctacctgcaaggatgaatgaccataaaggcagttggatgctggcaagtctgtggagaaataggaacgcttttacactgttggtgggaatgtaaattagttcaaccactatggaagacagtatggcaattccccaaagacctagaaccagaaacactatttgacccagcaatcccattactgggtatatacccaaaggaatataaatcattctgttataaagatacatgcaagcatatgttmattgcagcaatattcacaatagcaaagacatggaatcaattcaaatccccatcaatgataaactggataaataaaatgtggtacatatacaccatggaatactatgcagccacgaaaatgaacgagatcatgtcctttgcagggacatggatggagctggaagccattatcctcagcaaaccaacacgggaacagaaaaccaaacactacrtgttctcacttataagtgggagctgaacaatgagaacacatgaacacaaagagaggaacaatacaygtcrgggcctgttgtaggggcagggagagagagagcatcaagataaatagctaatgcatacggggcttgatacctcggtgatgggctgatgggtgcagcaaaccaccatggcacactttcacctgkgtaacaaacctggacgtcctgcacatgtatcctggaacttaaaattaaagtaaatttaatttaatttaatttaaagaaagtttgagtttaaggcaaaaaaaaaaaaaaaagaagaggcagtcgatcccaacactcctgacagggaaaaacttcctattttcctggtccagacagaataagctggagctgctgttggggaggataaagcagaaatgatgtctttaataaagatgaggccaggcaccatggttaacacctgtaatcccatcactttggstggctcaggtgggaggatcacttgaggccaggagtacaagaccaacttaggcaacatatcaagaccctgtctcttacaaaaaataaaackaaaaaagttatccaagtgtggtggtgccggcctgtagtcccagcaacttaggaggctggggcaggcggattgcttgagctcaggagttcaaggctgcagtgagctayggctgcaccactgcactccagcctgggcaacagaactagaccttgtctcttaaaagataacataaaataaaataaaaataaaaaataaagatgagcaaaccatgggacccatgatttgaaatggtgaagtaatgacaagtggaggaaggagtctgaataactacaatgagattgatscatggatgagttcacaaggaatatggtccttgtctgtgtctcctactccccattattattaatattattatatgaattgatgacatgtctcttctcttcctcctcctcattattattttattggtgacaaggtctgtttccatttcttatttaatataataattccctgcaatccaagcaagcaaaatgtacatattttttaaaaaagctaaacagcccagaagtcacacacacatttctttggctggggtgtacatatgctctgggggacaccactctgccatgtgtcctgctgtcagcaacaccaagtgcacttctcagcgccagtccacaccgtgggcatctctctgggcaaagagctgtatctaacacaaaaggggcttccatcagggaaacagatgagcttgttaatgaaggggatgaaaatcggagccrtaatgagttactgtatcataaatgaatgcaaattacattgtcagtgctatttacaatttcacacggcacagagtcttgtaattatgtctattcaattattccattcacagaaatgttcagtaagggcttctcaccatggccaaaacccatttggaagctccggttgtacacggaagttagaactggctctgaaaggattaatcaccacatactcagtaataaaaacatgggtgaagggtctaagatgggtctgtatctgagaaatagacgcttaagagtttagagacagcatatagtgactgtgggctgtgtggtcaccgagttgaagcactgagttgaactctaaatatcaacgtgggtcaggtcagcaaaagcttctgcagaagtaaaacattgcaaataaacygtgacgacaggtttctgcaaggtttaaaaatcccttcaggctgggcgcggtggctcacacctgtaattccagcactttgggaggctgaggcaggtggatcatgaggtcagaagttcaagagcagcctagccatgatggtgaaaccccgtctctactaaaaatacaaaaattagctaggcatggtgaggggcacctgtaatcccagatactcgggaggctgaggcagagaattgcttgaacccaggaggtggaggttgcagtgagccgagatcgcaccactgcactccatcctgggcgactgaacgagaccctgtctcaaaaaaaaaaatcccttcaaaggtagattttttttttcataaaatctgtaagagggctgggtgcagtaactcatgcctaaaatccctgcgactctgggggctgagactggwggatcccttaagcccaggagttcaaggttagcctgggcaacacagtgagacaccttcttttaagaaaataaataaaagtagaaaacaatctgtaaatattttagtttatttctttgaaaaggacgatttttcaaacatgatcacaagaccatatcatgtctaaaatgataaaaaaatttatattatcacaggcctaataagcacttgtttttgcaagtatgtgaacctattttaaatctcttctatacatgtgggattttatattttatattcataaatcattgtatcagcctttcatttcactttgcttcctttaaacccagcaaatcccatatttagaaccaccttcactaaactgtccacagctccttctgattgggcttggtttcctgcaagatgtaagctaaattgctcagcagacagaagaagacgtagtttgtcctaaaagcggagtttagttaccatcctggtggaaaattaaagcattgactgacataagtaaaatctgcttttgctatgttataaataaagcttttggctaccataacgaaggtcagaattgcaactgcacagaggacaatagtaagcaccaggattatcttaatctatagaattttcagggcaatgttggacaactccagatgccatcaggcattttttatgtagaagcacagatgtcacgtgcctgctctacaaaagctccaattctgtcctggcactatagcgcctgtgcttggaaagtcttagcagaatcatgactggacatagcggcttcaatccttcattgatatgagttggggcacaggggagcagcttacttcctgctgggagaggtggttggaaaagagctataaaccgaaacatctccaaaaaccatccttattcttcagccatttggaatcagaatttagactctgttgcttccaaacctgccttctatggtcttgttgccatgcggccacttagtaaacactcgcacatgctggccacccacatccatctctgtttctgaaacaagccaagcccattcctgcctgcgggctgtgccctggagtgtcctgtgcctggagctcctcctcctgttctggctgttttggatctttcctccttacagaacagcaccccatgccttaacctagaggagccttccctttcctcactgtctcaggcagctctgtcacttccattctagtctccctccatcaagccaccttgtttagtacctttatagcattttatcacaacttgaagtggtrtgtttattagttgccttgtgcgttgtctaacccctccattgtatgtggctatcctgaaggcaggaatttgattgtcatggtcaccatggtgccaccagggaccacatcagtgtctggcatgagggaggtgctcatggacaaatggtacatgaacgagtgagtgaagaccctgcactggggtcaaggcagattgatatagtttggctgcgtccccactcaaatctcatcttgaattgtagctcccataattcctacatgttgtgggagggacctagtgggagataattgaattatggggataccttctcccatactgttcttgcggtagtgaataaatcacatgagatctgatggtttcacaacgggaaacccctttcatttggctctcattctctttgcctgccaccatgtaagacgtgccttggttttttccccaccttccactgtgattstgaggcctccccagccatgtggaactgtgagtccattaaacctctttttctttatgaattacccagtctcgggtatgtctttaacagcagtgtgaaaacagactaatgcagcagacctaccttcatcggatccmcyagtacaacccacaccatggggaagttccagaaaatttgtcttcaaggagtcaggtctttgacttaaaatcagtgagaacatggggaaaccttttctctttgatttccaaccaaggacgtgttaaaatagcagcagttttaacataaaagtagggtggactttgaatattaaggtgacccaagagctgagctacgtgaaaagggcgccaagcagtgtcttattcttgccggcactgatgacgtctgccacatcaaaatgcagggattgtgacaatctcagtatgttcgaagtagcaacttgctgcatttgaactctctctctggcctcacacatgtaatattcaggaatatctgtgttcataaggggagcatgatttgtgtcttctggaatccttcttcacgtctgttccaactctgtggtgtctttctgaacaattgtcctcagtccttcaaagactcaactctgccaaactcctaaataatgtccttctggaaacggcacttattcccatcatgatgacagagaaaaataaggggaaaaacaagatccacatggaaataaggccttcatcaaaaatgtgtgatgccctttgattgagtttcataatgacgtttgaattaaaaatgcttgagcatcacacatgtcgtcaatgaagtacatttcttggagaggctgtgttggaaatagatgctcgttatggatctcaaaatgtyttattttgtcagaattggagctggggtcacgtgaaaatcaccacaggcttcctcacgttatcacataggcccacaggtgtgctggtagcatcaatttccctgtaggtccatacagataagttctctccactccatgtgtgtggagatgggtcctcacaaaccacttccccactttatggaggcagttgtgctcaggcactaagctctggggtccagcatcctgtgtcctggcagagctggccctagagcgtggagaccagaagtggcccatgccacttgggcaggagacctgtctgctggtctccatctcactatcctgatgatgctag

SEQ ID NO: 1627 - DNA, 20036 bp, Homo sapiens
  misc_feature (1)...(20036): n = A,T,C or G, or insertion/deletion polymorphism (see Tables 1-2)
ggggtttgcagccaggaggaaccagtgggttcctgaccctcacaactgcccagaggacggggtgggtcattgctttgtgtgacagttgagcacagacatggaggtactccttatgtcacttcagtaggggtctgaacatggagggtcaggatgcctgttaggcctgcaaggccatggaacagcgctacagatgtacagacactatttttctcgggaggggattcatggttttctttggatcctgaatggggcctttgacccactaagtagttcagaatccatttggagagcaygctggcgtgggggcttggggctccagctgcgcccttccctgtccttccctgggagrgtgcgggcggrccagcttcctttagtcagctccttaaccaggccccagctacttgtttgcggccccctactactacggcttctacaacaaccggctgcaggcgtactgcaagcagaacctggagatgaacgtgacggtgcagaacgtgctgcaggtagccccccagccccgtgcacatggctgcagctcccactgagtgggtgaaaggggcagcgcctcaaggtccctgccattgcagatcctggaggcagctgacaaaacgcaggcactggacatgaagcggcactgcctgcacatcattgtgcaccagttcaccaaggtcagggctctggcctccccttcaggactcgcttccccttggcagtggccatgcccaggcagggagggtgcccaggctctgtggtcccctgcagtggtgggccctgggggtgagagaagcagagcagcccatcactggccgcaccttgcttcatccttgggaccagcctgagccctgagcagggtaggccccacagggctccactgcccaccatggcccttaggtggatctggtcccatctccttccggcctgcttgccttacaggtctccaagttgcccaccctgcggtcgctgagccagcagctgctgctggacatcatagactccctggcctcccacatctcagacaagcagtgcgcagagctgggcgccgacatctgaggccctgtggcgcctgcccattgtgaagaatcgccgtgcctgcctgccctgcctactgagaagactaccggctatgcgcatgcctatggcagtgggtgcacctgccaggccaagggtcagggtgcccagagcctccaaagagagctgaggggatgtggggccccaaactcmttaattcactgaagacacaggtcccacagggagcggatgatgaagcagaccccctcctgtcatcaccctctcctggtgtagtgtggatgcgaggccacggctcagtgatgggctcaccacccagaagtggggagagactttgggcctcccacccagtggggcttggcctggcttctgtggcctgggcgtgttgtggactcaggcactggggcctgtcaccaaggctcctccaacatgcgggaggaggcttagcagacttgcgctgcaccagcgaatctgcctgggctgctcctgtcccwcccwccctcactragatccatgtaaggggcwccwcwtcccacctggaacttgtgagtggggacccatgatgtaygggtctcacctgacttgaggtgaattttggagtgaagggccctgaggtcagctcccaggtcggtcrtgctgggccaggcctggttttcacaggggctgaaggatcccagtccacctgtgtgcatgtcagggctcggccgggaagaagccagcaaagtcccccgtgtcccttgctgagtattctgtcacagacaagcctccattaaagccacagcagtgctacccaccacacacaccttgctggcccggccaccactgctggcttcagccccttgagcagcccatggcttagcagacccccagatgtaggtcagtggccttacctgtctctatccatgctgtcaactcctgcctccacctggggtcacccagtcacattgggaagggctgtgaaggcctccaggctggccccttccaggggaatcctggaggcctggggtgggctcctgccccttctgccctgccttgcccctgcactatgctcttggctcctgtggaaggagggctgccctcttgccctagtgagggccccatgtggatccactctagtgctgggagccagcgctcccttactgggaacaggattccaggacccctttcttgttgtggctgccatgaagccacagctccttggggaagtgacctgctctcctttgggtgtatgcaggtgtgtggggggccctgagtggcaagttgcttagctaacaggagatccataggcagcctgcaggctaggaagtggcctagtgcaagatgagctgggaacaagggaggagagagcaggagctggggcagaggctgagccgggaggcccttgaggtgaggacacagcaggcccaggaccatggctggggaggatatgtcagcacctggaagtggagtgcaggctgcagcgcccagccatgtgggccaggtgcattcactcagagtggggccacacasccatctacccagtttccacaagatgtggctcctgccacacccacagggcagcctcctccaaatccctcctggaggggcctacccagaagcctccttgaaccagtctgcaaccctgctctatgctgacccttgtcactgaaccctgatctakacttatatgaataaatgaaattacatgccaagggccctaaaaagcaaattttacraaattgtgtggcagtttctgggactagaatgaatttcatttgtgctcctcggcagggagaggccatacttgcagtgagtcaccccaagacggagctgtttgagaactgcagctgcagcaaggccttccaggttcctgggagttgaaggaaaaggatgctgaggccaggacctgagtgcttgtctccatgttctggccacctcttcctagatttccagggactarcttgttggggctttactacctgctgacatgacccaggaggttgatgattgtcatcatyatccccgtttttcaaatagagatggtagtgaagggggcggggagagggttgtccagcttacccaccaggctgatggggcctgtggacagaagcctgtcatgctcctgcttgagaaccggatctagactgggttttagaagtgttctcaaaggggctggctggtttaagtcagggctgtttcagatcctatggaaagggcgcctggagctgtcttcctggcccctactcacaccatcctgccccttcagagaaccctgtggggcacggagctgcgctagcagggctgactgccacctgtctaccagtagctctgargggtgagagccaggctccctgttctccttggcaaagagcttggactgagccctctaggagctgcagccactgtctggggcagcaagcttagtactcagaggggctccagcccccagctgagccagacagcaggccctccgtctagaatccgctttattatggcacctggtgggtctggtgggatctgagggaggaagaggctgcagtcttgctgggcagcccctcggtcagtscagcagcccctcaggccatgctgctgctcagctgcatggcaaagtcctgcacatgctccttcagagtctggcgggcatctgcctgtgcccgcttctcccgtgcccgctcctgctgcagcttggtcagtctcaaccgcagccgctgctcccgccgcttgcaggcctgcagctggcgctgggccttgtcaagggcatcaagggctgcctcggctcgccgcttccagagtaaggcgctgcccacctggtagctgtgttcattctggatgtargctccggcgggtgggggcaggcgcagcatatacgctgagggggagactggccgtggttcgagaggggagggctgcygctctggtgaaggctgggcgctgcagcctgcttcatctgcctgggcacccaaggggcccagtaggtctgaaaaggggctgctaaggccaggctccagcctcccagctggggaggccggcaaagtggcaggtgctgaggcctcttccacaggaaagcaggtgacatcagcaggtggaggtggagaaaatggagttgtgggccctcggccctcggagcagctggtaagggggaagagagagactgatgggctaggctgagggcttgccagacccccctccaccagcccacctgatccacccttaacacccaaacccgatccacaggttctgtgtagcaagaaccctgtccagcgagactgctggcagacacccctagggcccagtccctcagcctaggggtgggagtggggcatcccccacccatatcacataccgcttcctgcatcgtctgagccggctgacttcagsggggccaggtgggtaactgtgtcctttggtcttggttgtccggcgcaacttggagaaagactcaaatatggtggggactgccccctcctttagcctgtgatatccactgcggggaaaagcaacccagatgagctggagagcaagtgctgcctccccaggccaatctgcccccagcagcagcgccgtgggatgctggaaggcatcgtgcaaacaatacgtctggggaacgccaagttacagctacaccaatcgcttccccgcaggactcctcacagtccaggtgtgtggaaagcctgcataagccgagctgggctgaccagccagaaagaattctttgatttgtggacttgctggcaagactggggctctgaaagatactctctggaaaggctcctgttttccccttgtgtcacaggcacagtgatcctgggggtgggtttcactgtgcagagctgggaacaggaaacagcccccttggacgcaggctgctcaagggacttccatgacctgcagctgtcccagtccgccggragccccacatcctaccccagcgtcggccggcagggaggcccacctgattcccaccagctcaaagcagtcctcctcaaagtgtttggagcagaagtagatgtactcggatgccgggtcccacaggccctggccgctggggtccagccgctggcagttggccagccacaagcctcgcctcgggttgtccttcttgggaagtctgyggagccacaaacccgtgagcaccaggctgtccacagccctgggctcatgctgcccaagcaccccagaggggaaacgcagacccaacacgcgccgccacgagacctccctgcgaccccgccgggtaagcaccaccgcccgggcacagacgaggcaacggaggcctcgagaagaaaagcagtttcctcagcgtcatctggcaggtaacagagtggggcgggtccaagccggctagacttcccgtcctccccttcccgactgcattcagtcccgccgggaccgttccgcttcacctcccacccacaggttcaagcctcctcagtatcygagaaaggcgcgaagcctctacgcagttgcgacccgaggcgagcaacaactagcgcatgcgcacgtgagcccgcggcgcacgcgcgctgacctgtggaaggagatgccgcggttgcgcgtctcgcgcgtgtcccgtgtgcagcagccggcggcggagcagtgacgcggcatctgggaaagaggcgggagttaagtcgcaagcggctctccgggcatccggaggagcctcgcgcctccagccgccgctcctccccaaggggctctggcctgtcgggtcccccccggcscgttgtcgccccaaccccgtcccagccgattctcttgacttctgtcagcggcactcacgctctggccattgctgcgccgccgaagtctcgcgaggggtagcgcgcgccggaagttggtaccatagagactggagagccggaggtgcccccgccaccggggcggggcggggcgaggtcctagctagctgggttagtaagcggcgcgagcgtgcgagtttctgtcgcgcccgcgtcgtcccagctccctgggctaccagtattgtcgcccacgtgggcttctctttcgtccgctcaggcctcacttttctccgtaaacaccccggcacgatggagcggccccagcgttcgggagcggcccgggagcggaaagcggcagtgtcctgggagcctcgaaagccgcaggggsggcagctcgcctcggaatgacctctgwcggaagaaataaaacggggcmtgggacgcttgcacgaaagaacccgmcaaaaaccagagcccgcactcactctcrtactggggaggtggacttcagggagggttatctggaggaggaatctctcaaagtacaacacaggagaaagamagtatcgcaatacagaaattttatttttwattttattattattttcctgagamcggagtctcgctctgtcgcccaggctggagtgcagtggcgcgatctcggctcactgyaaactccgcctcccgggttcacgccattcggctgcctcaccctccacagtagctgggactacaagcgcccgccaccacgcccggctaatttgcaatacggaaattttaatagrtaattagctctcctagcgttatggtggggaatayagagggatggttgcctgccgcaccctcccctcactattcttcgccttcttcagcctcagcttccacggaatccatgcccacatcttcataatcctccagagctgccagatcytcgcgggcctcggagaattcccccactgccatgccctcccccacgtaccagtgcactaaggcgcacttggccgmacttatggtccaggcaggcccaggcctccgtgatggccgtggtgttgctcagcatgcacaccgcccgctgcactttggccaggtctcccacagggaccaccgtggggggctggtagttaatgcccacctgtcagagatgggcagcatagaatgaagtttatattggcctcagaaatgggagctcattaaaaatcagagctgtggaccagttccaacactgtgttttaagaattgcttctatattttttggcattatctgttayctatcgacaattaatatcctttgacgacttttttttttcttttcttctycttcttcctcctyctcctccttctttgttgttgttgttgagacagggtctagctctgttgcccaggctggagtgcagtggtgcaatctcggctcactgcaacctttgtctcccaggttcaagcaattctcctacctcagcgtcctgagtagctgggattatgggcatgtaagatggagcccggaagacggagatttcagtgagctgagatttcgccactgcactccagcctgggctacagagcgagactgtctcagaaaaaaaaaaattattacccatattacccatacagtaaaacacatgaaaaagaatgagaaccctgtcttgggatataaatacatccaaggtatattgtatactttgtaaaaagaaaartgagttgaagtctatgtatttrtgtgtaaaaaaatccatgtaataacatacacaggctagaaccttgggcagctagggtagcatcatgccggaggaggacaaacgcctgctgaggtggtgaccctgccttgccctgccaagcacgtagcagttagcaccaactagatacagacayactccacaggagttggaaggggcagagagaagggttcgtaccctgatcagggagtgtcctcccacaactctaaggccaagcctatcagcccttccaagtgggagtgctgccagctttctgtttactgtgaccacctgtgtgcagcaattgggtctgtcacctacaggaaagggacatacatatctgctggccactgtcaacatcacctgtataacaagagattaatatgccttgaatatgtacagaatgtttttcaaaggacagaagcagctctggggaagaagaggacttcagcttttcagtcttctgcattctttyagtattttgccacatatcaggttttgttttgtttttgagacagggtctcactctgtcacccagccttgagtgcagtggtgtgatcttggctcactgcaacctctgcctcctgggttcaagcgattttcccacttkaagtgatccgcctgcatcagcctcccaaagtattgggattacaggtgtgagccaccgcgcccggcccatatcaagttttttttttttttttttttttttttttttttttgarawggagtcttgctctgtcattcaggctggartgcartggcacaatctcggctcactgcaacctccacctcctgggttcaagcaattctcctgcctcagcctccagagtagctggaattacaggcaaccgccaccatgcctgactaatttttgtakttttagtagagatagggtttcaccatgttggccaggctggtcttgaactcctgacctccggtgatcygcctaccttggcctcccagaatgctgrgattataggcgtgagccactgaccgcacccagctttttttttttttttttttttgagatgggttttgctctgtcgcccaggttagagtgaagtacaatggtgccatcttggctcactgcagcctcaacctcccgggcttaagcagtcctcctgtctcagcctcctgagtagctagcactacaggaaatgtgccaccatgcccagctaattttttattttttgtagagacaggttttgccacgttgcccaggctggtctcaaagtcctgggctcaagccatccacccaatggattacaggtgtgagacactgtgcctggccaacataagtacttttataataaaaaacccaaatgttcgtatttttttttctaagggtcttgttctgtcacccaggctggagtgcagtggcgcagtcatggctcactgcaacatctgcctcccagtctcaggtgatcctcctacctcagcctcccaagtarctggaactataggtgtgtgccatcacacccggctaattttttgtattttgtgtagagatggggtttcaccatgttcccccaatggatcctgaactcctggactcaagcttttttttttttttttggtgagagagggtctcacttggtcacccagcctggagtgcagtggtgcaatcttggctcactgcaacctccrcctcctaggctcaagtgatcctcccacctcagccttccaagtagctataagtgcgtggcatcatgcccggctaattttttgtatttttggtagagawgaggtttcaccatgttgcctaggctggtctcgaactcctaagctcaggtgatccaccgacctcagcctcccaaagtgttgggattacaggcatgagccactcggtccagcccccaaatgtttttaagcatggaaaagactcttcgaaaatagcatatccgaagctgggtgcagtgactcacgcctgtgattccagcacttcgggaggccaaggcggttggatcacttgagktcaggagctcgagaccagcttagccaacatggtgaaaccctgtgtctaccaaaaatacaaaaattagccaggcttggtggcgcatgcctgtaattccagctgcttgagaggctgagacaggagaattgcttgaacctgggaggcggaggttgcagtgtgttccattgtactccagcctgggtgacagggcgagactccatctcaaacaaacaaacaaaaaaaaagcaaatggttgttaaagaatgtatggttggstgggtgcggtggctcacacctgtaatcccagcattttgggaggccaaggcggrtggatcamctgaggtcaggagttcaagaccagcctgcccaacacggtgaaacctcatctctactaaaaatacaaaaaattggtcaggcgtggtggytcatgcctgtaatcccagcactttgggaggccgaggcgggcggatcactaggtcaggagatcaagaccatcctggctaacacggtgaaaccccggctctactaaaaawtwwaaaaaaawaaaaaaaaaacgttagccaggcgcgatggcgggcacctgtagtcccagctactcgggaggctgaagcaggagaatggcatgaaccccggaggcggagcttgcagtgagctgagatygtgccactgcactccagcctgggcgacagagcaagactctgtctcaaaaaaaaaaaaaaaaatagccaggcrtggtggcgggcgcctgtaatcccagctactcaggaggctgagtcaggagaattgcttgaaccggggaggcagaggctgcagtgagccgagatcacatcactgcactccagcctgagtgacaagagtgaaactccgtctcaaaacaaacaaacaaacaagaatgtatggtaaatcacactaagactgacaraaaggaacttaagagcaaagagaattaattcaacaaggtccatctaaggctggactatcttctggggggaggagaggctgtgactttatctccccacagactagcctccctactgtctcacaakacttagttacaataggaaacctctgcacagcatagcatctcccacagtgcctgccagctaaggatgtcttcaccttccaaatgtaacactaattgaaagaaaaattcctctactcaagttgagaggcttaataattagacacagaatggagggtttcacctcctacctgtaacatctwayawctaaggtctgtaatcctcctatgtaacatgtaatgaacattccaggttggtgtaactgttgtagatttwacccttctttttcctctttttttttttttttttttttttttgagacagtcacgctctgttgcccaggttggagtacagtggtgatcttggctcactgcaatctctgcctccctgtctcaagcgatcctcccacctccacctccccattagctatgactgcaggcatgcacaaccatacctggataatttttatatcttttgtagagacagggtygcactatgttgcccaggctggtcttgaactcctgggttcaagcaatcttctcacctgggcttctcaaagtgctgggattacaggcatgtgtcactgagcctggccgattttaccctgttctatgaatcactttaaatctgtcaacttaaagatggtttgcatcaacgtgagatgaaaaagagagatgatctgtgtcaaggtgttgtaaagtggctgararagggccagacagattcaagaagttgtgtgygttcagaggcaagttatggccattccacatgggaaaaagaagacacatacctgtgactttctcatatcatttcaatctggaatgatcctggaactkgcaactcctcaaacaccttcagaactcattgagacttataaatgtgggatctatagctttgcctaatgtgggaaaccactgtagacaggggctcttaactaaccatagggcacaaagttgaccaacacaggtgtggtgaggcatttagcctagtcatcacaacakatcttcgagcctgacattctgttatttggcttccaaatacatggtacttttcttttggtagacaactgactrtaagcatagctaaaggagcaccaaatcatcagtctgattgtgtgtgaggcagaggtctctgcttggtttggagaaagggcaaagacctgcctttggtcttcacagtaaacactgcacaatatatttwawaatctttacagaaatattagtgttgcccaaaattcagtgacaacaggtgaccaagatgatgtaaagtgtaaaaaccactatttataacacaaaaaatgataacatagaacctgacaaattactaaagtgagcagtggagtaatgtggaggacagaccaggacctgcagtcagataatctctgatttctctctgcatcacttgctgcctgtgaggctccagacacctaaagctatctcmgccttkgttttcttttcttttttctttttctttcttttttttttttttgagakgtagtctcgctctgttgcccaggctggagtgcagtggtgcaatctcgactcactgcaagctctgcctcccgggttcacgccatcctcctgcctcagcctcccgaatagctgggaccacaggtgtctgccaccacacccggctaattttttgtattttttagtagagccggggtttcaccgtgttagccaggaysgtctcaatctcctgacctcgtgatctgcctgccttggcctcccaaagtgctgggattacaggcatgagccaccgtgcccagcctcagcctctgttttctaaagtgtaagatactggtaatattgcccmatgaaytttaaagggtagyggttaaggtatgagggaacataaagtatttggtaaagtataaggcggtaggaaataaattactaaaattattatccttgcaacctagctgacgtgaaaaggggttgtctccataaaggatgcgggccttcaggggcagcattattctgcaggtctcctgcttcctgatggcacaaggactccacatcacccagtcctaccttaaatccaatcggacaccagtccacaaactggttggtgtgcttgctcttgatggtggcgacagccgcactgacatctttcaggaccacatcccctctgtacaacatgcagcagsccatgtacttgccatggtgagggtcacactwgaccatctgattggctggctcgaagygggcactggcgatcttggccacggacagctgctcatggtaggccttcttggctgagatgaccaggrcgtaggtggccagggggaggtggatgtgggggtayggcaccaagttggtttggaattctgtcaagtacacattcagggccccatcraatcacagggaggccgtgatggaggacacgatctgcccagacgactgaggttggtgtacrtgggacactcgatgtccaggttgtgctgacatgtcataggtggctttgctgtygactatgaaggcacagtcagaatgttccagggtcgtgtaggtggtcaggatggagytgtagggctccgtcatggccatggagacctggggggctgggcaaatggcaaactccagcttggacttcttcccgtagtccaccgagagccgcttcatgagcagagacacgaacccagagccagtgccgcccccaaagctgtggaagatgaggaagccctgcagtcccatgcacagatctgccygagagaaaycagacaacgtaagccaatgccygtgggagccacaccaccaacctccaccaagccggggccacttctctttgcctctgagagttgatacggattcagaccatccataatgaacacgcatcacactttgaagcagagaaaagcagacaatacagatctatgcacaaatcaccacgcayacttcacagtaagacgttgcagaggtctagnaaggctggtttgaagaaatacacagaagaaaaacggatggactaaccagagcgctcagccagcctgctggactggcacccgtggctacagacactcttgtttagcaccatggagagctccctgcacagaagcaaggactcagggcattgccccctctctacctgagaactagactcagcgcccagcactggatttgataatacaggtactcaaatacatgtgctttcctctttactcagacacttctagggctggcagggtcagacagtaatcccccactttgtggggaggccctgtttttgctgaacagctcargggcrggaagattctttcttccacacacccctgcaactgccaatacttgttctgtgtgacccttgcagccatcctatgcggtaggtgctaccattgccatggatcaagtggggacgcacagatccaagctccttcacctctcaagggagtkgggccctcccacagatctcttggaggaaaaaaatggccttgctgggcctgtcgatttccagtccccacccacctccctcatgtacatgtgtctgtttgtgaaaccttcatagcaccttagcttccaggccctccatcccggctgcctctctggcacttgcccttttactgtgcgggtccaaagagacacctatgttcagtttgtcraagtctgaaataagcctgtcttttaatttcactgactcccagtagtaatttttttagaagacaaactgcttctctggcagttacactccagggccaattctcaaaggccaagtctggtgccaccccactccctctaagctgcttgagccagatgagagcttctgaaatgctgcagaaaagagctctcctggggcatccattaaaatgcagattcacyggcattcccctaagagtwtggttcagcaggtccagggtcaacatctgcatgcctcacccagggtcacaggtgattgttactattattggaccatttgaggagaggcaggtagaagtgcaaattcctggcaaagcaaacactcaggggcatgagagtgatgagaccaaggaatcccaaccatgtcttctacctcacctggaacaaaatctataccctttttgccacggcctacagccctgcagccctctgccctctccaccccacagcctggccacgcttccctggctccctagcctaggcacactgctgyctgccagtctgggaaacaggcccgcatgctcactgttcctctgcttgaaatgctstccctctgatcttgccatggctgactccttcccaccctgcacatttcagcttaaatrtcacctcacagaggcctccccagccacctctttaaagyagggggtcccyrttcttctctagaakcataaactatttgtttcttttgcagtgccaataattactcagaatgatrttgttaacattgtcccttgaggtcaggaacttggttttgttcaaggtggatccctggtggctaagtcagtgcccagcacatacagcagcgcgcaatgagatatttgtggaaggaatgaagagttccgtgtggctggagtggaagaggagtggggcaaggtggggtgtggggagcaggaaccagagcacatgctccctggcgatgtgcagcgcggtcctgccaacccccacccatccctgccccaggaagctgagctttcatggccatggtgccctgcgcaggcgttacctgcttggtcattcagctggttgtagctcaggtccagggacttcaggtctgtgtgggccagcaggagttcrkcaaggtgctgggccgcctgctcctccaggccattccctgacagctgcatcttccgcatggcctggttcactgtgagggcggcacagagggcctgggctcctgccactcccagctggttctccracaggtccacatctgggggwcggagccactcctcrgccagtgggatgcaaagccaggtaccacccccctcccccctcttctgccatcccccaaacctccaggtctgaggcagaggaaaaggacttacaggttaactgtcctggggttgcatggtggctctggctcccaatggctgggtcccctctgcccctgacctccccctccctgtgtgcccaccagcttctgtgtcaagcggttaaaacygcctacctcctggtactgtagagactgctgtggtggggggcagccaccccatcratgattatgtctggcagtgatatcaccacccacttcagaagycctcactgccccattgccaggattggcaataatagcccaggtgactgtgcatggagcacttacatgggtcacacactctgctgatcacttcaggagtgcatttcacttcatgctcaccacagccccaagcctatgaggtcttktgrgggccatttcacagattggaaactgagctgctttcataggtcaccccgttttctcagtggcagagacagcatttggattcagcttcaatgaactcccaccttgcccacccctttcttgaacttccccrcccccaactctctgtgttgcaggactttccactctgcattcaggcactggggagtctcccatgtgcagggcagggcaggagaatgggtgccagccaacaaggaaggagagtggtggggtagggtggatgaggaagggacttgtatccagcatcdgctgcacagcagagggtctaactccaccccacataccccstcctgtgatgaggcccctcctctatccaccagcaacaccagcaggacccaggtgacatggcccagctttcaggggtggaggcacatccctgaggaaagggaggastcacgcctgcccacctgccccagacccagcacctaccgcagatgytgctgcttttgctcagggcacctgccagggcctctgtacctgccccatagagcccactgtcccaaaagtycagccrcttgacatatggattggagctcaatgaggaagccagagaccggcgccctgggacagacagagcaaacacactggccactatcctggctcatgctccagggctcagcccgctccacgtcccccacctggaaagtacccccctttccacctgcttaagggacacatgcttctccttttaggccccacctaggtgtcccccacccccacctctcccagagcccccagcgggttagaagcctgaaggctccccaacccttcatgccatctgtcatagcatcaatcccatctgtctctcagatgtcgagggtagggcatgcctggcacaggcagaagctggggagtacaggggacagactcaggggcactcccatggctgttgtctccyggggcctctccctgtaagcctggacccagtgtccttccagtggtacctgsggccccaggccaccgtgcagcaggttcagctctggggcactcccttggcacagaaagcagaagatgggcacaatgctatggatccagcaagacctcaggtacagggtgtccccgaccagttctccaagtscatgggtgcctggtaggagacagggggatgaatgtgaacccctgcatggctatagccacctgcctcctcccctgccctgcatcactacctggcctattttttgcctctagaagcactgcttcctaygctccttaggaccactgcccgcatatgacagataagaacatcgaggctaaggcaacgcaaatcttttccttaaagtcatacagctgtcaaaagaaagctggacaacctgggcaacayagcgasataaaaaattatttaaattagccagatgtggtagccccctgtagtctcagcgactcaggaggctgaggcaggaggctcaccagagtgcagagttcaaggatgcagtgagctatgatcctgccactgcactgaaagctgggtgacagagcaagaccctggctctaataaatgaatacataaagtctcacagctagtggtagctaatcctgccagagtcaggcctctacctgtctgatgacaaatggcacactatgtcttttaacctgattgcagaccacaaatgttttgtgaatattttccccagggaaaaaacyggaagtagttctaaattctatacatccattatattagttttacctgtggattgggaaaacccagctctgattgcatttcagggcgggacagcctttggtgcactgtctggcgggattttccattttaacctccttctagaagcgccttctcatggtaaagttcctgatgccgccaggagcgccgaggagagggcagggggctggagacgccccgcagagggctacgtgccctgctggacagaggtctcctgcctcctcggcggcgccagcccacctcccacaacccctgcgggagaagcccccaaggggaggagacgggcctggcccctgccccgagcaccttccgtctctaggtcggagtctgaatcggccttgggaccctgcttggcttcggggacccctgcaagacgtccacaggccgccgtcgcctcttcctcctgctttttatcctccccagacctctggcaggaaccgctcatcgttacgcccctttcgcagcctcagacmctgaggcggagaccgcttggcgcctcacttagagcgcgacccggggatgtgggcggagtctgcggctgcgctgaccaatcgagtgtggcgtccatcgactggcgtctgccacggcaattagcgacgcgctcccccgcggcggtcgccccggcaacccagtgctgtaggttgccgtagaaaccgtggctctcctgcgctgaggctcctcgcctgagaggataaactgcacgcgccacgggctatgcactgggctgggcgccttgtgggcatcctccctgccttcctagggggttccagcatcgcccccctttcgtggactgggaaacacgcctgactccaggacttgtgttgtcctcactgcactggggaaggtggcgggggcagcttttcaggagggcctggggaacttcgcagagccaggtcaccctctcactctgtrcctcttagttatcttgcatgctctggtctttgcatacgctgctccctgcaccaggaacctccwtccccatctttgtctgcttgtcgaacttcagaaatctgcaagggtcagcttagaggtcacttcttccggaagctttcctcaacaccctccccgccctgctgctgctgccctcaggccctcctctcacagcactgataacagctgtccgtctccaccctcccaccacctccactcccaccccaggaagtgaggccagagggcagggacagagctgctgctgttctctgtgtgccagggcccagcaaagggaatgtagggagrgtgggaggtgcagggcagctgggattaggggttgagggctgggtgttggaggctggatctggatcctgctttagtggaagtgtccctttaacagcaactggcctggcctggctcgggccctgctttgcctcctgttcagctgcggctgcagctgccrtgctgactcatgtgcccgcagctagcaggagctggcagcatgggctccccaggggctacgacaggctgggggcttctggattataaracggagaagtatgtgatgaccaggaactggygggkgggcgccctgcagaggctgctgcagtttgggatcgtggtctatgtggtagggtaagagagaagagcttttggccaggctggaggggcaagggaagaggtsggggrtggggcttggtcctgctgggttgaagttgagggttgggctgtttaggggctggagtggaagggggcagattgggacggggttggggagagctaggcgatacaagacaggagagcaagaacaagctgtgtgtttgtcctgtgtgtccacttgcctccttcccaggcccccacccaggccccacccagggggcacatgacatagtccttaacatctgtgagagctggagcactaggcccccagagagaccaccagctgtatctcgggtcaggagagtctgtaagggggaagctggatctagtcaggctgggggtgggtgctggctagtgaaggtgattgtctgagrgcattggctctctgatgcatggctggagcttctgtctcattcagggggtctggagtgggaagtggggccagagaggaggtggggccttcgatgttgggccgggagcctgtagggtgtggggggagaactgagcatgtagggctcagctccgcccctgtcactacacgctggggacacaccacactgcccgacttctcctccccaggtgggckctcctsgccaaaaaaggctaccaggagcgggacctggaaccccagttttccatcatcaccaaactcaaaggggtttccgtcactcagatcaaggagcttggaaaccggctgtgggatgtggccgacttcgtgaagccacctcaggtgggggccctgatgttgctgacgggggcgcaagtcctttccccactgacagcctgaacacccgccatgcagccagtgtgtgcgagagagaagcatgtgatgccagagacggctgcgggttctcaggaagggcttcacagaggagtggcacctggacaggactttcagggatgtgtaggaggttttggggtggaaaaaggggccactcaagaagccaggccagggttggacgtgctggctcacgcctgtaatcccagc

SEQ ID NO: 1628 - DNA, 13856 bp, Homo sapiens
aatttgttccctgcacagaccaataatgaactccaaaattgaatcagtaataaatagcctatgaacccaaaaaagcccaagacctgctggattcacagccaaattctaccaggtgtacaaagaagagctgttaccatttttacagaaactaatccaaaaagtttaggaggacttctctttaattcattgtatgaggccagcatcatcttgataccaaaacctggcagagacacaacagcaacagaaaattacagaccaaaatccttgatggacatcgatgcaaaaatcctcaacaaaacctttgcaaactgaatccacaagcccatcaaaaagctaatccaccatgatcaaataggcctcatcctggcatgcaaagttagttcaacatacaaaaatcaataaatatgattcatcacataaacagaactaaagacaaaaaccacatgactgtctcaataaatgcagaaaaggcttttgataaaaattcaacatcccttcatgttaaactatttcaaaaaattagatattgaaggaacatactaaaaataataagagccatctatgataaacccacacccaacatcatactgaatgggcaaaagctggaagcattcctcttgaaaaccagcaacaggaaacgattccctctgtcaccatttcttttcaacatagtattggaagtcctggccagagcaatcaggtaagagaaagaaataaaggacgcccaaaaaaccatagagtatgtcaaactgtttgcagttgacatattctctatctacaaaaccccatagtcttggctcaaaagctccttcatctgataaacaacttcagaaaagttgcaggatacaaaatcaatgtacaaaaatcacttgtattcctataaaccaacaacaatcaaatcaggaaggcaatcccattcacaattgccacacacacaaaaaatacctaggaatacagcaaacgagggaagtgaaaaatttacacaataagaattataaaaaaacttcccaaaaagatcagagaagacacaaacaaatgggaaaacatcccatgttcatggatacaaagaatcaattattaaaatggctgtactgcccaaaggaatgtacagattcaatgttattcctatcaaactaccaatgagattcttcacagaactggaaaaatttattttacaatttatatggaaccaaaaaagagccctaatagttaaagtaatactaagtgaaaacaacagagctaacaaagctagaggaatcacattacccaacttcaaactatgttacagagctacagtgaccaatatagcatggtactggcataaaaacaggtacatacaccaatggaacagaatagagatcccagaaataaggccacacatttatgactatctaatctttgacaaaactgacaaaaacaagctatgggaacaagacttcgtatttaataaatagcactgggataactggctagctatctgcagaagatcaaatctgaaattcttccctgtaccatataaaaaaatcaagtcaaaatggattaaagacctaaatgtaaaaagaaacctgtaaaagccctggaagacaacctaggcaataccatcctggacctaggaatgagcaaagatttcatggcaaagacatcaaaagcaatcaaacaaaaacaaaaattgacaaatgggatcctattaaacttaagagcccctgcacaagaaaagaaaatatcaacagagtaaatcgacaacctacagaatgaaagaaaatatttgcaaacaatgcatctgacaaaggccttatatccaacatctataaggaacttgaatttacaagagaaaaacaaccacattaaaaagtgggcaaaagacctgaacagacacttctcaaaagaagacgtacatgtgaccaagaagcatgtgaataaaaacttaacatcactgatcattagagaaatccaaatcaaaaccacaatgaggtaccatctcacaccagtcagaatggctattactaaaatgtgaaaaacaatcagctccatcatggtggatgggaggcaggactaaattgcagttctgacttggaaagacagaggagcttgtgaaggcttgcatcatgaattttagctccagaaagactgcagaaaaaaatcaggaaatgcgagaggacccacaggttttctgaagaaagtgggctgctcctgcagaacctgggagacaccccaaatactgtgaaggcccaaattgcagaagtgggaaagggagatcctctgcccccaaacacaacctcccctgggaaaactgaaggtctattttatgggaaaagattacaaccttacctggagctgagtyaatttagagagctgagcaaaatacaggaatagagggagcagtagaaaaggccctgtgagctcgctgggtcctcaagcaggctattcctgtgtggcatcacaaagatcctttgggagggtgacaagagggaaatgccacagagagaaggaaatcaccagctgaattttggaacaatttgaagtcatcaagaagcctcctggccagaactgagggaagagttcaaatccattgtgcagactaaataggcaggggaagaactaaagtcctactttctttcacagctaggaggtgggtagcctgtggcaagttctcagccctgcttgccgactgtctggaaacagacagggtgccattggggaggcatggtgggagtgagaccagccctttggattgcatgggagctgggtcaggcctgtgactgccagcgttctctcacttccacgacaacctgcatgactcagcagaggcagcttccttctaggtgcataactccattaacctggaaacctcagccccatcccccctagcagccacagcaggagagagtgagtctgagctcagacatgcttagctctgccccacctgatggtacttccctacccaccctggtattctgagcacaaagggcataaactcttgagagttctagtgacttacccactgccggtgcctcttcatactatcacagctgatgctctctagaaagaactacctcctggtaggaggccaaccacacaaaaatagagcattaaacycccaaagctaagaaccctcacagagtccatttcacccccctgccacctccaccagaacaggtgctggtatccacagttgagagaccaacagatggtttacatcacaggactctgtgcagacaaccccaatatcagcctggagcctggtggactttcttggtgactagatccagaagagagataacaattactacagctcagctgtcaggaagccacatccataggaaaaaagggagaatactacatcaaagaaacaccctctggaacaaaaaagtctaaacaacagccttcagccctagatcttttctctgatagagccyacccaaatgaggaggagccagaaaaccaactctggtaatatgacaaaacaaggctctttaacactccccaaacatcacactagctcaccagcaatggatccaaaccaagaagaaatccctgatttacctgaaaaaaaattcaggaggttagttattaagctaatcagaaaggcaccagagaaaagtgaagcccaatgcaaggaaatccaaaaatatgatacaagaagtgaagggagaaatattcaaataaattttaataawawaataataaattttaataataaataaataataaattttaataataaataaattcaaacatttgatacagttagtacataaattttgatgcataaaaaagttaaaatgaaacacactaatctgttctgtatacacctaaatgtaactttgacactgaaatggattaagacactgctcttctctgaggaactgagtttttattctaatttctggatgtagtgtgtgggaattattatttttgctgctctttttctgaaaaagattgcctttccctaagagctgttgttccaatgaaaacctagtgttttcaacccagcatgaatgatgcaagtgctgaggtcctttgggcgagaccctctggggttattgtagctctcactggagacgtgagctctgctctcttttcaaagtatccatgaagtctcaacagaacccaccacacaaccccccacccaccatggtagtttgtctttctctttgtcytctttcccaacctcatctttattgcctggatatagcgaggccagggtaaccttcttgtctctatgtggatagtacgtttgtacttctagccttgggatttttccttaatatttgtccatgctagctgagtttgccttttcaatagctctcttgactaaatatacggtaatttccaagatattttggttttattttattttatttttgcttagctttgcttcaggggactgaaggtgagggatcagttcttcatagtggaacaccttacatctttctctgccatctttgacgtttatgaggcatatttttctactttgtttggtagctgttgctgaatttgtttcattggtgctttgctcactttacttacttttttagctattgaagaagaatgactgtatcatgctgctgatttccccgtcttggctagacagtatgtcatcctttatctacattggtccctgtagtgaggatcatggagtagatgttgctgggagagtgagtatatgtgaaaaaaatgtgaaggtatttggtgctgatgaarcaatatgccctactgggcaggggagaggcacagaataagaattcttgccatgtggatgaactcattcaaacacaatgactgctttrtgagacaatagatagatttctacctcttctcacatgtacagagaaaatatttccaaagtctccggaatatttacatgtattactatttaatataaacttgcaagtctttttaaatgtgtttaaaactatcacagtactaaacatgaactagatgcataataaatgctgaaagtaaaaagcctgaattatttaagtgaaaagagaaaaagatttagatcccaaataaatgtatgcgtttgtgtgtttgtgtgtgtgcgcgcatgtttgctgggcatgtacttgtaaaaagtaaaataatagaaaagtattattcttggtacccagcattctaggaataatgtcttccacaagattattagaaaactctgctactttgtaggaggagctttggataactatgaataagtccctttacagacttaactttaaaaaaccatctgatttttctttaytttctttatttttattgtaaattgacatattttacttgcatacatttatgaggtatcaggtgttgttatgatttatgamtactatgtggaataattaaatgaaactaattaacgtattcaaatgataataaatataacagataacaggtaacaaatatttttttatggtgagaatatttgaaagttactttttcagcaattttgtaatgtacaatacactattattaaccatattcacaatgctgttcaatagatctcagaaaagcagaacaaaacttattcctcttgtctaactgaggttctgtaaactttcaccatcatctccccatttttctccacccaaacacggaagtatgtaaaaattctcagtgcttacaaagtttcatataccaatttttgtaatgatacttccccagaactcaatttgacagactgaagtatgtagataagacaaaaaaaaaaaaaaaaaacacacaaaccaatgaaaataaatatgtccttatttgcatgtttacaaatgagaattcagtgtttcctttctcaccagctacaaaagacttcagcctactgtgtataaggcacacagcatctggatgaagctcagctgagctgtctggggaaatacagagatttttatgaagagagctttaaacccagccattagcaaatctggatggttgctggtttaacattccctttttaaagggaatatattattgaattttcaagaatcagatatacatagcattttagatgaatgcattaaraagtcttcagcagtgatattagacattggggcatgctcttacaggcaatgggtggtgtcataaagagcatatttacattcgttttaattgtggaatttataattggaaatttaggaaatagtttcatagcactggtgaactgtattgactgggtcaagggwagaaagatctcttcggttgatcggatcctcactgctttggcaatctctcgaattagcctggtttggttaatattcggaagctggtgtgtgtctgtgtttttcccagctttatttgccactgaaaaaatgttcagaatgcttactaatatctggacagtgatcaatcattttagtgtctggttagctacaggcctcggtactttttattttctcaagatagccaatttttctaactctrtttttctctacctaaagtggagrgttaaaaaggtggttttggtgctgcttcttgtgacttcggtcttcttgtttttaaatattgcactgataaacatccatataaatgccagtatcaatggatacagaagaaacaagacttgcagttctgattcaagtaactttacaygattttccagtcttattgtattaaccagcactgtgttcattttcataccctttactttgtccctggcaatgtttcttctcytcatcttctccatgtggaaacatcgcaagaagatgcagcacactgtcaaaatatccggagacgccagcaccaaagcccacagaggagttaaaagtgtgatcactttcttcctactctatgccattttctctctgtcttttttcatatcagtttggacctctgaaaggttggaggaaaatctaattattctttcccaggtgatgggaatggcttatccttcatgtcactcatgtgttctgattcttggaaacaagaagctgagacaggcctctctgtcagtgctactgtggctgaggtacatgttcaaagatggggagccctcaggtcacaaagaatttagagaatcatcttgaatatattagaaaaaaaatagctcctaagaaattcttgtatgttatataaatttatacttccttaagattctttcattgtgtataactttgtgaattttacaaagatrtgcttggaatcaacaccatccaaacatatcacaaattaggatatatgaaagtatgtatattaccatacagagaagaatgcgaatactataaagagttcttatacaaacagataatatagattttgtatcaatcattcaccttttttgagatttttaaatgagaaaacctataatgtataaaatacatgtgtgtatgtatgtatgtgacacagttactaaaaataggcttcttaaacttacatctcaatctggtagataaagtacataaaagaatatggaattttagtacctatattaagtgtttttawtttttgtataatatttagtacctgattagcgtgtatgcaaaaaastaatttgcttcgtttgttgaattagaagccagctgccttactaaactaccacatttgctttgctcattctcttggctttgcagatagaaaattatatcatctgcatatagtgacttataatgattattttacttctccattttactacttgtaattcttttttggtatcagttgtataatgaaatggtttgaacattcaaagtgttaagtaatcctgatcgtaactgctgtctttgcaaatggagtgttttctagtgttttaacaataaacgtaatactgactctagctttgagataaattcttttaaaaatattmttcagggagaatatttgtttcctatcttcctgtgtatagtattgtaataaaatctctgttaaaaactatcaaattttttgctgtttattaagatgatcatattttccctctcctctgaccaattaaaataatgatacttgttaatggtggtacataaaacaatgacatgtcttctagtctatgcattctagatttaataaaatacaatatacatattcatacacacgcacgcacacacacacacasagagagagagagagagagagagagaaataaaattgcaaccttagaggcaaatgggaattcagaaagcagctgcaaggtagtgagaggtaatctccaaaaggggaagataatcccagtttgaataacatgaaaaattgtgtcaaagaactgtatgccagaagacagttgattcattttttcaagggctaaggaatgtaaccgtaatcctgaattctttgctaaaaatttgttctggggtttgaattaaataataacattcccctctccccttaaaaaaagatgagggctgtttactaaacatacstccttactgaaaatgctaataaccaatctgcttcagaaagactgttatggactgacttgtttgtctccaaaatccatgtgttgaagcccacactctcaatgtgactgtatttggatataaggcttttaagtaggtagttaaggttaaattaggccatacagtgaggccgyagtacaataggactggtgtctttataaaaagaggaagaaacaggcatctgtgggcacagagaaaacacaatgatgtatgattccatttatataccattctagaatatggaaagtaatctatagtgactgaaagcagatccatggttgcctggtaactgggggtttgataaagaatgggcagtggtaagttggaggaataacacaggaacataaaggaaagttttgggggtactatatatgtttgttacctgattatagtgatggtttcacatgtgatgagtatcacatggtgagacactcatgaaattgtacactttatatctgtacaacttattgcatgtcaagtatacctcaagtggcatattagaaacaaytcaggaggaaaactgcacataagtatgcattcttagaaagcttctctttgcaactttggaagaatcaaatattattatttcctattcttattttttgatcttagcctgggccttatgtttactggaataaaatatgtaggaattcttgttgtcttatctaccttactggtttgtcttccccagtagtaagtttttaagggaagaaagctgcaggggtgtgtgtatgtgtgtgggggcggggtggtgggagggataggagagcaatagcagagagctcctctgaagtgagttctagctttcctggagcctaggttctgcttcatcatcgaatgccccatgaaaattcagtttcagagcctactccattaccccattttcattcttgtaggaattggtgtgttcctcagattcagctcaatatcctggaagatgccaagcctgtaatgtccatcctacctctgcctgggtcatgtgttggcgctcctatccttgaaagttttttcttaaaatttcccatttttgcctgcttaactcctcaatctggatccctccaaattcgaggatcatatagacaacattacagatctttgctgatgtagtttattgctctctattgatttaaaaattttcttgaagaaataagaatatattgggatttaactccaccgtgttgtttagcaaacctatacttacttactttggagtaagatttaacagccatagaacagatgttgctcagcagaggtgtggggaagctgaataaaacccaacctttgataactctaggggagtgggtattactgagtagaggagaagtacaaaatgaggacaattcatgctctgcagatgttcctctgcattctcaatattgtccctatctggctttaacaaagaggctgctgtgtgggattaatatagagttctatcagttttcataagccctgtaaatggttctcaaatgttcctggatattttcagttaagtattagagaatatcaagggtaattatgtttttaaaatattttgatatataatattttttaatgtcaggataagcttaataaatattaatgaaggaagcaagaattaattattagaaaatcgaagattttgaatccatgtgatttcctgagccctatattcttattgccaaaaagacagcagtcattcctggacaataatcctataaggttattctgcaaagtgtgtgtatacgggaacttgcaaacaattaattgataaataaatgtaaattatcagcactcagcattcaggagttatggctcctctggattcattcagtaaatttcaatgctttgaattataagagctttggataaactatgaaaatatcccctcagtcttccctcagcattcctcagtggagatgattttagtgctcaatatactccatctactaatttacatatttgctatatgttatacttctatccattgaattttaatgcaattgataacaattaaaattaataagcaaattgtgaagagattagataaagcaaacatgcacaatgatgcagagaattgtctttatttgtttattaacaatgagaattcagttttttctttcatcatgaagtatgagaaatttcactttatgttaagaacatacagtatctggatcagaatgcagatagctgtctggggcaaaataatctttttgtgaaaaaagctatgtgcccattcattagtacaccttagtgctttctactttcatattgagcctatagttttttttttaaaggaagaaattaactgcacatccaattaataagtatgtataacaggtacatgtgatagatgaagaaattgtcagcgttgcatttagacattggagctctctctttgcagccatgctaaatgccttgtatagtatcctcattataataataaatatataattcctaattggaattttggggaatggattcataacactggtgaacggaattgactgggtcaagatgtgaaagagatcttcgaatcctcacagctttgactatctccagaatttgtctgatttcggtaataatggtgagatggtttatagaggagctgtagttatctttacagatgagcagaaagaaagccagagctgcaaactcttgtggtgaagagaatacatcactagggggaacccatccctgggaaagaagctgttcttaaaatcagaagtggaaataacttagagtaaaataatcagatgcttgctatcacaatggcattaaaaattcgaagactaggccttttggttcctttgtgaataatcattttcttattatatttactagctggtcattgtgtaatcacaaagattctttagaagttgaattaataaacggctattgtattaaattttattttaattacaatggttttccttcctttccttttttacctgagtagaatctcttgttattttctggacagaaaaacagatctgcatgtggtggtaattttastccttccatttgaatatatgtatctctgttatgtgcttgtttatctaatattaaataaaattattcacttyctaattatccacaacattgacaagctttttctttgtgccttttyattagataatttttcagggtgttgcagatacacrtaaggttagcagctactttgaggtacaccattttaatcatggtcagaaggctaatcaaaaaagtattttacaagaattgttttttaaaaaatatattaaatattatcaaagacaacgttggcatcttttgagatggtcatatttttttttcctctgctgacttcattatccaaaacaaataatgracattccttaacattcctrgaatcaagtctgcttggtcatttaactcatatatcactttaatttgttttaaattatttaaagtgagatttatagttattactgttagagtagtcatatcaaaaaattttttttcaagaacttggggtatttctcttcttttcagcattttgtataaatcagcatactaaaggactgcctgttaatgaggaatcttccatgaaggtgcttttgggaggagtgaattctctattaaatttcatcatattttacttagatattaactactataatgagtttaatatatttttaaggtcattttgtatataagtcactccatattgtrtatctgtaaaaactgtgttcagtttttcatgtttgcttttcagaatgtaggaaaaactcatcttttaaaacacttgtttaagctttacctgattactctgaagattatctgtttcccttattcttccagaattttcacaatcttttgccaattttattggattttcaagaagttattactgttagttcaaaatttatgaatcatttcttctcattcatttaatcttttaaattttcattaattcttatttctgttctcccaagtgtattttgtctctcttttttaattatttgagctcattgcttacttttttttcaatactcctggttgcattataaagtcatcaatttctaaaatgttttctgactattgtgtaaatcaagtcacatcaattttcacacgcaattgcccttcaaattatgctgccgccttgatgaaatccattcaggttttcttaagaatggtaagaatcataggcagggacagaactgatcagtgataaaataggggaaaataggtctagtggcttctggggaatacaggcatagaaccatactcactttcctagaaaacaaaataagttactctcaaacttgttaaagtttctctcagcttctgggactttctttcattggtcctgttttgcttacattcataagctgactagactatcaggaaatgacctgaaaataattgtgcaatttaaattcgagctaagaagacagagaaggaaagaaacagtggaactccttccccaggcagatgacttaataaggataaggaggaaagaagcttgctggaaacatcaaggagaaggggtcctggatgttcttacaatgtgaacatgggtctcagattccagagtcccaaacactcagaaggagatgctataatcagaaattgcaagctgattattttattggtatattgaagttagagcatgatcacattatgtttcaaggcatttgaaacactgtcatcttcttattcacttcctgaaaaagacaaggaagattataggcaagacttgacatggcaggaaatgtstaatacctcattggtttactgcggtgaggaagatgcaaaaccatccttttgccctctatcccttctacagcccccctccttaatatcattttctttgttcacactttctatgccattgcacgtaatgtgctttaaactgttgcttagatgaggacgaaaaacgattattgttaggttgttcatgctttgtggctgttggatacgttaagggttattttcagaaagatggggactgcaacatatcctgtaatagggacagtgtgaaagcagccttaatgttcagtgacaaggattggttaagtaaattayggaaaaaccaaacaatagcatcatatataattgtaaaaaaaaaaactaaccaataaacactgaagagatctaaataaactcatgtgaaagctaagaaataaatttttccaataagtaagacacagaactgaatataaagtgtggtattagtggtgggaaaattatatatagttatgtagcaataaatatttcaaagaggagtttccaaacagtaaaaagtgggagttttggtaagggtagaggggaggagaaatgaattgctatttagcttggtacatgtctattcagtgagattagtttttgttagcttaagcatgtatgactttaaatgtgaaatgtgttttaaaaaatgagataccatttaacagctaaaagtccaaggaccatttagcaggaatactggacttgaaatgctagtgtgaggcaggactgagcctgtcctgaacaaggagtgttcag

SEQ ID NO: 1629 - DNA, 12900 bp, Homo sapiens
tttaccaaaatgtttttaatgtaatacctgttattgaagtgctaccatttatttagaagtcaagttcaagacaaaaatggcaaggacgtgtggaaattgagaccggaacaaatgtgaaacaatgtgtggtgatgtctggtatgaccctgatggcagccacttcacagtgaggtgagagagacagcatgatggtcatcagatgcatgtacttggcttccagcacttttccagaagggctacaaggggaaaccacagctggcattagtccatggaagagagagaggagggagaatgtatctgctcatctgtcattagtcttctatttcctattggtcagggtttccttgaggcagaactatcatctctgctgttctgtcttacatcatccagtcccttggtggtggtcatgaaagtcagacctcatgcccacagtgtggtgatgcattcaagtcccaaatagaaggatgayctggatcaggcaaggtrctrgccaggggaatwggacatagtgaagagaatctragaaagcacatgtttgtgtccagtaccrccactccttgtgccactgaggcgtgctcataccctccagtcatggctggctttatgagcatatgacgtccacagttgcatagggttttgtgcttatagggacttgtgyttagagggactctatgcttggattaatrttctgcacttgctrttttgtttktcasacagaggatacttstctgctgaagagagaatgktcttrcactaattccatagggatttgctctccystctccaacaggcttgtcagagacatgcacagagtcctataatgaccactaygtatgttctagcatctttgaatcctgctggatcatctggcwcagtggccagagcagcttggagcagagtctatatcttctgtagagccctcatttgttctggattccacttgagaccagcagcctgggaaacttcrttaatgagtcagagcaatattctcaaatgtggaatatgttgtctccaaaatcccaataggcccccaaaacattgtgtctcttttgtagtgataggaaatttatagagagagcaacatgccatatactgtaaaaaagattgtttcaacgtgtggtctagggacactgaatgctttaaaacatcacctatgctgtaggtccctgaatsttctcaggttgrtttcttttcttctggtattttacttccattcatcgttagagtattttactatagttaagaaacttgccacttcctgattattgtaccaagtaatatattattattattattgctattattttgagacagggtctcattctgtccctgaggctggagttcagtggcaggatcacagctcattacagcctcaaccttctgggctcaagtrattcycccacctcygcattgctagcagctgggactgcaggggcacaacatcacgcctggctaatttttgtattttctgtagggctaggatttcacagtgttacccaggctggtctcaaaatcctgggctcaaatgatcttcccgtgtcggcctcctaaaatgatgggattacagtcatgtgccacagggcctggtctgtaatattattaatatattaaataatcacgatgttttaaaaaatgtaaattaaacagaagtgacatagccgtgatataaaacagtgacacagtgttattattatgatacaaggcaaattgttttgatttttcctcataatggktgtagattaagaaccattcagcaaatcacaagcccagtaaaaagtaccagaagctctgctctgcttagtgaagacagcacatcctggaaagcatttgtgagtgttgatttaagtttctggtagtctgyattcattctataacccgtctggttttgatagagkccagataggtttagtgaatcggcttatagaaaggactaccatcccctgtaactttcaagtgttttgtcacggcactgaccagttccattccttagggaatgcggttattatattttatatattttgttgccagtagaggagaatttcagaggcttccctttggtcctgctataataatgtcctttactctacagttcacgaagaatgtgagtcctgccggctgccatacatatctatttcaattatactttcaggaagaggtagtaactacaaactgattagctccaccttggaatggasatgagccgaagctctaggtagtatctgaccttcaaaaactccccctgcaggctggatgtgatggctcatgcctgcagtcctagcactttgggaggcgaaggtgggaggatcccttgagagcaggagttcccttcacaacatgtggaaactccgtctgtacaaaaaatttaaaaaattagctggtgtgttggtgcatgcctatagttccaaatacttgggaagctgaggcaggaggattgcttgagcgcaggagttccaggctgcagtggactatgatcctgccactgtactccagcttgggtaacagagggagactgtgtctcagaagaagaaaaaaaaacaagtataagttctcaccggtatcttaaacatcaagtaaaacagtatcgagtaaaacaaaaaactaaaaactccaaaagtcaaaaacacttttaaaaagaacatggtgttaagagtagtttgttcagtttccccatagaaaatgatttatggaaggagaataaaagattattctgaacactaaaacaataagactgaaaaaatgaattatcaatattgagaatccaatagacagagttaaccagttggatacagtacaagagagaataagtgaattggaagatagctacacagaatgaagcatagaagggaagagatggaaatacacagagctagagggtaacacattgatgctacagacagaacacctaacatacttctggagttctgtaagattagaggagagaaaatagagcaagagaaatgttgcaaggatttttccaaaaggtataaaatgtatccctgaatatatttttagtaatctcaaacttcaggcatgataactaaaaccaaattaacataaaataatacaggacrcaaaagaccaatagaaaatctgaaaagtagctagaggtagaagatagagyatgttgaaaagaactgtattctaaatacaacctgattttaacagaaaacatggaagcaggaattcaatggattaatgggaatcatgtcttcaatgtgtttccaaagagtagtagaccttcataaacagaaattgaaaatgatatttttcagataaaataaaattactgaaaatacaaagttgaacacgcaaggagcattacaaattaatgacaatccatgctggctaacacggtgaaaccccgtctctactaaaaataaaaaawaattagcctggcstggtggcgggcacctgcagtcccagctactccggaggctgaggcaggagaatggctaaacccggaagrcggagctttcagtgagcagagatcgtgccactgcactccagcctgggtgacagggagactatgtctcaaaaaaaaaaaaaaaaattaatgacaatgaaaactaagtgtgtaattctaaataaatkttgactatataaaacaatagtgtcttcktggattgaatgtataattgataagatatatgcaaatagcaataaagaggctggagataaaggtaacaggaataaatttagtcaaactgtgttttgggcttttctatgtctgtgagaagaatttgaacatcataatcaaggaccctgtaattctacamccagatatatatacacagaggaattgtagcaaatgatatgtgaaagaatgttcattgtagcattattcataaaagctcaaaaaataagctgtccaaatatatatcaaataaggatggataaataattacagtaaaatcaaaaaatgaaaaaaatatagagaagtgaaaagawatggatcacatgtacatgcaatgatggggttaaattttggatacaaaatgttgattccaggaagccatgaataagaacatataggattgcacctatacatagatcaaatcaggccaaaccaagctattgagtttagggtcgaataccttattggtaaagtataaagaatattaaaaaaagaccatcataaattagggatgttgcttatcacaggagacatgaagaaaggtgtagggaattagaaagtggcattgaggtaaacttaggctcttagcaatgttccatgtcttgccctacatgatggttacatgagtgtttatgacacattgctatgttttccatttttgttttggttcatttctaagtgtgcagtctagctatatgataaaaattattaattagsagaaatggtccatgaaaattattattactctgctcattatatactgaagggaaaaatcmactatttgtatacattcatgtgtaactctaagagattttaagtagaaactttctgattttagttgcaactttaggaaacttgacatgatgttacctgccaaccacagatttctgaataggtttttcttttaggtttaattacccacttcatatgacaaaacttggacattctctattttttccttcgatcctgaattcctgacacaacaatggtgggcatatttcccacactcctgatttagcagaatacctacatcacttatgtttttctgcaagagaaaactgagttagataattgtgtatcattatgtctttggattacatttttctaacctaggtttggtggatggctctggtgattggagatgggccacgtactgcatcttgccgctagtttggctgatttagggtagataaggcagtggcattctgactccattagtttctctttcttcttctgggaacagtgtgctagccagatgatgtcctcatggttagtggaaaagagcaggaaacttcaatatggaagccatcttaaatctctgtaaattctactaatttcctgttgactgaagcaaattacgtgagtgaattcagagtccaaggtcaaggtagtcaccctgcctgaggtgggagggtactgcaggattatgtgacaaagagtagggtacttagaaatatttacaaaattgctgaacattttaattaaataattaatgtttaaacaaaacagacttgagtgtaaatataccaaaggcctaagcttgagaaacatgtttgataaatattattcattgtctgacagccctgagttggaaaataagactaataccacctggatgagttcctggaaactcattttccatttggggaattataagaaaataattccttccatgccctaagggtgtgagtgcatgtgtgtctatgtgtttaggagcttattaacaatgatgtcatatcaatttattggttatcagaaaccagattttaaagtgtatcagcctcccagggatttccaagataatcttggatgattttgataaaaggtttagaatctggtatttaaatctggcataaaaataagtccatattggtatgatcctagttatgaccaagctcctttaacaatttagacatttactatatgatatatgtattgggttttacaatttccctatggaacaactgaagatgctgtatacaaattatggagaggttaaacaaggaaaaaaattgcaaaacaatgaaaaataatatgcctttctttgcatactaacacatgagaattcattttccactkcaacctcagtataaaaaagtacagcatatagcaaggagagaatstatatgaagaggagtgaatttgagctgttttgagaataatgaccttttctatttctataaagacagttttgaattcatctattagcatatgctggtgcttgcctgttgacactagtcactgaatttaaaggcagaaaatgttattgcacatttagtaatcaagtgttcatcgaagttaacatctggatgttaaaggactcagaacaagtgttactaagcctgcatttttttatctgttcaaacatgatgtgttttctgctcatcatttcatcaattctggtagtgtttgcatttgttcttggaaatgttgccaatggcttcatagcyctagtaaatgtcattgactgggttaacacacgaaagatctcctcagctgagcaaattctcactgctctggtggtctccagaattggtttactctgggtcatgttattcctttggtatgcaactgtgtttaattctgctttatatggtttagaagtaagaattgttgcttctaatgcctgggctgtaacgaaccatttcagcatgtggcttgctgctagcctcagcatattttrtttgctcaagattgccaatttctccaaccttatttctctccacctaaagaagagaattmagagtgttgttctggtgatactgttggggcccttggtatttytgatttgtaatcttgctgtgataaccatggatgagagagtgtggacaaaagaatatgaaggaaatgtgacttggaagatcaaattgaggaatgcaatacacctttcaagcttgactgtaactactctagcaaacctcataccctttactctgagcctaatatgttttctgctgttaatctgttctctttgtaaacatctcaagaagatgcggctccatagcaaaggatctcaagatcccagcaccaaggtccatataaaagctttgcaaactgtgacctccttcctcatgttatttgccatttactttctgtgtataatcacatcaacttggaatcttaggacacagcagagcaaacttgtactcctgctttgccaaactgttgcaatcatgtatccttcattccactcattcatcctgattatgggaagtaggaagctaaaacagacctttctttcagttttgtggcagatgacaygctgagtgaaagaagagaaaccctcaactccatagattcacaaggggagcatcgtgggtcttctagcagaaaacaaactgatggtgtctggaacattttatatttctatcagtttttccatagtgtttgtatgtgagtaatttcaaaacagatacctagaaaagtcatatatatatttatgggtgtatatgtgtgcatgtgtgtgaataacaacgttgaccataaattatgaagctgagtatatttcacatatatagtatttatattttattatagttcattgtatagtatttcatttgaagaatttattatctctctttataattaagaacgtacagcttttatgaagaaatcatttctcttttccattgtaatttgtaccacatatatgtgcttaactatcattggtgaacctctaattttttggatggtaaagacattcaattttaaatcaatgataagaatggatctttggggtaggttttatttcattatgaattcttattttatgcttagtagaaagcaaatagaattgttgttagttaatgatgcacacaataaaattggagtgaaaaacatatgtagagtaaattttgtatatgtataccaaaacagtactaaagaatactagatttaataccagtatgtgaatagcctagaataaaaatcatttctataataggaatgaagaaacatgctgatgatcatttcagtgctgttataatttttttatctgtagttagaaaagtcattgcttccactttttgaattaaaggaaaccttttktgaagttgacatctgatgtcaagtatttccatttrtttttcttagccaccttgagcccctgaatttccaattttctcctttgtctcccattcctaatattcctcaaaaaaactcaaatattctctatcttaaaaaaacaggccaatcaaaggagggtatagaaactatagaagataatcaaatgaaactttcctcaaatgttaaaaattatgtaaaaattacataaaaatctgtgaaatctatataattgataggaaatgtattaatgatatgtattattataatggtgtaaatggtgaaattacacagtgtgttgatgtatccattgataccaagttctattataagaaggaaatgtacagccttgttgaagagctaaattctgtgtgactgtgttaattcttggtgttatgaaattttaacattattatgtagaacttaaaataagttaactccacatcatatatatatctatgtatctatatctatatctatagacatatatayatatatatatatawctmtygcttatcatacgtcctccctagtacaatgtaatcaccataaaaagagaggtcatatctgtctcgctttctcttgactcacaggacctaaaagccagcacaaagaatagttggtcaaaaatgatatgttaatgaacacataagtgattggataaatggataatttgatgtggtaaatcagtgaaaatgaagctcatcataaaatctgcagttgcttgaattttctattttcaggttgaggttataggctttttgaagaagaagcatttctcagagcaaaagtttggctagtccacaattctaggggaaatatcactgtaatatagctttgatgcagctatatcaggtgtgtgaagtagagacaaggtggaacgtcaaaattagatggcacttattctaatgctttttgaaaagcatattaaagattttggtatatttgcacagggtcagggtcacctgtgagtgccagctgctcggggctagcagaccccatgacaagaatgttagggaacttcccagcagctkccaaacacacttttgtttttagggaacgtctctttctccttcagtatgacttatgctgccttcaatgctttgctgatacaaaagaagtaaactcaaaagaagtaaaaataaaagctagcaaactttgcaactgattaagttggttggaaatgtacctaatcactttctactatgaatgatatatttgtattatgatattttctagctggttatcatatacacaaaaaggcatttcatttttaaaaattgagtttgtaaccagtcacctttcttacacattatttgtatatttttttagtatcctttctaaatgaatgttttaattgccatgttayaaacrcatggaaaagtgatgcaactgaatgtatatcttagctttkggtgtctaaaactagagccaatgtctgagtttacagtgatgacatttatttgggarggcaagtccagggcagcaatgaggggtaaatgtggaaactgaggcaaaagaagatgtaaaaccatgtgtcgtgatgttgatatgattttgctggtggccacttcacaattagtgagacagacagcatggtggtcatcagatgcatgcacttggctcyccatacttttccagaagggttacaaggggaagccacaacaaatattagtccgtggaagagagaaaagggagaatgtatcctagctgtcttctgtcttctatttccctttggccaaagtttgtttgaggcagaactaccatctttgcttttcttccttacattatccaaccccttggtggctgtttgggaaagtcacactaaccaatacccccatttttctaagagatagtttttttttaatttattttttctcttttcctctcccctttccctatgtttcccygctttctacttaactttttagacatgcacatagaactgtttactttccccccaccagacagtcccttcgggcgagttcatctaactatgtgctccacgagggatctctccttgagacttgacagttgatttgcagacaaaagtatgccctcatggaactctcacctccaggggttccccttagacctcacatccattaggaggggatgtggaaaggatgcccacgtggccacttttacaactgctgtcctgctcatttccttccctactttataaaacgttcactttctgctccaaagatgaagtgtcacgttggaaggcaggatgctttgtgccccttccagcaagctaacttccaaataaattctctatttttatatcagaccttgttcttgttaattagactttacatgaagtgagcaactaagcttttctgttacaagacttcatgcccacagatacattcaagtcccaggtggaaggatgatctrgatyaggcaaggtgctgaccatgggaacaggagacagtcaagggaatctgaggaagcacatgtttgtgtccaatatagtcccctccttgtgccactcagatgtgctcatgccctccaactgtggctggttttataagcagatgccttgtgtagttgcacggggtcttgtgcttgaggggctttttgcttggattaatgttctgcacttgcatttttatttttcagacagcggatamtcctccactgaagagggaatagttctgcagtaattccctaggggtttgctttctcctctcctacgggcttgatggagacaggcacagagtcctrtgatgcccacgttgcatgcctctagcagctttgaattctgctggatcatctggcacaatgggccgagcaggttgggccagaccctgtatctgctgtagagatattatatgttctggattccacttgaaaccaggagtctttgcattcattctgtaacccatctggttttggcagaggctaggtaggttaactgaacagggatttaaaaaggactttattaacacatcagagcaatatcctctactgtggtatttttggactccaaaatccctagaggctcaataaacgccgtgcttctcttttagtgataggaagtatataggaagccatttaccttaaacaggatgtttctgctcggcatggtggttcacgcctgtaataccagcactttgggagaccaacgcaggcagatcactggaggccaggagtttgagactagcctgagcaacatggtgaaaccccatctctacttaaaaaaaaatacaaaaaaakttagccaggcatggtggccaatgcccgtaaacccagctactcaggaggctgaaggatttgaattgattgaacccaggaggcgaagtttgcagtgagccrggattgcaacactgcattccggcctgggcaacagagcgagactctatctcaaatataaatwaatwaattaattaattgatttttcaacatgtggaccaggaatatgggayccctgaaaacaatatctgcgttggtgttctctaaatattttcaggcatgtctctttcttctgatattttatttctatttaatgtttaagtattttactataattaggtaactttccatttcctggttattgtaccaattaccgtaacrttattaatatattaaattaacatgatgttttccaaaatgtaaattaaactgagagcagaagtgacaaagccctgacataaaacagtgaagcagtgctcttgtttttaccacacaaaggccaattgttttaatctgctgacccacccatgggtgtaaaataagaaacattcactaaatcaagagccacatgcaaactgccaggagctctgctctgctcagggaagataccacatcctagagagcatttgtaagtagtgatttaaatttatggaaatctgcattcattttatagtgtatctggttttggtagaggccagataggttaagtggataggcatataaaaagactaccatcccctgcaactttcaagtgttttgtcatggtagtgatcaattccattccttggagaatgtgattattatttttcaatcattgttgccagtggaggagaatttcacaggcttccccttggttctgctctaataatgtccctgactctacaggtcaggaagaaagtgagagtcctgccagctgccatgtgtgtccattacacattcaagaagaggcaataacggcaaactgattagatccaccttggkatggacatgagtcaaaactctaggtagcatctgaccttcaaaactccctctgcaggctgggtatgatggctcatgcccgcagtccccgcacttttggaggcggaggtggraatatctcttgaggcccagagttgcagaccaccttgggctacacagtgacagcctgtctgtacaaaaactaaaaaacagaaaaaacaacaacaaaaaattagtttggcatggtggtactcacctgtagtcccagttacccagaaagatgagacaggagactcctttggacctataaccaatatgcgagtccgttgctggccgcatgcagtgtccagttaacaaaagtgaggtctggtacaaaagtaatgaatttattccaaacctagcttggggaaggagcacaaagtgtcttgcctttaagtgtaccacttcacctttggagcagaaagcagacacttttataaggtaaggagggatactgagcaagggtagagggtcctcatgcaggcttggtgccttatctatcagacagttgaattggtgccttcctgtgcagaagtaacttgtaaaagtggccaagtgggtatgctttcaatatgcccttctgttgggtgaaagtcctcaggcaactcccagagtggagcacagtctggaagttccaagtccatttcctggaggtaaacattccttggtgggtgtgctttggtctgcaaattgactgtcaattctcagaagagatctgtcttgctgcacatagttagaagaacgtgccctgcagggaatgtctagtgagtgggggtgaaaggttatatttgcatttatgaagggctaagcaggaaacagggaacaaaaggaaaggggagataagagaaaataataataaaaaaatagtaactcattccctgtttcttagaaaaaatggggcactctgttacaaacccaggaattcaaggctgtagtgagttatgatttgccactgtactacatacctcctaagtgaaggattgagactgtgtatctaaaaaacccaaatg

SEQ ID NO: 1630 - DNA, 13381 bp, Homo sapiens
gggacatgtttacaaagaatatatatgaaaaggaaagtgaataaatttgatttacatggatagcatagtaatatatacagatataatagtaattattaacatcaaaaacattcaatataatcacatttatatgaaatttgcaagaatatttttgtatttttgcaaataaattcttataattgcttataaaagaaattataaattcttataactccttaccaaagaaattataacattttataaaagaaattataacttctcataaaagraattttattttaagtttttataattcttataatttgaaataaattcttataatttattacattggtggcaaaactgtaaagcraaacatataagtgattatcataactgggatacttgggagggaggaaacaaaagggaaatcatatcaacaagaaagcmtatatggggaatgtcttcattgctggcaaattctactttttgacgaaagtgtggaatatgagtgttaatgttacattcttttttccttttactgtgcatttaggttttattgctttccctacatatgttaggttcccgaataatgaaaatattttaaaagcagaaatattaagtaaattaatgaatataaaactaggctgaaacaatatattcttacatgtaccatcgtaattagagttttgctgaataaagaatacagcattatagtagtaagaaatagggataaaattttatacttttaaaaattaatttaaaaaagaaagatataagcaggaagtgtacatccacattcttaatgctaatcttaatttgaaacaatagattttgaacaactatattgcaatagacttttttcttgtttccaatttaattattcatgatacacgtttcaaattggcagcaattagggaatttttcataaggtacaaatattaaagtatgtaggactatagatattaagtgtataggacaatttttgctacatttatccctaaatgaaataattatactcatgttgttcccattcaaagatcacaatactatgcatgtgcacagcatatgtgttggggaaaatattttgttactataaatttttcaactgtattagagaagaaaacatagaaagataactgttaagctataaaacatatttagtgtaatctttgagtgtgcttgtgtatatgtagtattactttgactgctatagtaaaataacccagatttagtgacagtagctgagattgtaaataagcagttgagagaattttgcctgctaatgatactattaaaagataaaatacagtttgtatgctatataattgtatagaggatttgtatatatgaagttcatatgaaagtacagtgaaaattaaacagcccaaaggagaatactctttgttgtagggcacttttgtcatgattttcagaatgtggtaaaagaaaaaaaaatagccagtaaatcattggaaatacattggttttaacttattcttaatgaaatactgtctgaggatctttgtctgtgcctgatgctgaraataatataagaaacaagttcatgagcccatcaccctgaaacgyagcacttagaaaacatgattgaagtcacatttatagaagagcatggccccttttaactgacattatcatcatcaccaatcatcatctatatctatctcattaaatgatttatttttgaaatgtttacataaataatttggataatgtctaataaatgtttaaaagattattattatgggaaagttagattagaaaatggaaaatttcaagttgaaccaaatacatttttaagtatagtttagtttaaaatacattgcttaagcaaatcattatagataaccttaaactgatcttaggaacactataggaaagatttagttgcggtgttaataaaattccttaattagaaagataaataagccacttcatgatcaagctcttacttctaaagtgaaggttttattttatttattttttaacctttccacattttattgacaaagaattaatagtataaattacgtttatattgcaaagtttatttatggaaatttgatacgtgtacttctactcctttttacaccttacatgaatatttaaataattgatttataacactccctgatgccaggtaaagtaaagcctaatcgcagttcagaaactcacatgtacaacaaatttaactttctggatatttttaaaactcagcttaatttccctaggtgctccrttaacctgatggcagaaattaaatcttaagcaactctgggttctcccacaagcacactttgcttcagagttgtgytgaagttttgaggaggatgggaggaggcaaggaggtgtccagtcctttgtgcatctatcccctggcattctcccatcctgccccaagtcatcagcccacacaggttgctggcacatytaaagtgagaattttaggactaaataaatcaaatagaagtaagccctcacatcttctatatctcacctgatagtgaagaagtttgaaggtacagagctccacttctgctaataaaaaaagagtaaaatttaatttgtaaaatagaatggtgtagctagggttgaggtgctataatttatttattggaatggcatcttgagatccagcacagctcattgaatttccctgtggggagagtttgtggtgaagrctcatcaacagacaagctgctatccccmccyaaaaaaaaaarctactaacatcacatcaatttccaggttcttccaacttgcggaaggatgtgtagaccaagcttttattctattttgtgaccaaagtcttgggaaaagaagaaaattgttagcattttcatgtcaagcatacgaaaaacaaaaaaacaaagccaaccaactgaacaaagaacccaactttttttaaaaaacttggtgrtaagagtrctttgttctgcttctccatagataatgatttatagaaggagaacaaaatataatttctgctactaaaacaataatagcaaaaaataaataatcaatattgagaatccaatagacagagttaacaaccagttagacatagaagagagaattagtgaattggaagacaactataaagaaagaagcctaaagagaccacaagacaaagaatgccaagctaagaggataagaggcattgatgctacaatcagagcatctaacatacttctggatttctggaagattaaaagggataaaatagggcagaatcaatgttgtggagattttcccaaaagtgataaaakgtattaatccatatatttttagtaaccatcaaaggtcagacaagataactaaaaacaaattaacataaaatgtcacaagacatcaaagaccagtagaaaatctgaaaagtagccagaggaaaagatagattattttaaaaggaacaactttctaaatgacaacctgattttcaacagaaaaatggaaagtagaattcaatggaatcatgtctttagtgtgtttcaaaagaatagaggaccttcataaacagaaatccaaatgatatttttcagataaaaaatattgaaaatacaaggttaagcatgcaagaaggaataaaaattaacagaaatgataaatatgtgcataattctaaatgaatgttgactgaataaaataatagcgtcttgctgagttaaatatattattgataagatatatgcaaatagcrataaagagactggaggtaaaggtgacaggaacaaatttagataaattattttttgcacttttctatgtctgtgaggataatttgaacaccacatttaatgaccccataataggaattgcatcaaatgatatgtgaaataatgctgatagtagtattattcataatagctcaaaaatagactgcccaaatatatattaactaaggatgattgaatgatatgaaagattacagtaaatccatacagtggaacagtatatagaggtgaaaagaaatgaatcacatgtacatgcaactatgtaactaaatttcagaaacatgatatctagtgcaagaagccatgaacaagaagaacacacaggactgcacctatacacagttcaaagcaggacagaccaagctgtggagtttagggttgtgaacctagytggtaaagtataaagaaattcaagcaaatgatcatcatagattatgaatattgcttatctcaggagatgtgaataaaggtttaggggcttggaaagtggcctggaagtggacctagtctgtttgcagtgttccatgtcttatcctgcatratggttacataagtgtttatgatacattgctcttacctatttttgttttggcccatttctaagtgtgcattataattttatttaaaaaattacaaattgggagaaatgtcacgtaaaaattattaattgctctgctcattatatacctagggggaaaatccaccatttacrtacattcttatacaactcaagagagctaaagtgaattcttattttagttgcaaaatggagaaatttgagatgctgttacctacagcctccagatctttccaaaagttttcttctagttttagatattcacctcatattacaaaaactttgatatttccaacctatttttcctttggctcctgaatttctgacacaacaagggygcacatatttctcaaactcttggattagcagagtacctatatcacttagctttttctgcaaaagaaacttctccaaaaccacattagatatttatatctcacatgtttttggattctgttttcttaagctggggtttggtggatggctctggtgatttgagatggtccaagttttgcctcttggatctagttagagtttggccgatttaaggctggatcaggcaggrgccatatgattccatgagttactcattcttattctgggaacagtgtgttagtgtggacatgttctcattataaaccggaaaggaacaagaaagcctaatgtggaggtcatctcaaatttcgatgtaaagtgtagtaattttctgttcatcaaagcaaattacatgatcgaactcagagccctagtgcaaggttgtcactatgcctgtggtgggaggacactgcaaaattatgtgacaaaggtctggtactcaggaatgtttacaagcttgcaggtagcattaccaaaagcctaagcatgagagatatgtttcatgaatattattcattggctgaaaatctggcatgggaaaaataggactaattccaccaggacgagctcctggawactcattttccatgtcataagttacaagaaagcaattccttycatccttgaagagtgaaagtgtgtgtgtgtctgtgtgtgtgtttatgagcttgttaatagtgatgccatatagaagtattggttaacagcaaccaaattataaggagtattggctttcctgtggtttccaagaaaatcttrggtgattttgataaaaagtttagattytgtgtatttaaatctggctttaaaaataaatccrtagtgattttgatcctagatttcaccaggctcttttaacaatatattttttgtgtcatctatgtactgggtattaaaatttcccyaacaactgaagggctgaacacaaattatggaaaggtgaaacaaggaaaaaattgcaaagcaatgaaagaggatatgtctttatttgaatgctagcaaatgagaattcagctttcccttcaacatcagtatgaaaaatttcagcctatagcaagaatagagactttatgaataagaattaatttgagttgttttgggactaacagtatttcccataaaggcagcattgaactcattcattagtttaagctggtgcttttctgttgacattgttcacagaatttaaaagtataaagaatgttattgracattcaggaatcaagtgcatatttaayttaaagtcttgaatatcagaggagtcaccatcagtgacattaggcctgaattttttacttgcttttttgtttagacatgatgagttttctacacattgttttttccattctagtagtggttgcatttattcttggaaattttgccaatggctttatagcactgataaatttcattgcctgggtcaagagacaaaagatctcctcagctgatcaaattattgctgctctggcrgtctccagagttggtttgctctgggtaatattattacattggtattcaactgtgttgaatccaacttcatctaatttaraagtaataatttttatttctaatgcytgggcagtaaccaatcatttcagcatctggcttgctactagcctcagcatattttatttgctcaagatcgtcaatttctccagacttatttttcatcacttaaaaaggaaggctaagagtgtagttctggtgatagtgttggggtctttgttctttttggtttgtcamcttgtgatgaaamacacgtatataaatgtgtggacagaagaatgtgaaggaaacgtaacttggaagatcaaactgaggaatgcaatgcacctttccaacttgactgtagccatgctagcaaacttgataccattcactctgaccctgatatcttttctgctgttaatctactctctgtgtaaacatctgaagaagatgcagctccatggcaaaggatctcaagatcccagcaccaagatccacataaaagctctgcaaactgtgacctccttcctcrtattacttgccatttactttctgtgtctaatcatatcgttttggaattytaagatgckaccaaaagaaattgtcttaatgctttgccaagcttttggaatcatatatccatcattccactcattcattctgatttgggggaacaagacgctaaagcagacctttctttcagttttgtggcaggtgacttgctgggcaaaaggacagaaccagtcaactccatagattcacaagaggygcattgtgtgttttctagcagaaaacaaattgatggtgtctggaacattttatatttcccacaagtttttccgtagtctatgtatttgagtaatttccaaaagttgacatagaaaagtcttttacctaagtttattatataaaagtatatatatataatatacatttgcgtgtgtgtgtatgtctgaatgtatatgaaaatttaatatttaccataacatacctttaatcaacttttcatataaactgttcagttataccaaagtaggataagaaatttctcagaattatgaacccatgtgtatttcacacatttttttatatgatatttcatttgaggaatttatgatctctatttataattaagaactgacagcttatatcagaaaatcattgctgtttttcgttgtaaaatcattgctgtttttcgttgtaatttgtatcacgtatatgtaccatagtgtgtttaactgtttaactatcattgtttgaacctctaattttttggatggtaaggacatttaattctaaatcgatgagaatgtgtctttggggtaggtttttttgttttttttttaatcatgaattctttttttcttttttttgagatggagtcttgccctgttgtccaggctggaatgcagtagcacaatcttggctcaccacaacgttcacctctggggttcaagtgatttccatgcgtcagcctcctgagtggctgggactccaggcatgcgctaccacacgtggctaattttttgtatttttctttttttttttagtagagatggggtttcaccatgctggccaggctggtctcgaactcttgacctcaagtgatccactgcctcagcctcccaaagtgctgggattatagacattcatgatgaattcttattttatgtttaatataaagcaaatacaattattgttagataacaatgcacaaaataaaattcaagggtgaaaaatatatctagtgtacatttttatgtgtatcaaaagcaatactgaggaatattatatttaatatagtatgttaatagcttagaaaaaatcatttctataaaaaggatgaagaaacatgatcatgagctcttttcagtgctgttataagtttccatacgcaattagaaaagtcatctcttccagtttttgaattaaacaaaaacctttttgaagttgagatctgatgttatatatttcagttttttgtctaagccacctctgagctcctgaattgtcaatttcctcctttatcttccatccttaaaattcctcaaaaagctcaaattttccttactttaaaaagaagctcaatctaaagagggtatagaaactatggcatctatgaaatctatatattaatgataggaratgtcttaaagatrtgttttattataatcttggtgtaaataatgaaatgagagaaagtgtgttgacatattcactaatagcaagttctattacaagaagaaaatgtataacctagttcaacagctaaattctgtgtgactgtattaatttctggtgttatgcaattttaacaatattatctaaaccttaagataaatcatctccacatctgatttgtttgtttatcatatatcttacctggtacaatgtaaataccataaaagtagagatcatatagatcttgcttactgtagactcccargacataaagatagcacatagaataggtattgaaaaatgatactttgatgaacaagttaattggtgaatgaatgaatatgaactatattggggtggtgaaccaatgaaaatgtaacacatcacaaaatctacagttgggtgcacatttctgttctggtttcagattgaagttacaggattatccaagaagaagaaraatttctcagagcaaaagtttggctattccacaattctaggggaaatrtcactataatatagcagtgatgcagctataycagatgtgtgacacaaagacaaagtggaaaataaaaagatggcatttattacaatactttttactaagcatataaaagatttttgtataagtgcacatatcttttctattgcgaaygatatatttatattgtggtatttctagctggttattatataaacaaaaatgacatttcatttaaaaaatttagttaccaactatcttactaaaatataatctttatttagtatttttaatatcctttctaaatgaccactttaatcaccatattataaactgatggaaaaatgaatgaataataattataacactgaatgaatatcttatcaggggtctagaagtagagcaaatgtctgatattaaagtgatgacatttatttggaaggaggtccactgcagaaatggctgggacatgtggaaattgagtcaagagaagatgtgacactatgtgctgtaatgtgtgatatgactctgctgacgaccacttcacaatgatgtgagagagacagcatggtggttatcagatgcatgcacttggctcccaggactttttcagaagggctgcgagaggacaacacagccagcatyagcccatggaagcaacagaggacggagaatatatctgctcagctgtcttctgtcttctatttcccactggccagggtttccctgaggcagaactaccatctctgctgttctgctttccatcatccaatcymttgatggaggttatgaaagtcagacctcatgcccacaatgtggtgatccattcaagtcccaaatggaagggtgatgtgggtcaggcaaggtgctgaccaggggaataggagacagtcaagtaaatctgaggaagcacatgtttgtgtcccatgcagtccactccttgtkccattcagatgtgctcatgccctccaatcatggctgactatgagcatataatttccactgttgcacagggtcttgtgcttagagacgcacacgcttaraagggctttatacatgggttaattttctgcacctgctgttttgtttttgagacagagggcactcctctgctaaagagggaatggtcttgcactaattggctaggggtttgctctcccctctcctgtgggcttgtgagaagcatgcacagagtcttataatgcccactatgcatgcatgcctctagcgggtttgaattctgctggattatctgtcacaatgagcacagcagcttggactagagcctacatttgctagaggcattttttgttctagttccacttgagaccagtagcctttggcaacttcattagtgaatcagagcagtatcctcaaatgtggaatacgttggctcccaaatcccagtaggcccaacaaatattgtgtctcatttttagtgacaggaaatagatgtatagagagcaacatgctgtttactttaaaagggtgtttcagcatgtggactaggagcactggacccctaaaatcatcatctatgttataggtcactgaatcttcttgttcatctttcttcttctggtatttagttctgttcaatgttatggtattttactatatttgagaaactcatcacttcctgcttatgggtaacagttaatgcaatattattaatatattgagttagcatgatgttttgcaaaatgccaattaaaytgaaaacagaagtgasrtagccatgacataaaacagtgaagcagtgcttttgttcttacctcaccaaaacaaatcattttgattttctctcccaaysgatgtagattaaaaagcattcaccaaatcaaacgcctcatacaaagaaccagaaaccatgttttctcagtgaaggtaccacatcctagagagcatctgcaagtgtgatttaagtttatgctaatgtgcattcatctgataatccatctggctttggcagaagccagataggttaacwgaatagggatcaaaaatggacaaccacctcctggaacttttgagttttttgtcatgtcggtgaccaattctattccttggacaatgcggttagtatgttttactcattttcttgccagaagaggagaattwccgaggactctttttggtcctacttacagtaatgtcccttaatatacaggtctgraagcaatgtgagagttctgctagctgttgaaactgttaatttcatttaacattctggaagagataataaatataaacccattacatccaccttaggttgaacatgagccaaagctttatgcagcatctgactttcaaaaactcatactccaggmctggtgaggtggctcacacctgtaatccaaacaatttgggaggctgaggtgggaggagcacttgaggccaggagttscagatcagcctgggcaagacagcaagaccctgtttgttaawgaaaataaactgattgtagtactgcgtgcctgtagttccaactacccaggaagttctggcagggggatcagtttagcccaggaatttgagtctgcagtaagctatgattgtgccatttcactmcagcctgggctgcactctagcctgggcaaccaaacaagactctgtctctaaaaacaaaaaaaaacgaacaaccraaaacaaagcctcccactccattctgtgaaacacagtgtctttttttagttctcaaatattattagtgttagttcaggccccatgtttaaaattctgagagtatggatatatgtcctttcctctgggtactgttatggctacaggtgaaatggctacaggtgcttgagaaagggtcaagtgaatatttcctgaatatttttgtggtgaatcttcagtgttgtttaccgagggcatgtaagctttccttcaatcattgaactctgcttctctgaactggctcagtccagagaactggctaagggtttttgattttcaatgtcaaaggctgacctcaggagtcagcttttgcaactcttgtcccctcttggtttataattatttagcaaagtatgaggcctcttcaactatyggtcyatcaacccatttaaatgaggctgttactgtcaccactccattaaatctgacatttgcaagatcaccgataagtctgtgttgccaatggttagttttcatgttgcatgctctatgagcagcactgaacstrgtttatttgcatttcaggatgctgccctctcctgattttatccttgttcactggcacaatttcttagtctcctttgctagttcttcctcttgtctgtaaactgaaaatatcagattgcccaaggtctaaattcttcaatctctaatcaattatgtctggtttttttggtgatctcatgcagtctccttacagataatgtagccacatggttcaatagagaggaataaggctgattattcatatatgttatttatttatatacatatagttacatatatcaaattatrtaaccctttttttcaaatgtcaaagttacatttaaaagtmacaatactaaaaatctrtggagaaggtyggagcatcaataatgtttttacttgaatttctgctaaatcagagtgatggtgaccagatagctaattaagttttatttaaaatagccatgtagattgataggcaggggattatcattatagaaaaaaatgatataagtaaggaaatatacagatagaataatgattgattaacccattttgacttattgtacttggtacagttaatgtcttagtatctcagtaatctstttttatatttttctctatgatcaattaattatgagttaatttttatatatggtatgaaataatrgtctacactcatgtttttatcattctgtttttactcccacttcttaggtaagttcatctagtcataaccttagttactttctgtgtgctgttgatgccaatatttaattcttcagctcagaagtcaaycctggtctctagaatcctttctctaagaagtcatttgacatcttcatttggatgtcktaacaagaacttgaactaacatgtccaaatcaaaatagtgatcttccctctagtctccagmgttgtttcttctatagcctttccctcttctgttaatgaccacttcagtctttcagatgcttagaccaaaaacacggagttaacattttctctctttcagaactcatctctaaggcatcagcaaattttgttggttctaccctcttgttggttctaccctcaaaaacatacagaatccaatcccttgtcatcacttttgccatactcatctaaactgctgccatacctagccaagataattgccatcaactcctaattattctttctagttctgcacatcattttctcctgatgtactctcaagrtagcagccaaagagagcctatgaagatkcaaatttgatcatgccattcttcagctttagatttttcagtggcttctcatctcattagagtaaggccaaaatccttacaaagtcctataatcatttgaatgatcggattttgtctgcctgtctgtcct

SEQ ID NO: 1631 - DNA, 12903 bp, Homo sapiens
aggatctatccatagtgaaaaacattcattttaattccatttatataaagttttcaaaaatatatctttaatacattgcaatttattacattggtgacaaaactctaaagtgaaacatatgagtgactattacaacaatatggatagtagggaggaggaaaacaagaggagaatgggatcaacagaaggcatatatggggagtgtctggatggctggaaaattcyattttttgaccaagatgtggtaaacacggggagtaaagttataaytttttctcttactgtgcttttaggttttgttgctttctgtctgtatgctrtgttccacaataataaaaatatttaaaaggcaaaaaaagtaaaataatgaatataaaattacactgaaactacatattctcatagatagaaytgtaattattagagtttttgctgaataaagtcaaatagactattatagtagttataaacrcaagttaaaattttagggccgggcaaagtggctcacgcctgtaatcccagcactttgggtggctgagcgggtggatcacctgaggtcaggtgttcaagaccagcctggccaacatggtgaaagcccgtatctactagaaaatayaaaaaattagctgrttrtggtggcgggctcctgtaatcccaactactagggaggctgaggcaggagaatcgcttcaacctgggaggcggaggttgtagtgggctgagattgtgccattgcactccagcctgggcaacaagaatgaaactccatctcaaaaaygaaaaaaaaaaacaaaaaaacttttctttaattttaaaaataatatataagcaagaactataaattcaaattcttaatgctaatcttaatttgaaacatcaaattttgaatattgatacattgctggacaccttttgttcttatttccaatttatttacaatgcacaaagtgacagaaattactgaattttcaataaattatggtactgtagatattaaattatacrgatgattatccctaaatttatccttaaataaaataatttcagtcatattgttaccattcaaaaatcayagtatgtgcacacatatrtsttggaaaaaatattttgttgctataattttttggctctctattagagaaaaaaccagaaagttaaatgtgttaaagtgtaaaacttacttagtataatctttgggtatgtttttgtatgtgtagtgctgcattgcttgctataataaaatactccaagggaccaggtgcagtggctcaygtctgtaatcccaacactttgggaggccgatacaggcagatcacctgaggtcaggagttcaagactagcctggccaacatggcaaaaccccatctctgctwaaaaatacaaaaattagccgggtgtggtggtggatgcctttaatcccagctactcaggaggctgatgcaaggagaattgcttgaacctgggagtcagaggttgcagtgagccgagattgtaccatggcactctagcctgrgcaacagagtgagactccatctcaaaataaaataaaataaaatactccatatttcatcacagtagctgagaatgyaaataaccatttgaaagaatttggcttgctaatgatgctattgatacatatgataaattttaygtactgtataattgcacagagtatttgtacatgttcatatgaaaatgcaaaaaaacaaaaaamcaraaaaaccaaagagcaggtgctatttgctggaagwcatgtttgctatgatttttagaatttaataaaagaaaaaaaatagctagcaaacttttggaaatatgttggtttaaagttgtcattgatgaaatactatgtgaaggtgataggagcaggaggctgggaaattctagacagaaaagggcgggtcctcagctaaagccccactctcaagccaaatagactgagactgtggcccaaagggagtacttctatccctgttttcccactcaaatgttgcctttttkggcctgccccacccctcatcctatgcccataaaaccccaggctccaccggtagtgagaagtggctgaagatcgagaggagaagcagctcaatgttgtagactatggtgggacgttggagagaagtggcttgacttcagagggacaggttgaaggcgtgactttcgagaagagtctggctggagacagccggacttcaggggaagattaccttcctgcttcacattccctttccagctccccttcctgctgagagtcacttccatcaaaataaaatctccctcatttmccattctccaattcggttgtgcaacctcatttttcttggaagctggacaagagctcaggagccaggaatgcagatacgaaaagttgttamactgaacctctgcccttgctggcaagaggcagccgcctcaagcgaaaaggcaaagggcccactgagctactaacacttaagacgtctgcagatagcagagctaaaagagcactgtaacaccctccccctcgaggtttcaggggtgcgggcaccccccyagatgctgctgcggggcctgcacagaatttgttcctgctggcatccaaaagtgctcctgcacctgttcacctgtgtgctccctcccatgagggctgggcgcagtgggtcccagcgagtggatttcacccctgccagccctaaagcagctggctggttctagcgtcagtgagccccagttccctcccatgaaggggtaagggaaatgtcctccatcaaaggtattattycagtctaagccctgatgctgagaataatatgagaatcataaagccaggagaaagaataattgkgttatcccattaycctgaattgtagcacttagaaaaatgaatggtcacatttattagcyagcagtctaccttgtagctatcatcatcatctctatctacatctatcccattaaataatttactttttgaaatatrtacattcataaattggataatgcctacgtaatttaaawaaasaatatcattatgggcaagttacrttagtaaacggtaaagttcaagtcaagctaaatacatttagatttagaaattaagtttagtttagtttaaaatacattgcttaagaaaatagttatttatggatgaccttaaactaatccaaggaacactataataaasatttagtttttaacgtaaatacaattcttcaatcagagagataaaccatttcatgatcaatctattatttttgtttattatttttattatttatttatttttcttttgagacggagtctygctctctagcccaggctggagtgcagtggckccatctcagctcaytgcaacctccgcctcttgggttcaaacgattctcctgcctcagcctcctgagtagctgagatgacaggcacgtgccaccacaccctaatctcttatttttaaaaagaggattttaggactaaacaaatcaaatgtaagtttcccctcacctctttgatctctcacttgrgtaatgatgcagtttgaaggcaaagagccccatttctacattataagcaaaataaaagttaattcatggaatacaatggtgtatttgtaattgaggtactatattttatttattggaatggcattttgagatccagtgctgttcattgmatttccctgtaaggagagtttgtggtttggactcatcaagctgctatgccaaaaacaaaacaaaacaaaacaaaacaaaaagctaatcacatgaaatcaatttcctgtttcttccaacttgcaggataaggcctagacgaagcttttattgtattgtgtgacccmagtgttgggaaaagtagaaaattgttaccagatgtgaagaaacatttaggggcttgaaaagcagcatggaggtggacctaggctctttgcaatgttccacgtcttgccttatttgatggttacatgagtgtttataatacattgctgtgtttaccatttttattttgactcatttctaagtgtgcattataattttatttgaaaattatttattaggagaagtgcaccataaaaattattgattactctgctcattatatacctaggaaaaaattcaccatttatatatctttacatacaactctaagagagttgaagtgggaactttattttagttacaacatgtagaaataagagaagacgctacctgaagtacccagatctttccaaaggtttttttctacttttttttttttttttttttgagacggagtcttgctctgtcgcccaggctggagtgcggtggcgccatctccgctcactgcaagctccgcctccggggttcacaccattctcctgcctcagcctcccragtagctgggactacaggtgcccgccaccasgcctggctaattttttgtattttttgtagagacggggtttcaccgtgttagccaggatggtctcgatcccctgatctcttgatctgcccacctcagcctcccaaagtgctgggattacaggcgtgagccaccgcgcccagcctctacctttaattatctaccttgcatgacaaaactttgccrttccttatctatttttcttttggctcctctattcctgacacaacaagggtggacatatttcccacacgcttggtttwgcagagtacctatatcagttaggtttttctgccagagaaacctctccaacactacattacatattgatatctcacatgtctttggattcagtttttctaagctgggtttgctggatggctctggtgatatgagatgggccaagttctgcatcttggaattagttagagtttggacaawgtaggctggatcaggcarggacaaactgactccattattttctcattctccttctgggaacagagtagtagccaggcaatgttctcataataaacagaaaaggaaaagaaactccartgtggaaaccatctcaaacctctgtgtgaagtctaccaattttctgttaatcaaagcaagctatgtgagtgtactcagagtccaggggcaaggtagtcaccctgtgtgtggtgggaaaatactgcaagattatatgtcaaataatgggatactcaggaatatttacaaaaatgttgaatattttaatgaaataacaaatatttagacattcaatagacttgagagtaactttaccaagggtctaagtatgagagatatgtttaatatatttttatgggctgaaaaccctgagtgggaaaataggactaatttcaccaggatgacctcctggaaatgcattttccattttggaaattattttaaaagttcattttttctggatgggtatgtgtatgtgtgtgtgtctgtctatgtgtgtatgttttatgagcttgttaacactaatgtcatacaaaagtactggttagcaggaataagattttaaggtgtattggcattcccatggttcccaagaaaattttcgatgactttgattaaaaagtttggattttgtctatttaaatctagcataaaaattggtcatggtgatgatcctagttatractaatctccctttaagatttaggcatttactgtgtgaaatatgtggcacattttccataacaaacagctaaagttactgaacacaaattatggaaaggtgaaatgaggaaaacattgcaaaacactgaaagagaatatgtctttatttgcatgctggcaaatgaaaattccggtttcacttctacttcagtatctaacaagtctctaacaagaacagacattgaatgaatgaattaagttgagctgtttgaaaattagaatgttttccataaatacattattgaactatcaattagcataaactgctactttcttgtttgacactggtcacagtatttgaaagtaaaaagaatgttactgcacattcagaaatcaggtscacataaaatttaaggtcaggatattaaaggatcacagccagtgctgttaggccttcrtttattctatctttttgtctgttcagacatgataacttttctacccatcattttttccattctagtagtggttacatttgttcttgggaattttgctaatggcttcatagtgttggtaaattscattgagtgggtcaagagacaaaagatctcctttgctgaccaaattctcactgctctggcrgtctccagagttggtttgctctgggtaatattattacattggtatgcaactgttttgaatccaggttcatatagtttaggagtaagaattactactattaatgcctgggctgtaaccaaccatttcagcatctgggttgctactagcctcagcatattttatttsctcaagattgccaatttctccaactttatttttcttcacttaaaaaggagaattaagagtgtcattccagtgatactattggggtctttgttatttttggtttgtcatcttgttgtggtaaacatggatgagagtatgtggacaaaagaatatgaaggaaacgtgagttgggagatcaaattgagtgatccgacgcacctttcagatatgactgtaaccacgcttgcaaacttaataccctttactctgtccctgttatcttttctgctcttaatctgttctttgtgtaaacatctcaagaagatgcagytccatggcaaaggatctccagattccaayaccaaggtccacataaaagctttgcaaacggtgacctccttcctcttgttatttgctgtttactttctgtccctaatsacatcgatttggaattttaggaggaggctgtagaacgaacctgtcctcatgctcrgccaaactactgcaattatatacccttcatttcattcattcatcctaatttggggaagcaagaagctgaaacagacctttcttttgattttgtgtcagattaagtgctgagtaaaagacctgaaactctcaaatttctagattcacaagtgggacatcgtgtgtctccaagagaaaacaaactgatgttgtctggaacattttatactttccactggtttttctgtattgtatgtttttgagtaatttccaaaagtatatctagaaaagtcttttacctaaagttagtctaaaaagtatctatatatgcatgtgtatgtgtatatgaaacacttaagagagagtggcaataacataatcattttttacaaactgccaaattatagaaaatattgtaagaaatttttcagaatcatgaagccatgtgtattcacaatacagttcatattatcatgtttcatttgaaaaatttatgatctctatttataattgttaagaacttacagcttatttcacaaaatcattgctcttttccactgttatttgtaccatacgtatgtaccatastgtgcttaaacgtgattatttgaacgtctagttttttggatggtatgmgcattctaatctaaatcaataatgaagttttatctttggggtagtttttgttkcataatgaattctaattttatgtttaatttaaagcaaacaattattgttagaaaactatgcacaaaataaaattcaaggatgaaaaatatatttggaatacattttgtatatgtctaccatcatcagtactgaggaatattagattttatacaaatatgtgaacaactgagaaaaaagtcatatctgtaatagggatgaagaaagaaacacaatgctgacctcttaastgctgtcataagtctccatatacaggtagaaaagtcatttcttccagtttttgaggtaaagaaaaccttttttgaaattgagatcggataccaaatatttccgtttctttcctaaactgcttcagagcccctaaattgccgattctctccactatcttccacatttaaaaatctttttaaamatcacataaatgaactcaaatctttattacttgaaaaaatactccatgtaaaaatagtatagaaattatgaaaatcatttgaattatactttctgcaaattctaaaatgacgtctatgacatctatgtattgatgataggaaatgacttaaatatatgttttattataatctagttgcaaataatgcagtgagagaaagtgtgttgacatattcagtgatagcaagttctattataggaaaaaatgtataacgtcattaaacaagtaaattctacagactgtatcaattctcggagttatgaaattttaacaatgttatctaaaccttgagataaatcatttgatttagttatttgtttgtttattatatatctttcctggtacaacgtaagcaccataaaagcagagaccctggtcggggtcggtggctcacgcctataatcccagcactttgagaggccgaggtgggcggatcacgaggtcaggagatcaagaccgtcctggctaacgctgtgaaacccggtctctgctaaaaatacaaaaaaattagcagggygtggtggcgggagcctgtagtcccagctactcgggaggctgaggcaggagaatggcatgaacccaggaggcggagcttgcagkgagcsgagatsgcgccactgcactccagcctgggcgacagagcgagactccgtctcaaaaaacaacaacaacaaaaaacagagatcctgcagaccttgcttattgttgactgccaggacctaaaagatcacataaaaaatagatagccaaaaatattttgaagaacaaatgagttagtgaatagagtaataaattacatgtcttggggtggtgaaccagtgaaaatgaarcatcacaaaatctacagttgcatgaatttgcctattctggtttctggttgagatgacagaattatctaagaagaagcatttttcagagtaaaagtgtggttattccatacttgcaggggaaatatcgctatatatagccttgatgcagctatatcagactaaaaacatggagataaggtggaacatcaaaatcacatggcacccactacaataccttcaaaacagcatataaaagacttttggatatttgtatatattttctcgattgtgaatgatatatttgtattctgatatttctagctggttattatgtaaaaaatgcatttcaattttaaaaattgagttagttatgaattaccttactaaaatgtgatttttatataatatttttaatatcctttctaaatgaacattttaattgccatattataaaatcacagaaaagtgagtgaaaaataaattataccactgaatgaatatcttagctttggaggtctagaactagagccagtgtctgatattaaagtgataacatttctttggaaggtaagtccagggcagcaatggcagggacgcgtggaaattgaggcaagagcacgtggaaagtgaggcaagagcagatgtgaaagaacgtgttgggatgtattgtaacaatgtgttgtgtgtatgtgactctgttgtggcaacttcattataaggtgagagagacagcatggtggtcatcagatgcatgcacytggaccccagtacttttccggaaaggctacaaggggaataccacagccagcattagtccatggaagcgagagaggagggagaatgtatctgttcagctgtcttctgtcttccattttccattggccagggtttccctgaggcggaactaccatctctgctgttctgctttccatcatccagtccgttggtggctgttatgaaagacagacctcaggcccacagtgtggtgttccattcaaggaaggatggtaggatgatctggatcaggcaaggtgctggcctagagaataagtgacagttaagggaatctgaggaagcacatgtttaagtccaatactgtctactccttgtaccactcaratttgctcatgtcttccaatcatggctggctttatgggcatatgatttccactgttgcacagggtcttgtgcttagaggcgctcatgcttagaggggcaatcattagtcttcctgttgcatgctgtattagcagcaatgaacctggtttatttgggggatgctgccatcttctgattttatcattgttcgctgggcacctcttctcaatctcctttgctggttctttctcttgtctctaatcttctgcaactgctgttttgtttttgagacagagggcactcctctgctgaagagggaatggtcttgcactaattccctaggagttttctctcccctctcctgtggatttgtcagagacttggacagagtcctgtaatgcccactatgcatgcctctagcatgtttgaattctgctggatcatctggcacaacgggcagagcagcttaggccagaccctatagctgttatggaacccttttttgttctggtttccacttgagaccaatggcctttggaaactccattagtgagtcagagcaatatcctcaaatgaggaatatgttgactccaaaatcccaataggcccaaaaaacactgtgcctcttttttagtgagaagaattatgtatcaggaaacatgccgtttactttaaaaaggatgttttgacacaaggaccaggagcatggacctgtaaaaacaccatctatgttataagttcctgaatctgctgaggtttatgtctctcttcttctgatattttacttctgttcaaagtaatactattttactatatttaaggaacttgccacttcctgcttatgaataccaattaaagtaatattattaatatattgagttagcatgatgttttgcaaaatgccaattaaactgaaaacagaagtgacacagctctgacataaaacagtgaagcagtgcttttgttcttaccccaacaaacaaattgttttgattttctctcacaaagggtgtagatttaaaaacattcgccaaatcaaaagccacatacaaagtaccagaaaccacgttctgctcagtgaaggtaccacatcctagagagcatctgcaagtgcgatttaagtttatgctaatgtgcattcatctgataatccatctggttttggcagaggccagataggttaactgaatagggatataaaatgtactaccacccccagtgttcattatcaagaggacttaagcttcctttcagtcgtttatctctgcttctgtgaattggctcagtcctgagaactggctgagggtctttgatttgtcatatcagtgcctgacctcaggactcagctttttcaactctgttttcctcttgatttatagttatttagcaaagtatgaagcctcttcaactattggcctatcagcccaatccaatgaggctgttgctgtcaccacttcattaaatctgacatttgttaagatcaccagtgagtgcgtgttgccaatggttagtcttcatgttgcatgctctattagcaacattggacatggtttactggggggatgctgccctcttctgattttattgttgttcactgggcacctcttctcaatctcctttgctagttctttctcttgcctctaaactgaaaatgtcacactgccgaaggtctcaattcttcaatctttaatcaatcagacttgttttgttggtgatctcatgcagtctccttactgataatgtagccaaatggttcaatagagaggaataaggctgattattcatctatatattcatatatatcattttaatatagcattgcagatattggcagattgatatgtggggaattttaattatatgatgatctatatataattagataatgatataagtgaagaaatacatagatagaattatggtttactaacccatttttgatttcttgcgttttgtacaatgtctcagtatctgttagtatcttatttcttaagtttttttctctatgatcaattacttatgagttaatttttgtgtacagtataaaataagggtctaaatttacgtttttttccttctcttttaactcccacttcttaggtaagttcatctactcatggccttacttattttctgtgtgctgatgatgccaacatttaatctttcagctgagatctcaacgctggtctccggaatcctttctctratagactatttgacatcttcatttggatgcctaacaggaacttgaactaacatgtccaaatcaaaatactgctcttcccccaattgtcagatttgtttcttctacagtctttccctcttctgctaatgaccacttcagactttcagatgcttagactaaaaaaaaatggagtcaatattttctctctttcagaacctatctttaaggcatcagcaaattttgttgactctaccctcaaaaacmtacagaatccaatcccttgtcatcactctgccatactagtctaaactgctgcatatcttgccaggatatttgccatgagtttctaattattctttctagttctgcacatccttttatcctgatgtaytctcaaggtggcagccagagagaacctgtaaaaacgcaaatttgatcatgccattcttctcctccagatttttcagtggctttcatctaattcagagtaaaggccaaatccttacraagtcttataatcatttgaatgatctgattttgtctgcctgtgtgccctaaaacacctggctcatcccatgctaacaacactggcctttgtgtcacttcttgaatatgccaagcattgcctcagggacttcatacttgtgtcccttcttcttggattgctctttctcagatatcaacactgaacgttatcactcctcagatatcattgaatcattgaggcctccaatactaccttatttaaagataaatctcatttcactttgcagtttttttttctttttttagcttttattttagattctggggtacatgtgcaggtttgttatgtaactaaattgcatgtctcaggcactttgtgtacagattattttgtcactcgggtgggaagcagagta

SEQ ID NO: 1632 - DNA, 12828 bp, Homo sapiens
gtcttttgcccagcttctatagccttatgcacttacagattgcaggttttatattagactgtgcggttcaacctacaagccagtagatggcacttataggtaagagccagttktggacaatgtgatggttatatatttgatccttgtttactggaagaaactctctgttgctgcagataatggtctgactcatggagtacacagtggtgtgaactccctgctcagccttgggggttgtggggagcaaggtgggtggggccagacaaggcaggtccacctataggtcttccaatggcagacacaagcaccaacactgagggagaatctactgagtggctaccaagtgaccagagttctgtctaggggtggagctaggtaaccccctcggctccaagttctttgcacagggatattggagagattggcctaaactcttaatccaggagagtgggggctctgaatacctggaaatctgcctgcttgtggagcagaacccacccccaccaaccaagatttctgcacagggtaaatggggtgactcaggcttcttaactaggcaggcaggtgctcttaawgcttggatatttgcctgggcataaaacagagaggatcagcccwgtacatggatctgtgaacgggaagggtgaggcagcacaggttgccagtctgtgtgagcaggtgctttgaatgctagggtatgcagcagagaggacctccctgcatcaaaatctctgcacaggaagggtaggggaggataggctgctgagccaggtgaatgggtgcttcagatatctagagttctgcctggctgtggagcagagagggccccattgcaccatgacctacgtcaaggaaggttaggtggttcagggtgctgaaccttgctagcaggtgctccaaaatcctgggatctgcctaggcatgaagcagagagggcctccctattctaggatctctgcacaagaagggtggagcagatgaagctgctgaaccaggtgaatgagtgatccaaatgcccagatttctgcctaraggtagagtggaggagagtctgctgcaccacaatcacaggggaacagggtggggtacccagcaatgacacacacagactagttccaagtagctaagctgcctggttgcaagtctcatcacataggataaactggctgtagcagctcccctcctgccccaggcctgtgatgggggatagcacagtttcagtgtttgctgctaaggttttttttccccacaattctggccatggaggtccccaccctgctctaaagcaggtgctccaatatctggcccaagactaaaatgcctgcacagctacgctgctkagttaccaaagaatgattgactttgtggcatctgaattaaaaatggtatcctgctctcagtcctgggtctgagaaaaggcctgaaccttttcccagtgtctttcccttacaatgtctctaagcctttctccaagttatctccagggctttggagaaacaaggtactcttccctctgagcactgggttgctcagatccccagtggaaaggtgagtcacagagggaggctctctgcctctctcacctactggagcttcattcacttttttaactgggtgccatcatgggkgctgtttgcccatgttcccctccctgggatctgtgtgtccttatgattctggtagattcccactttccttcttgaaataaagctcacagagttaacctttatgagactttgttgaaaaatttrtgtaggttggtatttttttcttcttaaatatgtgatgaaaataaacattcaggtcatcccttgctttgtgtgaaagttttaaattaagaattcaatttttaaaaatagacactaagattttctattyctttgtgtgcctgattcagtaatttctttcagggaatttgtccattttatctaatttaattcactgaaataattttataaatattattcctcaatttcttggtctgtttgtgttgstataaaggaatacctgaagctgagtaatttataaataaaagaggtttatttagttcatggttccgcaggctgtacaagaagcatggcattagcatctgcttagtttctgctgagagcttttgtgctgggtcaaaccatggtggagaaggtcaaagcagaagcgggcacatgtgaagagagaataaaccaaaggggcatcctggctttataacaattcactctcatgaaaaacaactcattcccctagaacaaattcagtcttgtgagagtgagaactcactcactacaytgaaaatggtaccaaggcattcatgagggaaccaaccctatgactcaaacacttctcactaagctcaacctcccaacaccactactttggggatcaaatcccaatatgagttctgatggggacaaacaaaccgtgtacaaaccatagcattctgacttggtcccctgaaaactcgtgtccttctcacataaaaaaaaatgtaatctttccatcccaacaatagtcccccaattcttaacacgttgctgcatcaattcaaatgtctgaagtccaaagtctcatttgagactggaagtcaagttccttccagctatgagcctgtgaaatamaaaacaatttatttccttccaagatacagttgttgtacaggcattggatagacattctcattccaaaagggagaaatcagccacaagagaggrgcagtaggcaccacgmaagtacaaaacacagcagggcaggcgttaaatattaacgttctaaaataatctcttttgactgtatgtgctgccttctgggcacatgcctcttctttctgagacttcactcttagtggtctcactctctcatctccgcaacagtcacactgctttccttgttcttcctcagacacactaggtacatccaatgttagcacactgataatgctgttccgtgtgtctggaatgtactttacccagacaaaacatggataatttctttacctactttaggtctttgttcagacatcaccttctcaatgagtccttccctaagcaccttatttaaaatttcaacccctcttctgacatgctttctattgaccctctctacttatatttgcaacttcttataaactatattttatatctgtatgatatatattttattagttatatgtttagagttcatcttttcagaatgtcaacttattaagggcatttaaaaatagttgtatttaatgcttcatcccacctcctagagggctggaacaaagaagatattcaataagacaaataaaataaccctttttcagcatataatattttcctgaatttccctttgtttatttcagtttcagttttgtttgcatttcatgtttgcctatcacaattagcctttcttttagtcatggagttttctttgtgaatttacctagggtgtatcttttggtgggctgtccaactcattcatttctttgactcctcttaggcctatattatatctccattggttttgaatgtcactaaattttggactagctactttgggagggaaatgcagcagttgcattacacaaagaacatgactaattggcctttcctggtttgacctcatcagaattaagattaagttcagctcaacgtatgaaaaaattatagaaaatttatacaagttccccttacactgaggaaaataaagatgctatggatacctttatttgggatagaagagaaaaacagacatggaaattagaaatracaaaatattgataccattcatatgctaaataattctattctgatgctctattgctgcataataaaatcacccagaaacttcatggtgtaaaataacagccattttattgtgcttgttgatatggtttgaatttctgtcctcgcccaaatctcatattgaattgtaacccctaatgttggaggtggggcctggtgggaggtgattggattatggggggcagtttcccccttggtggtggtgtggcaatagtgagtgagtgagttatcacaagatttggttgtttgaaagtgtaaggcacctcccccatctttctcttcctcctgctccaaccatgtgaagatgtatctgatttccccattgccttccrccatctttatacatttcctgaggcctccccagaaacagatgccgccatgcttcctgtacagcctgtgaagccatgagccaattaaacctcttacagaaacccagtttcaggtgtttctttatagcaatgcaagaatagactaattcacttaaagattctgtaggttagggttttgttcaagacatagcagggatggcttctttttgttccagaatgtctaagcctttagccagaaagttatgaacaactgggggcaattcaagtgaccaggggctgaacttatctaaggcggagctgagaaatacatagaaatgtcaatgataggcaatgatagaaatatcccctatgtatgttggctataaaatagtcacacgtggctagtgagcatttgaaatatggttagtaatactgaggctctgtacttttaatcttatttaatttttattaatgtgaatttaaaaagccacgtgtgacatgtggctagtatctaccgtatcagacaggtcaaatatcgctttcttggctcataggtttagtacctggggtaaaaggacgtaaaagctgggctcacgtgggataatgagccagagggcctgcayatggcctctgcatgtgggtttggacattgtgacctcagagtagttggactacttacatgtggcttaggactccaagagtaaatattgcagtgattaagaaaaaactgcatggcttttcatgatttagctttagaattattatagcatttttattagttgaattagtcacaaaccattctagatttaaggacagagtacacagactcctaagatatcaatagaagaagtgccaaagtatgtatcgtatgttttaaaacttgcatactctctctctcttttttttttttttttgagacggatctcactctgtcacccaggctggagtgcagtagtgtgatctcggctcactgcaacatctgcctcctgggttcaagcgattctcctgcctcagcctcccgagtaactgggattacaggagcatgccaccaagcccagctaatttttgtatttttagtagagacagggtttcaccatgttggccaggctggtctcgaactcctgacctcaggtgatccacctgccttggccttccaaagtgctgggattacaggcgtgagccacygtgcctggccaaaaacttccatactctctaaaagatttggtattatatcagagagcagttttctccattttcttaaactttgcatattttataaataatctgcattagtgaggttgataatgaagaaatatgctgatcataaactctaaatatatactgcatttttctatatgggggcttagaatttctagcccagggtggtagatgaatcaaagggatacatcatacaaatgaataacytttaagcaaaagatggcattgtaaaactataaaggagaatctacttcaattttgcatgttaacaaatgagggttcaaatttgaatgcagaactttccatgtaaaatacaaccagagtcaatagtagcagggaatataatatttgccttgaaaatcactagctgataccctcaagggaaaaaaacttgtatattttacaatttagttgaaatctaattttagaacacaccttggatctctccagactacaccaatggccatcaataaaacagaaagaagtcactcctttggatatataaatctataacagtgcagctaggatcaatcagccaatggtgtattgaaggcagagattcactatgtagaggcatgtcaagcatttgggagacactgtttataagaattcttgtagtgtaattcataatggggactgtgggaaattgattcattgtattggttaatatcattgaytgaatcaggaactgaaaggtctccctgattgattttattctcaactgcttggccatctccaggatatgtttcctgtagataacaattttagctacctctttcaatataggctatgagaaaatgcctgattctaagaatcttgcagtaagttttgacattctctggacaggatccagctatttctgcctgtcctgtaccacttgcctcagtgtcttctatttcctcaaggtagccaacttctccaatcccattttcctctggatgaaatggaaaattcacaaggtgcttctctttattgtactagaggcaacgatctctttctgcacaacttccattctgaaggaaataataattaatagtttaatctaagaacgggtaacaataaaaggcaacttgacatttaattatatggataccatgcatgatttcacttctctgtttctccttcagatgatgttcatccttccttttgtggaaacactggcttccattcttctcttaatcctctccttatggagccacaccaggcagatgaagctacatggtatttattccagggatcccagcacagaagcccatgtaaaacctataaaagctataatttcatttctactcctctttattgtgcattatttcatcagtatcatactaacattggcctgtcctcttctagacttcgttgcggcaaggacttttagtagtgtgctggtatttttccatccatctggccattcatttcttctaattttacgggacwgcaaactgaagcaagcttctctctgtgtcctgaagaagatgaagtatgccaaaaaggacataatctctcatttttataaacatgcctgatatgagtgatgatattctcagaaagaaaaaaaggaagaagaacaggagggctacacatttgtttctttcacctacctcttattttctcattatgttctatgatatattgagcattattgaaaatacttgctgatttaaattaagcagaacagattgctaccttgtttgcaccatatatggagattatgtatttartagtaaaattctaatatattgaaaatgcatttttcattaggcactgtgatcaatataatagattactctatctttaaattttattawtatgttgcataagcattagaatagaatagaaatacatcaagaattataatatctatgtatgtgtatagagtgtatataaaatcagatttatatgtacaaacacatagggatttagttcctatcctaaaaatgatgatcaattgataatttaaaactagaaaggaaaactcaaatgaaaatagttagtagagtctacagcttagtgaaaactttgaggatatgaaacaaagtcaattgaaatgtacatcactaagagttatttccaaatataagccctattctgttaatattttcagtcattttcagttaaaaacactaagcaactttgaccatcaaaaatgttacaatcttgaccatctacaacagacttgtactgtagaatctgaatctttggactaacaataaaattttactcaattggttaactgtgtaaggaaggcaaggacacgtattaaaaaatcagtaagattttaagtaagcaaaattggaggactgctgctggcatctagtgtagagttaccaggtttagtaaataaaaatatagaagrccaagacgatagtaacaaatacaggatctcatttgatgaaagtcactgtgtaaagaaagaaaaataaataaagttttgaaaagaaaaacaaatcagggataaccaatcagtttacagaattgaatttaataagaacgtctcctcttaaaaatgtaatgagaaagcatgtaaaaatagcaggttaaataaaagaacacaatcgcaagtttaaggtaacartaataaatatttaaaatgaaataattggaagcagattttgaagaacaattacgttctctctaagaaaaaaaagaacatattgcaagcaaataatataattttcagcagtaaagacaaaagacaaattttcaacattgcagaaagtattttaaaaagttaattatatggtaatcgatagaacaaaaagtaaaccctagaaaaataacctggacattgcaggcctaaaacgaaattttaaatgtgtgaataaaattaaaatatccagagaatagaccacgagatttccatgtgcaaaggatgaaatccctttaggacagtggttctccacacagggcaattttgcccccctaggggacatttaataatgcctggagacatttcagttaaaattggacggatgctgctggcatctattgtaatgttaacagattaagcaaataaaaatataggaggcctagttaaatttacatttcagacaaaagaaaaaacaacaagaataaatttataaataagtattacttgtgataaccataatatgagtttacatcataatgtaagtgtgctatggaggaccaattacagacctgcagcattgataattggatacacagacaatgacaattatttgttgcttatttgaaattcaaattgaactgacacactctgtattttacctgataactgtacgaggacaaggatgctgctcaatatctcacaatgcacatgacagtccctcacaacagaattatccagcataaaatgtaaattgttctaaagttaaaaatcatgctttgtgaagatgtaataatgaaaagcacaaattccataatagcaattaggactgaaaaaataaaatcagttattgatataagatttcacacacaccagctgccttccttatctctgaaatgtccagcttaccatacttaggctctgatttctgcacatacatccccagttcacacttgcttmcaagcaggccttactttgagacaggaatgatttgggctgctttagtccttcaccaattgctgattaatgagctgtgatggcttccagttaaaataatttgtgggtgaaaaattcacaaaatatacttcatttttaaaaattagagtatagaaattctcaaagctgtgttcttgtttatagggtactgtgaattcctaagccccataattctgtagatagcttgtttatggcagtcttctatttacctccataacaattttagattttacttctttttcttcctcctatcatgatatgggatattctgataatgattttagcaattttgctaagtgataatcacagacttaatttgaatcataaaatgacataccccttatgaaataagattattcactttcctttcaatcctttctaactgctccagtgctctcaaagggtagtgtcatccctgatgtcacagttctcctgtcccccttacctctggactcatctcttaatctaaaataaaaacaaattgtatgcaaaagaaagaaacattttttwaaaaagttacttctgatggatttagttctgtccaggaagaaaatagatgatatattcagaatactctacaatctttggcaactgtgtaaccttgatcttgggratggatgttgggaaaaaaattctccatgaatgtattgcacttctgcatggtctagctcttatcttgtgagcaaacagtatgtttgatgagcaaacagaagggcctcaactaggatcaggtgagcaaggcatgcagggtgcaaagtttgaggagccacttggttttagggccctgcaacctattgaatgcctttttacgttttgtgccctaggagtctcgttcactttgcccaagaccaggtcatggcaaagagccttgggatttagaaatagggtatccctcttggtcaraaggcagatttgtttaaagataaagactcttctcttcttcttcttctctccagagatatttgcttacattccagtgtaaagcttcttcttcagaaggcaagatggacaggttactcacagtgatcaaagtttttaagactggagtttcctaattttgagatttctcttttgatagacaccactacttgcacatgtaacatcagtttctcatcttatccctgtgaggggaytgaagcttgaagaaatagtacgatgatattcctctgactactgctagtacttcagtgaataataaaccatcttttgccttctgcaagtacaagtgacaagctaagttgttagcttataataattttggcaacgaggatggaacacagcccaaagacctggccttctgaggagaaagtgaaggatcctacaagctgattaataggatttgctgaaagtccatgggaactggtagctaacatgttgactaaaatgtttgtaattggtaaataaatattcttctattatgttgctcattaatgaggaggattgggaagtggttgaaaattgagtaccactggtagaactgaaacagacttccaaatgacacttttagatttwgctgtcttctccagataacattaggtagacagaytaaagatctcccaaagttgttacaggcctttggtggaaaggtgaaaagattaaggatctcccaaagttgttacattcagatgcttattcagttaaccaccgagtagtggcaataatgcttatttgaaagtaaatgtgtcttgcatactggcctgaagacactttctctatatttccctgataacttctttacctctattctgatgtcaattgctttagggattcgggctgggcctgagatcttcctgacccaagggacaccaaagaccctacagaaccatcccaacatattgcaaagcttcaaggagagtagggactcaaattagtatagccctgttggatatatgtgcacaaatcaccattctacttggttctgggggttgggggaaggggtgctgagggatggaggacaatagcatgtgaggaaatacaaaagagaccctactgggaggtgcactagaaagaagggcaagaagccaagaggaaaaaaaaaaagccaaccctcccctcccctcccatcccctcctctttccttcccttcttttcctcccacctcagccacccaaatgactaggacaacaggcacacaccatcatgcctggataattttttagtgttttgtaaagacagaggagtctcactatgtcacccaggctggtctagaactcctggccttaagcagtcctcccacctctgcctctccaagtactgatattacaggcatgagccactgcaccggggaggcctacagtcgttctttatagtttaccctcttttttcctgcattctataaatactcaaatagaagatagcagggccttctggctactgtgacagcctctaacaagcaggtttagaaagaaaaaggaaaaagaagtgcctgagttcaactgatgaggaytgaacaaacagtgcacacacacacacacaaacacacacacacacacaccaaagttaggaagactttgtggatagggccctttggacccattcgatgcactgctttttattgtctttatatctgtatgtakggtgtgatattaaatacttaaaatattatctcataagtgccagagagattgacccagggaaaaccaccaaaaatgttagtgggacaaactccctggccatttgagccagttggtggagcataatttaccatgagtgccttcaccctccaatgtccgaacctacccttattgggctttttgtgtattgcaaaaagagaaaatccctctgtgcaagataaaacagaaaattactcaatgtactcaaaacaactcacaaaaaatcgaccatttctcaaggaatgaaacaatcaagaaattacaaccttgaaattacttagatattaaaatgaccaaagactttacaggagctgttgtacccatccttcatgaggtcaaggtagacactcwaaatgaatggaaaggaaaaacttgtcagcagaaaaataggaattataaattataaattaagaaaacagatattttagaaatgaaaaatataatgtcttaaaaaacctttattgggcatgataaatagcataaagaaaatgatggaggaaagacagtgttcttgaggttggatcaatagaaattatatactctaaacaatacagggtaaaataattgaaaaaattatacatcatatcatgaatatgaaaggctataacaaatgrtgtactattcatgcattctgagtttcagaaaagcagaagaggttgatgttgaaaaaggactcagagaaataatgatcaaaaattttccaaacacagcaaagagcataaacctacrgattcaagaagctgagcaaatcccaaccagaatacaaccaatgaaatccattccaggaaaattcattgtccaatwtctgaaaattaaagacaaaatattgaaagcagaaagaaggaaatgacatcatagttatagggaaaatgcaatataaataatagtggttattatcaccagaaaccagaaataacagtagaaaggagcacaaatatttaaagtgctcaaaagtagaaatggtctaccagatgtttatgttcaataaaaatatccttcattaatgtaaaggaaatccaggcattctaagaaaaaaagaaaagctagaaacctaggagaatttctttccaacaaacctatctttaaataatagccaaatgaagttctctaaacataaaggaaagaatagaagagaaatttgtggaacatcaagaatgaagtaaaaataasagaaagggggaaagtgggcaaacacaatatatcttcctttttcacttgagttttcttcatatgttttaaccagccattgctagcattgaagatggaagagagacaggaaatgtggaaaaatgacattcttctctagagcctctaggaggaaactcagcctt

SEQ ID NO: 1633 - DNA, 12906 bp, Homo sapiens
caaggcacctttacgtcagcagaagggtgctgcttgcacctgttacaatcccaagagaagagcatacctaacaaaggagggaaggagtttttaatcctaacacagttcctgtttctgtgtccttcccttattggctggggttggattgcacaatmtaagctgatcctgaatggcttagacttaaacttttccaaatagggtaaacgcacattttgcaaaaagaaagaggggtgggaggtaggattcatttacaacatttacaacttatggctggraagttgagtctttaaagaggaatttagttgtcctaacggaaccagctagagtgacatgtttacaaagaatataaataaaaagaaaaatgaagaaatttgaactacatagatatgagaggaattaagtttgaaaaaatgattcagtataattccatttatataaagtttacaaaaatgtatttttaataaattgaaatttattacactggtggtgaaattctaaggtgagacatatgagtgattatcctaacaattgggatggtagggatggaggaaacaaaagggaaatgttatcagtaagatggcatatatggagagtgtctggattgctggtgaaatctactttatgaccatgatgtggaatcatgactcttaatgctataatttttttctttactgtacattagrcctcattactttatatactttatatatatatgttatgtttcacaatattaaatatttcacaataatgaaaatatttaaaaagtagaaacatacactaaatgaatgaatataaaataggctgaacaaacatattcttatagacatcattgtaattagagtttttgctgaataaagaatagagcattatgatagtaataaatccaagataaaattttaaacttttttttaaattaattagaaaaaggaagagataagcaggaagactacctccacattcctaatgttattcttactttgaaacatcagattttgagcacttatattttrctggacacmtttttttcttatttccaatttaawtatttatgataacatttcaaagtggcagaaattagtgaatttccaataaattatagtagtatagatattaaatgtataggacaatttttctaartttatctttaaatgaaataattatacacatatttttaccattcaaagattataataccatgcatgtgtacacatgtgtaaggaaaaatattttgatactgcaaatttttttaatattagagaaaaattagtagaaagataattttattaaggcataaaacatatttagwgtagttactttgactgctataataaaaacacccagattttstgacagtagctgagaatgtaaataagcagtcaagagaatttaacttggtaatgatgctattaaaagatgaaatgaagcttattcartctataattgcacagagtatttgtgtaagttcatatgaaactggaccaaaactaaacagccaaaaaaagagtattatttgctttaggtcacttttgccataatttttagaatgtggtgaaagaaaaaaaatagcaagtaaatcattggaaatgtgttggctttgcgttattcctgatgaaatactatatgagggtatttgtctaggcctgattctgagaataatataagaatggtgccaagcacagtggctcatkcctgtaatcccagcactctaggaggccaaggcagtggattccctgaggtcaggagttccagaccagcctggccaacatagtgaaaccctgtctctactaaaaatacaaaaattgacgggtggggtggtgggcacctgtaatcataggtacttgggaggctgaggcaggagaattgattgaatcagggaggcagaggtttytgcaagccgagattgtgccattgcactccagcctgggtgacaagggagaaacttcatctgagaaaaaaaaaaaaattgtaaatccatgaggaagaataagagtgttctcccatcacccttaactccagtactttgaaaagaagacccaaatcacagttatttggtaacattctcccttttagttgacatcatcatcattattatcatcatctmtatttacatctgttttatgaaatgatttatttttgaaatatttacatacataatttcgtaacatctatgtaatttctaagagatatcattgtgggaaagttacattagtaaacagcaaagttcaagtaacaataaatacatttagatttagaaagttaagtgtagtgtagtttaacatacattgcttaagaaaacaattgtagatgacattaaactaaaccaagaaacactataaaaaagattttgattttagtataaataaaattccttaataagaaaaataaaccatttcatgatcaagctctgatttacaaagagaggattttagggctraataaatcaaagagaagtaagccttcccccacatcttctctatttcatttaggtaatgatggggttcagaggcacagagccccatttctacaacataagcaaagtgaaaattaattcattgaatacagcaatgtagctgtggtagatgaactatattttatctattgccatgatattttgagatccagtgctgctcattgagttcccctgtgggcagagtttgtggtgaggasccagcaacagacaagctaatatccaaaaacatctactcacatcaacttaatttccagtttctttcaaattgaaggtaagttccaagacaaactttttattctattctctgaccaagtgttgggaaaagaaaactgttaccattttcatttctagcatactaaaacaaaaaacataaaaaccccaaaatctaaaacacttttaaaaataacatggtgttaagagtagtttgttcagtttccctatagaaaatgatttatggaaggagaataaaagwttattctgaacactaaaacaataagaccaaaaaaatgaattatcaatattgagaatccaatagacagaattagcctgttagatgcagtagaagagagaattagtgaattggaagatagctaaacagaatgaagcatagagagaaacagatggaaatataccaagctagagggtawcacaytgatgctacagtcagaacacctaacatacttctggagttctgtaagattagaggagagaaaatsaagcaagagaaatgttgcaaggatttttccaaaagtgataaaatgtattcctccatatatttttagtaatctcaaacttcaagcatgataaattaaaccaaattarcataaaataatacaggacaccaaagaccaatagaaaatctgaaaagtagcgagaggtggaagatagagtatgtcgtgtgttgaaaagaactgcattctaaatacaacctgattttaacagaaaacatggaagaaggaactcaatggaaacatgtcttcagtgcatttccaaagagtagtagaacttcataaacagaaattgaaaatatttttcagagaaaataaaaatgactgmaaatgcaaagttgaacatgcaaggagcaataaaaattattgacaatgaaaaataagtgtaattctaaataaatgttgactgtataaaaattattgtcttgttagattaaatttataattgataagatatatgcaaatggcaataaagagactggagataaaggtgacaggaataaatttagttagactatgttttgggcttttctatgtctgtgcagataatttgaacatcataatcaaggaccctgtaattctacacccaggtatatatatgcaaaagaattgtagtaaatgatgtaggtcattgaagcattattcataatagctaaaaaataagctgcccaaatatatatcaaataaagatggataaataatyacagtaaaatcataaaatggaaaaatatggagaaatgaaawgaaataaatcacatgtacatgcaactatgggattaaatttctgatacagaatgttgatttcaggaagccatgaataagaacatatagaattgcacctatacmcagttcaaagaaggccaaaccaagctattgagtttagggtcgcatacctagttggtaaagtataaagaaaattttaaaaagatcaacataaattatggatgttgcttatcacaggagatgtgaagaaacgtgtagcagattggaaagtggcattgaggtaaacctaggctcttagcaattttccatgtcttgccctacatgatgattacatgagtatttatgacacattgctatgyttcccagttttgttttggctcatttctaagtgtgcastctagttacaatacaaaaattgttaatgaggagaaatgttccatgaaattattattactctgctcattatatactgaagggaaaaatccactatttgtatacattcatgtataactctaagaggttttaagtagaaatgttctgattttagttgtaacttttggaaatttgacatgatgttacctgccaaccccacgtttttcaataggtttttcttctaggtttaattatctacttcatatgacaaaactttgacattctccatctatttttcccttggatccagaattcctaacacaacaagkgtggtcatgttacccacactcttagtttagcagaatacctatatcagttatgtttttctgcaagagaaaatcctccaaaactgctttagatatttgtgtctcataagtctttggatttcrtttttctaagcttggtttggcagatggctctggtgattggagatgggccacatactgcatcttgcagctagtttggctgatttaggctggatcaggtagtggcattctgactccattagtttctcattcttcttctgggaacagtgtactagccagatgatgtcctcatggtaaaaggaaaagagcaggaawctccaacatggaagctgtcttaaatatctgtgtaaagtctactaacttcctgttgactgaagcaaattagaggagtgaattyagagtccaagttcaaggtagtcaccctgcctrtggtgggaggatactgcaggattatatgacaaaatgtagggtacttagaaacatttacaaaattgctgaatattttaattaaaatttaaacaaaaaacagacttgaatgtaaatttaccaaagacctaagcataagaaacatgtttgataaacattattcattgtctgacaaygctgaataggaaaatagtactaattctacctggatgacctcctggaaactcgttttccatttggtgagtaataagaaaataattccttccrtcccctaatggtgtgagtgcatgtgtgtctatgtgtttaggagcttattaacaataatgtcatataaatgtattggttatcagaaaccagattttcaggtgtattggcctcacaggactttccaagataaccttggatgattttgacaaaaggtttagaatctggtatttaaatctggcataaaaataaatccatattgatatgatcctatttatgaccaagctyctttaacaatttagacatttactgtatgatatatgtattgggttttaaaatttccctatgtaacaactgaagatgctggatacaaattatggagaggttaaacaagaaaaaaattgcaaaacaatgaaaaagaatatggctttatttgcatactaacacacgagaattcacttttgacttcaacatcagtataaaacatttcagcatatagcaaggacagatagtctataaagaggaatgagtttcagctgttttgagattaataatattttccctaaagacagctttgaattcatccattggcatatgctggtgctttcctgttgacattagagaacttaaaggcagaaaatgttactgcacatttagaaatcaagtgtttatcgaagttaatgtctggatattaagggaatcacaaccagtgttattaagcctgcatttttttttttgttgttgttcaaacatatgtgttctgctcatcattttatcaattctggtagtgtttgcatttgttcttggaaatgttgccaatggcttcatagctctarttaatgtcaatgactgggttaagacacaaaagatctcmtcaactgaccaaattgtcactgctctggcattctccagaattggtttactttgatcatattattacattggtatgcaactgtgtttaattcagctttatatagtttagaagtaagaattgttccttctaatgtctcggcaataatcaatcatttcagcatttggcttgctacgagcctcagcatattttatttgttcaagattgccaatttctccaattttatttttctccacctaaagaagagaattaagagtgttcttcttgtgatactgttggggtccttggtatttttgatttgtaatcttgctgtggtaaccatggatgacagtgtgtggacaaaagaatttgaaggaaatgtgacttkgaagatcgaattgaggaatgcaatacacctttcaaacatgactataaccaaccatgctagcaaacttcacactgttcattctgactctaatatcttttctgctgttagtctgttctccgtgtaaacatctcaagatgatgcagctccatggcaaaggatctcaagatctcagcaccaaggtccatataaaacctttgcaaactgttatctccttccktatgttatttgccatttactttctgtgtataatcacatcaacttggaatcctaggacacagcagagcaatcttgtattcctgctttaccaaactcttgcaatcatgtatccttcattccactcattcatcctgattatgagaagtaggaagctaaaacagacctctctttcagttttgtgtcaggtgacgtgctgggtgaaataacagaaaccctcaactccatagattcacaaggggagcatggtgtgtcttttagcagaaaagaaactgatggtgtctagaacgttttatatttctgtcagtttgttgtagtgtatgtatktgagtaatttcaaaacagattcctaggatagtcttttatatatatataatatatataaaaytcatatatatataaaatacgtatgggtgtatatgtgtgcatgtgtgtgaataataacattgaccataaattatgaagcctagtatatttcayatatataagtatgtgtattttatgatagctaattgtatgatatttcatttgaagaatttatctctctttgtaattaagaaattacagcatttatcagaaaatcattgctgttttccattgtaatttgtaccacatacatgtacttaactatcattgtttgaacctctcattttctggatggtaaagacattcaattctaaatcaatgatgagactgtatctttgtagtaggttttatttcattatgaattsttactttacttttagtataaagcaaatagaatttttgttagataatgatgtacacaataaaattagtgtacatattaaataaaatcagtgacaaacatgtagagtatatgtatttgcctttgggaaggcaaattttgtatatgtataacaaaactgtactaaagaatactagatttaataccartatgtgaatagcttagaaaaaaatcatttctataataggaatgaagaaacaaaaccatgatcatttcagtgctattataattttttaagtgtagttagaaaaatcatttcttccaccttttgagttaaagaaaatcttttttgaagttgacatctgatgtcaagtatttccatttattttgcttagcaacctctgagcctctgaatttccaatattcttctttgtctcccattcctratattcctcaaaaaaactcaaatattccctktctttaaaaaaaaaagcccaacataaasagggtgtagaaactatagatgataatcgaatgaaactttcttcaaatgttaaaaattgcctgtgaaatctatatattgatgataggaaatatattaatgactattataatgatgtaaatggtgaaatgatasaaagtgtgctgatgtatccattgataccaagttctattataagaaggtaatctacagccttgtggaacagctaaattctgtgtgactatattcattcttggtgttatgaaattttaacattgttatctcaaccttaaaataaatcaactcctcatattatatatatataatatatatatacacacatacattttgtttatcatacatcttccctagtactatgtaatcagcataaaaagagaggtaatagctgtcttgctttctcttgactcacaggatctaaaagccagcacaaagaatagttggtcaaaagaatatattaatgaacacataagtgattggataaatggataatttgwtgtggtaaaccaatgamaatgaaactcatcacaaaatctgcagttgcttgaattttctagtttcaggttgaggttataggcttatcaaagaagaagcatttctcagagcaaaagtttgactrttccaaaattctaggggaaatatcactgtaatatagctttgctgtagctatatcaggtgtgtgaagtagagacaaggtggaacgtcaaaattagatggcacttattctaatgctttttgaaaagcatatwaaagattttggtatatttgcacagggtcagggtcagcagtgwgtgccagctgctcggggctagctgaccccatgacaagaatgttagggaacttcccagtagctgctaaacacacttttgtttttagggaatgtctctttctccttcawtatgacttatgctgccttcaatgctttgctgatacaaaagaastgaactcaaaagaagtaaaaataaaagctagcaaactttgcaactggttaagctggttgtaaacgtacctaatcactttctactgtgaatgatatatttgtattgtgatattttttagctggttattagatacacaaaaaaggtatttcatttttaaaaattgagttagtaaccactcaccttacttacamattatttgtatattattttgtttagtatcctttctaaatgaatgttttaattgccacgttataaacrcatggaaaagtgattcaratgaatgtatatcttagctttgggtgtctagaactagagccaatgtctgattttacagtgatgacatttatttgggaaggcaagtccagggcagcaatgagggatacatgtggaaactgaggcaaaggaagatgtaaaatcatgtgtcatgatgttgatatgactttgccagttgtcgcttcacaatgaggtgagacagacagcatggtggtcatcagatacatgcacttggctccccrtacttttccagaagggttacaaggggaagccacaacaaatattagtccatggaggagagaaaagggagaatgtatcctagctgtcttctgtcttctatyttcctttggccaaagattgtttgaggcagaactaccatctttgcttttcttccttacattatccaaccccttggtggctgtttgggaaagtcacactaaccaatacccccatttttctaagagatagtttttttttaatttattttttctcttytcctctcccctttccctatgtttcctgctttctacttaactttttagacatgcacatagaactgtttactttcccctcaccagacagtcccttcgggcaagttcatctaactgtgtgctccamgarggatctctccttgagacttgacagttgatttgcagacaaaagtatgccctcatsgaactgtcacctccagggtttagcttagacctcacatccattaggaggggatgtggagasgatgcccaggtggccacttctacaatggctgtcctgctcatttccttcccaactttaaaaaaaaatccactttctgctccaaaggtgaagtgtcacattagaaggcaggatgctttgtgctccttcccgcaagctaacttccaaatacattctctatttttatatcagactyttttattactttttattattttttatattagactttacatgaagtgagccgttaaccttttttgttacaagacttcatgcccacaggtatattcaagtcccagatggaaagatgatctggatcaggcaagatgctgaccaggggaacaggagacacagtcaagggaatctgaggaagtrcatgtttttgcccartacagtccccaccttgtgccactcagatgtcctcatgccctccaaytgtggctggttttataagcacatgactagtgtagttgcacgcggtcttgtgcttttgggmtttttgcttggattaatgttctgcacttgcatttttatttttcagacagcggatactcctccgctgaagagggaatagttctgcagtaattccctaggggtttgctttctcctctcctaagggcttgatggagacaggcacagagtcctataatgcccacgatgcatgcctctagcagctttgaattctgctggatcatctgacgcaatgggcagagcaggtttggccacagcctatatctgctgtagagatatywtatgttctggattccacttgaaaccactagtctttgcattcattctgcaacccatctagttttggcagaggctaggtaggttaactgaacagggatttaaaaaggactttattaacacgttggagcaatatcctctattgtggtatttgtggactcygaaaccccaagaggctcaataaacactgtgcttcctttttagtgataagaagtatatatagggcaacatgccatttaccttaaaaaggatgtttctgctgggcgtggtggttcaagcctgtaatcccagcactttgggaggccaaggtgggcagatcacttgagaccatgagtttgagaccagcctggataacatggtgaaaccctgtctctacttaaaaaaaaaaaaaaatgccagkcmtggtggcacatgcctgtaaacactgctactcaggaggctgaaagatttgaactgattgaacccaggagacaaagcttgcagtaagccgagattgcactagtgcgctccaacctgagcaacagaatgagactctgtctcaaaaataaataaataaataaataaatgaataaataaacagattttttgacatgtggactaggagtatgggacccctaaaaacaatatctgtgttgcaggtctctaaatattaycaggtgtatctctttctgctggtattttatttctatttaatgttcaagtattttactatatttaggaaactttccatttcctggttattgcaccaattactgtaacattattaataaattaacatgatgttttgcaaaatgtaaattaaactgagagcagaagtgacatcgcctgacataaaacactgaagcagcgtttttgttcttaccacacaaaggtcaattgttttaatctcctgacccacccatgggtgtaaaataagaaacattcactaaatcaagagccacatgcaaagtgccagaagctctgctctgctcagggaagataccttatcctagagagcatttgtaagtagtgatttaaatttatggaactctgccctcattttataatgcatctgattttggtagagaccagttaggttaagtggagagggatgtaaaaagactaccatcccctgtaactttcaagtgttttgtcatggtagtgatcaattccattccttggagaatgtgattattatttttcaatccttgttgccagtggaggagaatttcgcaggcttcgccttggtcctgctctaatagtgtcccttactctacaggtcaggaagaaagtgagagtcctgccagctgccatgtrtgtccatttcaattacacattcaggaagaggtaataacagcaaactgatcagattcactttgggatggacatgagtcaaaactctaggtagcatctaaccttcaaaaactcccagtgcaggctgggtatgacggctcatgcttgcagtctycacactttggtaggcacagttgggaatatctattgaggccaggagttccagaccaccctgggcttcatggtgagagcctgtctgtacaaaaactaaaaaaagaaaaaacaacaacaaaaaattagtttggcatggtggtgctcacctgtagtcccagttatccaggaggctgaggcaggatactcccttgaacctaaaarcaatatgtgagtcagttgctggccacatccagagtactgttaacaagagtgatgcctggtagaaaagtaatgaatttattccaaacctagcttggggaaggggcacaaagagtcctgcctttaagtgtaccacttcacctttggagcagaaagcagacacttttataagataaggggggttattgagcaagggtagagggtcctyctgcaagcttggtgccttttctaccatgcgggggtctgtcctgcagaycctgactcaatgacagaggagtaatatacacygacacatatattttgcttgtcagtccagctgagcatcctggccacttacagactctaaggaagagtgctgtcagctgccgccccaamttgctggccttcttggcatttatttagaacacattaaatgacaaacgctttgagtcaacaccattagagggtaatcaacctggtcaccttcccccaggagagcaatcctgcctgtgagtgatgaaaggttagctttaggactacctgagtaaacaagctctttagataaactactatacattcctttgtatctgtgccccaagtgcccaggctccggcaaagagactggctgccttcagccaaactatctgaagctatgcaaaaacttttggtcttccaagaaggtttttgttttgttttatacttttcc

SEQ ID NO: 1634 - DNA, 12900 bp, Homo sapiens
  misc_feature (1)...(12900): n = A,T,C or G, or insertion/deletion polymorphism (see Tables 1-2)
caatgtgagagttctgctagctgttgaaactgttaatttcatttaacattctggaagagataataaatataaacccattacatccaccttaggttgaacatgagccaaagctttatgcagcatctgactttcaaaaactcatactccaggmctggtgaggtggctcacacctgtaatccaaacaatttgggaggctgaggtgggaggagcacttgaggccaggagttscagatcagcctgggcaagacagcaagaccctgtttgttaawgaaaataaactgattgtagtactgcgtgcctgtagttccaactacccaggaagttctggcagggggatcagtttagcccaggaatttgagtctgcagtaagctatgattgtgccatttcactmcagcctgggctgcactctagcctgggcaaccaaacaagactctgtctctaaaaacaaaaaaaaacgaacaaccraaaacaaagcctcccactccattctgtgaaacacagtgtctttttttagttctcaaatattattagtgttagttcaggccccatgtttaaaattctgagagtatggatatatgtcctttcctctgggtactgttatggctacaggtgaaatggctacaggtgcttgagaaagggtcaagtgaatatttcctgaatatttttgtggtgaatcttcagtgttgtttaccgagggcatgtaagctttccttcaatcattgaactctgcttctctgaactggctcagtccagagaactggctaagggtttttgattttcaatgtcaaaggctgacctcaggagtcagcttttgcaactcttgtcccctcttggtttataattatttagcaaagtatgaggcctcttcaactatyggtcyatcaacccatttaaatgaggctgttactgtcaccactccattaaatctgacatttgcaagatcaccgataagtctgtgttgccaatggttagttttcatgttgcatgctctatgagcagcactgaacstrgtttatttgcatttcaggatgctgccctctcctgattttatccttgttcactggcacaatttcttagtctcctttgctagttcttcctcttgtctgtaaactgaaaatatcagattgcccaaggtctaaattcttcaatctctaatcaattatgtctggtttttttggtgatctcatgcagtctccttacagataatgtagccacatggttcaatagagaggaataaggctgattattcatatatgttatttatttatatacatatagttacatatatcaaattatrtaaccctttttttcaaatgtcaaagttacatttaaaagtmacaatactaaaaatctrtggagaaggtyggagcatcaataatgtttttacttgaatttctgctaaatcagagtgatggtgaccagatagctaattaagttttatttaaaatagccatgtagattgataggcaggggattatcattatagaaaaaaatgatataagtaaggaaatatacagatagaataatgattgattaacccattttgacttattgtacttggtacagttaatgtcttagtatctcagtaatctstttttatatttttctctatgatcaattaattatgagttaatttttatatatggtatgaaataatrgtctacactcatgtttttatcattctgtttttactcccacttcttaggtaagttcatctagtcataaccttagttactttctgtgtgctgttgatgccaatatttaattcttcagctcagaagtcaaycctggtctctagaatcctttctctaagaagtcatttgacatcttcatttggatgtcktaacaagaacttgaactaacatgtccaaatcaaaatagtgatcttccctctagtctccagmgttgtttcttctatagcctttccctcttctgttaatgaccacttcagtctttcagatgcttagaccaaaaacacggagttaacattttctctctttcagaactcatctctaaggcatcagcaaattttgttggttctaccctcttgttggttctaccctcaaaaacatacagaatccaatcccttgtcatcacttttgccatactcatctaaactgctgccatacctagccaagataattgccatcaactcctaattattctttctagttctgcacatcattttctcctgatgtactctcaagrtagcagccaaagagagcctatgaagatkcaaatttgatcatgccattcttcagctttagatttttcagtggcttctcatctcattagagtaaggccaaaatccttacaaagtcctataatcatttgaatratcggattttgtctgcctgtctgtcctaaaatgcctggctatcccatgctagcaacactggactttgtgtaatttcttgaatgtaccaagaattgcctcagggacttcgtacttgtgtcccttcttctcggaatgctctttctcagaaatcaacactaaacactatcactcatcaaacatcactgaatcattgaggcctccttgatttgatctttgtatatggtgataaataggcatctagtttcatttttctgcaaatggatatccaattttcccagcaccatttagtgaagagactgtcctttccccagagtatgttcttgscacctttgtcatgagttctctataggtgtggatttgtttccacattctctattcyatttcgctgctctatgtgtctgtttttatgccagtaccatgctgttttggttactatagytctgtartatactttgaagtcaggtratgtgattcctccagttttgttctttttgctcaggataactttggctattctgagacatccgtatattttcagaagccattaaaatttagatgagataactaaaaccaattaaaaacaaatgccacaggatatcaaagaccaatcgaaaatctgaaaagtaggtagaggaaaaastttatgtaaaaagaaacaactgtctaaatgacaatcttattttcaacagacaaaattgaagctagaattcaatggaatcatgtcttcagtgtgtttcaaaaccawagcggrctttaacaaatagaaattcaaaagaatattttttagataaaaggaaaattactaaaaatataamgctgaacatgcatgaaggaataataaataatagaagtggtaaatatgtgcataagtctaaataaattttgactgtataaagtgrtggtgtctttttgggttaagtatttaataagatatatagaaatagccatatatagtctgtaagtaaaggtatcaaaaagwgaatttagttaatttaaattyggaattttctatgtctgtgaagagaatttgaaagctatatttgatgaccctgtaattmtctttctatgtatatatccaaaggaaatgaatcaaatgatatatgaaagaatggtcatactagaattattcataactcttcaaaaaagaaaccccccaaatatgtatcaactaaagatgaatgaatcattacaacacattcatacaatggaataatatagagaagtgaaaagaaatgaatcacataaagatgcaagtatgtgagtaaatttcagaaacgtaaaggtgagtccaagaagccatgaacaggaacatacaggactacacctacatatggcttaaaggtttaaagtaggyaaaaccgtatcataragtttagggttgcatacctagttgttaatgtataaagaaaatcaaggccaggcgcgrtggctcacgcctgtaatcccagcactttgggaggccgaggcgggtggatcacctgaggtcaggagttcaagaccaacctggccaacatggcaaaaccctgtctgtactaaaaatacaaaaagttagctgggtgtggtggcatgcgcctgtagtcccagctacttggaaggctgagggaggagaattgcttgaacccgggaggtggaggttgcagtgagctgagatcgcgccactgcactcctgcctgggtgatagagcgagactctgtctcaaaaaaaaagaaaatcraggaaatgatcattctaaattatggctattgctctcctcagggtatgtgaagaaaggtgtaggggcttggagagtggcatggaggtggacmtaggctatttgcaatgtgacatgttttgccctgcttgatggttgcatgagtgtttatgacacattgctatgtttaccatcttagttttcacccatttctaagtgtgcattataattgtatttaaaaattattaactggaaaaatgctccataaagaatattaattattctgctcattgtataccttgcaaaaaattcaccatttatacacatttttatacaactcttagagagttgaagtaggaactttattttagctgcaacatatggaaatttcagatgatgctacctgcagcacacaaatcctttcaaacatttttttattacctttaattatctacctcacrtgacaaaactttgccactccccatctatttttcttttggctcctgaattcctgacaaaacaggggcaaatatatttccccacactcttggtgtagcatagtagctgtaccagttaggtttttctactagagaaaccctccaaaactacgttagatatttttatctcatatatctttggattcaggttttctaagctgggtttggtggatagctctggtgacttgagatgggccaagttctgcatcttggagctagttagactttggccaatttaggatggatcaagtgcaggcaaactgactccattagttttcattctcattctgaaaacagtgtactagccaggtgataatctcatgatcaatggaaaagagcaagaaaccccaatatggaagccatctcaaacctcggtgtgaaatctaccaattttctgttcatcaaagaaagttgtgtgagtgagctccgagtccaggggacagataatcamcctgcttatggtgggaggatactgcaaaattatgtgtcrtagggtgtggtactcaggaatatttacaaaattgttgaacattttaattaaataataaatacttaaacattaaatagacttgagagtaagtttaccaaatgcttaagcatgaaagatatgtttgatgtttgatacatttttttggggggggtctgaaaaccctcagttttcactgggaaaataggactaatttcacgtggatggcctccaggagacttacttcccattttggaaagtataagaaaataattccttccatctcttaggggtgtcacagtctctctctctctctctctctctctttctgtgtttgtatctatttatgaacatggtaacaataaattcacacaaaagtattgggttagcagcaaccagattttaaggtgttttggtcttcttatggttcccaagaaaaccttggatgattttgatttaaaagtttggattctgtctgtttaaatgtagcataaatagtaaatccgttatggtggtgatcctagttatgactaaggtcttttaaagaacttagacatttactgtatgaacgatggactcgggggtaaaatttccctatctaacagctgaagttgctgaacacaaattacgtatcggttaaacaaggaaaacattgcaaaatattgaaagagaatatgtctttatttgcatgctggtaaatgaaaatttaggtttcacttcaacttcattatgaataattcaagcccatcacaagaacggacattgaatgaatgagttaatttgagctgttttgaaaataagaatgttttccrtaaagatgacatcaaactcatccattagcataagctggtactttcttgtttgacactggtcacagtrtttaaaagtaaaaagaatgttactgcacattcagaaatcagatgcacataaaatttaaggtcagagtattaaagaaatcacaaccagtgatattaggcttgcattttctttctttttttctgctcagatatgataacttttctatacatttttttttcaattctaataatggttttatttgttctcggaaactttgccaatggcttcatagcactggtaaatttcattgactgggtgaagagaaaaaagatctcctcagctgaccaaattctcactgctctggcggtctccagaattggtttgctctgggcattattattaaattggtatttaactgtgttgaatccagctttttatagtgtagaattaagaattacttcttataatgcctgggttgtaaccaaccatttcagcatgtggcttgctgctaacctcagcatattttatttgctcaagattgccaatttctccaaccttctttttcttcatttaaagaggagagttaggartgtcattctggtgatactgttggggactttgatatttttggtttgtcatcttcttgtggcaaacatggatgagagtatgtgggcagaagaatatgaaggaaacatgactgggaagatgaaattgaggaatacagtacatctttcatatttgactgtaactaccctatggagcttcataccctttactctgtccctgatatcttttctgatgctaatctgttctctgtrtaaacatctcaagaagatgcagctccatggagaaggatcgcaagatctcagcaccaaggtccacataaaagctttgcaaactctgatctccttcctcttgttatgtgccattttctttctattcctaatcgtttcggtttggagtcctaggaggctgcggaatgacccrgttgtcatggttagcaaggctgttggaaacatatatcttgcattcgactcattcatcctaatttggagaaccaagaagctaaaacacacctttcttttgattttgtgtcagattaggtgctgagtaaaagacctgaaactctcaactctctagattcacaagtgggacattgtgtgtgtattctaggagaaaacaaactgatagtgtctggaacattttatactttttactgttttttctgtagtgtatgtttttgagtattttctgaaagcatacctagaaaagtcttttacctaaagttagtctaaaagtgtatctatgtgtgtgcatctgtatatgaaagacttaaaagacattgacaataacataatgttaatcatattttcacaagatgccaaattatagaaaatatggtaagaagtttttcagaatcatgaacccatgtatatttcacatatacatttcatattatcatgtttcacttgaaaactgtgtgatctttacttataattgttaagaagtgacacattatctcaaaatctttgctcttttccactgatttttaccacacatatgtaccacagtgtgcttaaacatctaaattttttgatagtaagcacactcaattctaaatcaataatgaggtttcatytttggggtagtttttatttcatcatgaattctaattttatgtttagtttatagccagcataattattttcagaaaaagatgcacagaataatattcaaggatgacaaatatatttagaacacattttgtatatgtctaccataaacagtactgaggaataatagacttaatacaaatatgtgaacatttgagaaaaaagtcatttctataataaggatgaagaaagaaacaccgygatgacttatgttgtcataagtctcaacatgcagttagaaaagtcatttcttccagtttttgagttaaagaaaaccttttttgaagttgagatctgatgtcaagtatttcaggttttttttttctaaaccacctcagagtccctgaattgccaatgatctcctctatcttccatacttgaaattctttttaaacttcacataaaagaacttgagtcttccctaccttagaaaaatactctatgtaaaaatastatagaaattataaaaatcatttgaattaaactttttgcaaatgttaaaatggcatctatgaaatctatgtattaatgatagaaaacatctaaaatatatgttgtattataatctagttgcaaataatacaatgagacagtgtgttgatatattcagtaatagcaagttctattataggaagaaaatgtataacatcattaaacaattaaattctataarctgtattaattcttggagttatgaaattttaacaatattatctaaaccttgggacaaatcatctctacatctgatttagttatttgt[450 bp omitted]tatctttgcatacaatttttcagttgtgaatgatatatttgtattgtgatatttccagctggttagtgtataaacaaaaatggcatttcattaaaaaaaactgagttagttaccaactaccttactaaaacgtgacttttatagaatattttaaaaccctttctaaatgaacatttaaattgccatattaaaaacccacagaaaaatgcataaataacaattataacactaaacgagtatcttasccttgggtgtctagaactagagccaatgtctgatgttaaagtgataacatttatttggaagataagtccagggcagcaatggccaggacatgtggaaattgaggcaaagcaaatgtgaaaccatgtcttgtgatgtatgatatgactctgctgatgaccacttcacaatgagatgagagagacagcatggtggtcatcagatgcgtggacttgactcccagtacttttccagaagggctgcaaggggaaaccacagccggcattagtccacggaagagaaagagaagagaanatgtatctgctcagctgtcttctgtcttctatttcccattggccagggtttccctgaggcagaactaccatctctgctgttctgcgttccatcatccagtcccttggtggtagttatgaaagccaaacctcatgcccccagtgtggtgttccattgaagtcccaaatggaaggatgatctggatcaagcaaggtgctgaccaagaaaagagaagacagtcaagataatctgaggaaggatatgtttgtgggcaatactgtccactccttgtgcaactcagattggctcatgccctccaatcatggctggctttataggcatatgacttcacagttgcacagggtcttgtgcttagaagtgcttatgcttagaggggctttatgcttggattaatcttctgcacttgctgttttgtttttcagacagaaggtagtcctctgctggagaaggaatagtcttccactaattcgctaggagtttgctctccccactcctatgggcttgtgagaggcatgcacagagtcctataatgcccactatgcatgcctgtagcaactttgaattctgttacatcatctggcacaatggccaagcaacttgggccagactctatatctgctatagagcccgtttttgtttcgggtttgacttgagacaagcagcccttgcaaactcctttagtgagtcagagaaatatccttaaatgtggtatatgttgaattcaaaaccccaataagcccccataaaactgtatttcccttttagtgataggaartatatatatatagggcaacatgccatttactgtaaaaaggatgttttgacaaaaggaccagaagcattggacccctataaacttcatctatgttataggtctttgaatctgctgaagtttatgtctcttcttccagtattttacttctgttcaatgttataatattttactatacttaaggaacttgccacttcctgcttatgggtaccactttatgtaatattattaatatattgaattaacatgatgttttgcaaaatgtcaattaaactgaaagcagaagtgacagccctgacagaaaacagtgaagcagtgttcttgtttttaccacaccaaagcaaattgttttgattttcctccacaatgtgtgtagattaaaaagcattagctaaatcaaaagccgcatacaaagtgctggaaaccacattctgctcagtgaagataccacatcctagagcgaatgtgcaagtgtgacttaagtttatgctaatgtgcattcatcctataatccatctggttttgacagaggccagttaggttaactgaataaagatataaaatggacgaccgccccctggaacttttgagttttttgttgtggcagcgaccaattctgtttcctggagaatgcagttattatgttttattcattttattgccaggaaagtagaatttcagaagcctccccttggtcctgcttacaataatgtcccttggtatacaggtcaggaagaaatgtaagagtcctgacagctgttgaacctgtcaacttcamttacactttcaggaaggggtaactacgatgaactcattagaacccctttgggttggacatgggccaaagctctatgtaccatctgatcttcaaaaactcatactccagtcctattgaggcagctcatacctgtaatcctaataatttaggaggccgaagtgggaggatcactttaggctgagagtttcagatcagccttggcaacayagtaagaatctrtaaaaaaaaaaaaaaaaattagttgtttgtggtagtgtgtgcctgtagttacagctacccagaagactcaggcaggaggattgctttagcccaggaattcgagtttgcagtgagctatgatggtgtcattgcactccagcctgggcaatcaagcaagatcttgtctctaaaaagaaacaaacaaaaacaacaaacaaaagcccaaaaagggcctggtgcggtggctcatgcctgtaatcccagcactttgggtggstgagtggttggatcacttgaggtcaggagttcgagatcagcctggccaacatggtgaaaccccacctctactaaaaatacaaaaattagccaggtgtggtggtgttgcacctgtaatccaagccacttgggaggctgaggcatgagaatcacttgaacccgggaggcagaggttgcagtgagctgagatcatgccactgaactccagcctgggcgacagagcgagtctccacctcaaaaaaaaaaaaaaaaaaatccagaagtaaaaatttgccaccgtatcccatggaccactgtgtcttttggggtacccagatattagtgttagttcaggctccaaacttaaaagtctcarataatatggacgtgtgttctgttctctgaggactgttttctggggaatagctacaggtctttgagaaagcaacatatgatacatcctgagtgttcttgcagtgcattttcaatgtccatcatcaagaggacttaagattcccttcaatcattgaattctgcttctctgaattggctcagccctgagaactggctgagggttttccattttcaatgttaaaggctgacctcaggaatcagctttttcaactctttccccctcttggtttataattatttagcaaagtatgaagcctcttcaactattggcctatcaacccatttcaataaggctgttgtcaccacttcattgaatctgacatttggaagatcaccagggagtctgtgttgccartggtcggtcttcatgttgcatgctctgtgagcagtactgaatatagtttatttgcattccaggatgctgccctctcctgattttttccttatttactgggcaccacttctcagtctcctttgctagttctctcttgtctctaaattgaaaatatcacactgcccaaggtctcagttcttcaacctttaatcaatcgggcttgttttgttggtgatctcatggagtctccttactgataatgtagccaaatggttcaatagagaggaataaggctgattattcatatgtatttatatatattatttatttatgtacatctatttacatatttctcattatataaagcttttttcttcaaatgtcagttacatttaaaagtaacatgaccaaaaatctagggagaatgtgggaggatcaataatgttttcacttgagtttctgcctattcagagtgatagtgactcagtatctaatttagttttatttaaaatagcaatgtaaatattgatagattgataggcaggggataatcattatggacataatgatctaagtaaagaaatacatagatagaattatgattgattaacccattttttatttcttgcatttggtacagttagtgtctcagtatcgcagtaatcatagttcttaagtttttgctccatgatcaatgaattatgagttaatttttgtgtgtggtataaaataagggtctaaatttatgttttttctttctcttttggctcttactttttaggtaagttcatctggtcatggccttactttctgtgtgctgatgatgtgaacatttaatccttcagctcagaacccaaccctggtctccagaatcctttctctaatagcatatttgacatcttcatttggatgtctgacaagaacttagaactaagttgt

SEQ ID NO: 1635 - DNA, 12930 bp, Homo sapiens
  misc_feature (1)...(12930): n = A,T,C or G, or insertion/deletion polymorphism (see Tables 1-2)
catgttgcatgctctattagccacattgaacatagtttatttgcatttcaggatgctgtcctctcctgattttatctttgttcactgggcagcacttctcagtctcctttgctagttcttttttgtctctaaactgaaaataccaattttcaacagggtctcaattcttcaatctctacaatgatgcctgttgtgttggtgatctcatgtattctccttactgacaatgtagtcaaatcagtcaacagacagkcataagggtgattatccatttatattgtttatttattcacatatcttggtatatagcacattatgtaaatatttttccttcaaatgtcaaatttacatttagaagtaatagtacgatggtgggtgctctggcttaagcccgtaattgagcagcttgggaggtttaggcaggcagatttcttcagcgcaattagtggagaccaacctgggaagaacggcgaagcccagtctctagtaaaaatacaacaattagccaggtgtggtggcatccatctgtagtcctagctacttgggaggctaatgtgggaggatagcttgaggctggaactgtagacagcagtgagccaatctcaaaccactgcactccatttggggctacagagtgagaacatgtctcaaaaaatgaaaaatagaagtaataataccaaaaatctaagggaaaagatggagtattaataatatttttgcttgaatttccactaaatcagagtgagggtgacccaccatctaatttagttttatttaaaatagcattatacatattgatagattactatgcaggggattattattattatagaaataatgatctaagtagagaaatatacagatggaattatggttgattaacccacttatattacttgcagttgtacaggtagtatgttttagtatcttagttactaatctcaccttttatgtatagctctataatcaaatatgagttattttttgtgtatggtatgaaataagaatataaatttatctttatgcatgtcctccaaatgtctttcagacctccaaatggataaacaaattgtggcatacttatacaatggaatactatacagtgatcaaaattaatgaactagacagacatgtttacaacagaataatacaacaaagaaaatgaacaaatttgagctacatagataataatactcacaaatgtgagaggaattannnnnnnnnnnnnnnnnnnnnnnnnnnnnnnnnnnnnnnnnnnnnnnnnnnnnnnnnnnnnnnnnnnnngatatactgtattattgcagagagtatttttctatattcatattgaaaaatgcccaaaaagccccaaaatagaatcctaattattggatgtcacttttgctatgaatttttaaaatgtagtaaaagaaaaagaagcaaagaaattcttgaaaatatgttggttttacattattcttgatgaactaccacatgaggatacttctctaggcctgatgctgagaatcatagaagaaacatgaggccatgaggaagaatagtagggttctctcactaccctgaactccagtacttaaaaaacaagatggaaatcacatttatcaaatagcattctcccttttacctgccataattattatcatcatcatctatatatacatctatctcattaaatgatatatttttgaaatatttaaatacataatttggaaaataagtaatttttaaaagaccatcattgtgggaaagttacaggagtaaacagcaaagcttagtcatgctcaatacatgtagatttagaaattaagtatagcttattttacaatatattgcttaagcaaataattatttatagatgagcttaaactaatctttgtttcattatgatcactatagaaacaatttagattttagtgtaactaaaactaaccagtaagaaggacaaagcaaatgatacattttatgagctagcttttatttctaagagaggattttaggaccaaatagtcaaacagagttaagacctcagatcttctgtcacacttgtgtgagtgatggtggagttcgaaagttatagttctataaacaaaactatactcacggatagggattaaatggtggaattctttagaaacaccagattcagttttgtttccatgagacttaaagttcttcaatctttcataaacttgtatgtactgttttactctttgatcttttaaagattgttataaatgaagaagtcttgatttctgctaataaaaacagagtaaaatttaaatcatggaatagaaaggtggagctgtrgttgagatattatattttattaattgtaatgacaktttgagatccagtgctgctcactgaatttccctgtgaggagagtttgtggtgatgacccagcaacagacaagctactatccaaaaaaagctactcacatcaaatcaatttccagtttcttccaagttgcaggagaatgcgtagaccataattttaatctcttctgtgacctaagtattacaaaaagaagaaaatcactamaattttcatgtcaggtgtrctaaaaatttayaaaaactattttttaagaasttggtgttataaatactttgtttagtttctccattaaaaatgatttatagcaagagaataaaagttcatttctacccctaaaacaataagataaaaaagagtaatgaatattgagaatccaatagacagakttgagaaccagttaaacataagaaagaattagtgaattggaagataactgcccagaatgaagcataaagagaccaagaggtagaaaatataaggctagagggtcagagacattgaagctacaatcagaacaactaacatacttctgcagttccagaagattagaagagagaaaatgggccagaagcattgtggagatttttccaaaagtggtaaagtgtatcagttcatatatttttagaaaccatcaaacttcagacaagataactaaaaccaaattaatataaaatgacaggacatcaaagaccaataaaaaacctgaaaggtaactaaaggaaaagacagattatgttaaagggaataactgtctaaatgacaacctgattttcaacagacaaaaatgaagctagaattcaatggaatcatgccttcagtgcatttcaaaagtagaatagaccttgataaacagaaacttaaaatgatatttttttcagataatagaaaaattattattattatcagtattattctatgtggagttggagtctcaatctggtgtccaggctggagttcagtggtaggatcatggcttactgcagtctggaactcccgggatcaaaccatcctcccacctcagccttgtgagtagcttccttatgcctggctttttcatttattgtagacacagtttcgctgtgttgcacaggctggtcttgaactcctgggtgttcctgactcagccttacaaaatgttgagattatgggtgtgagccaccctgccttgccaataaaaggactttttgaaactattaaattgaatatgcaaaaaggaatacaaattaatgaagtggtaaatatgtgcataattctaaatgaatgtttactgcataaaataataatgtcttgttggggtaattatataattgataagatayatgcaaatggcaaaaaatagaatggaggtaaagctgacaggagtacatttagttaaattatcttttaaacttttctatgtctatgaggatattttgcacaatgaccctgtaattctactcaaaggtatatatacagaggaattgcatcaaatgatatatgaaagaatgctctagtagaattattcgtaactgttcaaaaaagaagctggccaaatatatattaaggatagatcaatcattacagtaaatccacacaatggaacartatagagaagtgaaaaaaaatcacatgtacttgcaactatgtgactaaatttcagaaacacaatgttgagtccaagaagccacaaacaagaagaacatgtaggattgcacctacacrcagtgcaaagcaggccagaccaagcgatggagtttagsgttgcatacctagttggtaaagtgtaaagaaaattaaggaaataatcaccataaattttggatatygcttatctcaggaggtatgaagaaatgtttagggacttggaaagtggcatggaggtggacctaggttgtgtttggtgttccttgtcttgcctgcatcatggttacttgaatgtttatgatacactgcrgtatttcccatttttgttttggttcatttctaagtgtgcattataattttaatgtaaaatgtttaattaggagatatgtctcatagaaattattattattcatctcattatatactgatggcaataataaactatttgtatacattgttatacaactctaagggagttgaagtgagcactttcttatttagttgcaacgtgaggaaatttgagatgatgttatcctccaaccccagaactttccaatggatttcttctagccttaattatcgacctcacaagaacaaacctttgcaatttcccatctrtttttgcttttggctcctgaattcctgacacaacaaggttgtacatatttcccacactcttggtttagcagagttgatttatcagttatgtttttctgcaagagaaaaaccctccaaactacattagatgtttatatctcacatgttgttggatttcattttttttaagctgggtttggtggatggctctgtttatttgaaatggaccaaattctgaatcttggtagtagttagagtttggccaatttggtctggatcaggtgggggcaatctgacttcattagtttctcactctccttctgggaacagtgtactagccaggtgatattctcatggtaaatggaaagaggaagaatccccattatggaagccatctgaaatctctatgcaaagtgtagtaattttctgtttatcaaagcaagttaaatggttgtactccaagttcaggggcaaggtagtcagycttctcagtgatggcaggatactgcaagactatatatcaaagggttgggtactcaggaattcttatacaattgctaaatgttttgtatagtaataaatatttaaacattagtcttgagagaaactttaccaaaggcctaagaattagagatatgtttgataaataaatattattcrtgagctgaaagccctgagtgggaaaataggactaacttcacctagacaacctcctggaaactcctttttttattttggaactgatgagaaaataatttgttccattcgtgagtggtgtgcacatgtgtgtgtttgtgtgtgtatttatgagcttgtgaataatgaagttatacaaacgtattagcagcaaccagattctgaggttctccagaaaatcttagatatttttgataaaagcagtttggattctgtgtatttaaatctgtcattwaaaaaagtccatataggtgatgaacttaattatgaccaagctccttttaagaatttagacatttactatatgatctctgtattgggttataaaacttccctaacaactgaagtcactaaagacaaatgatggagaggttacacaaggaaaaattgcaaacactgaaagtgaatatgtccttgtttgcatactagcaaatgagaattcaggtttcatgtcaacttcagtatgaataattccagcctataacaaggacagacagtgaatgaatgggttaatttgagttgttttgaaaataagaatattttccataaagagagcgttgaacttacccattagcatgccatggtgatttctggcttgacaytggtaacarcaattaaaagtaaaaagaatgtcacagcacatacacaaatcaggtgcatatagaatttaaggtcaggatattcaagcaatcacaaccagtgatattacaccagcattttaaaaatttctttttgtctgttcagacatgataacttttctgcccatcattttttccattctaatagtggttacatttgtgattggaaattttgctaatggcttcatagcattggtaaattccattgagtggktcaagagacaaaagatctcttttgctgaccaaattctcactgctctggcagtctccagagttggtttactctgggtattagtattaaattggtatgcaactgagttgaatccagcttttaacagtatagaagtaagaattactgcttacaatgtctgggcagtaatcaaccatttcagcaactggcttgctactagcctcagcatattttatttgctcaagattgccaatttctccaaccttatttttcttcacttaaagaggagagttaagagtgttgttctggtgatactattggggcctttgctatttttggtttgtcatctttttgtgataaacatgaatcagattatatggacaaaagaatatgaaggaaacatgacttggaagatcaaactgaggagtgcaatgtacctttcaaatacaacrgtaaccatcctagcaaacttagttcccttcactctgaccctgatatcttttctgctgttaatctgttctctgtgtaaacatctcaaaaagatgcagctccatggcaaaggatctcaagatcccagcatgaaggtccacataaaagctwtgcaaactgtgacctccttcctcttgttatgtgccatttactttctgtccataatcatgtcagtttrgagttttgagagtctggaaaacaaacctgtcttcatgttctgcgaagctattgcattcagctatccttcaacccacccattcatcctgatttggggaaacaagaagctaaagcagacttttctttcagttttgtggcatgtgaggtactgggtgaaaggagagaagccttcatctycatagattcacaagagcagcattgtgtatcttctagcagaaaacaaacgtgttatatgaagcattttatatttcttactgtgttttctgtaatgtatgtatatgaataactttcaagcatgtacctagaaaagtcttttacctaacgttagtctaaaaaagtgcgtatgtatatatatgtatttttgtgtgtatgtttgtatgaaaaacaaaagaacattgacagtgacatactcttttttgttttttcacacaaactgccaaattatacaaaatatgacaaaaattcttaagaattatgaatccatacctatttcatttatgtattttatatttcatttgaataatttatgatctatatttataattattaagaactatcagcttatctcaggaaagacattgctgttttctattgttatttgaaccacacaaatataccacagtgtgcttcgaattcattgtttgaacctgtaactttttggatggtaaggtcattcaattctaaatcaataataaggatgtgtctttgaggttttattccattatgaattcctattttatgtttagtaaaaagcaatcagaattattgatagaaaacaatgcacacaataaaatttgagtgacaagcatatgtagagtaagtttcaactatgtctaccataaacagttctgaggaatattagatttaatacaagcatgtgaatagcttagaaaacaatctcttctataatagggatgaaaaatcatgattgtgatcttgattgctattatcagtttccatatgtagttagaaaagtcatttcttccagcttttggattaaagaaaagctttttttttgaagttgagaggtgatgtaaactattttagtatttttttctaaagcacttttaagcccctgaattgttaattatacccttaccttccatttataaaattccttctaaacttcaggtaacagaacccaaatcttccttattctaaaaaaaaactatcaatgtaaaaatagtatagaaattatggaaaataaatcaatgaaatttttgtaaatgttaaaatggcatctatgaaatctatgttttaattatagaatgtgctttacagttataattttgttgtcaatgatgaaatgaaagtggttgacatattcattaataggaagttctattatgagatggaaatgtacagtcttgttcacagctaaattctacatgactgtattaattttggtgttatgaaattttaaaaatgtgatttaaaccttaagataaatcatccccacatgtgatttatgtgtttttttaaaatcatgtatcttcctcagtacaatgtaagaactgtaaaatcagatcagagatgatctcatctctgtcttgctttctgttgaatgtaagatcagagagcaagatgatctcatctctttcttgctttctgttgactcccaggacctagaacccagcaacaagaatagatggtcaaaaatgatattttaatgaacaaataaatgggtggataaaatgggtaagctgatgtggtaaaccaatgaaagggaaactcatcacaaaatctgcagttgcrtgarttcccctgttctgttctcaggttaaggttacaggcttatccaagcagaatccttccgcagaggaaaagtttggctattccacaattttaggggaaatatgacaataatatagtcttgatgcarctgtatcaggtgtctgaattggagacaaggtagaacatcaaaattagatggcgcctattacaatatttttagaaagcgtataaacaaccttggtctatttgaatatgtatttttttctattgtgaattatatatttgtattatgatattttctagttgattattatttaaacaaaaatggcatttcattttaaaaattgagttagtaaccagctactttactaaaatgttttttatgtattacctgttattaaggtgatgacatttatttagaaatcaagttcaagacaaaaatggcaaggayatgtggaaattgagacaggaacaaatgtgaaacaatgtgtggtgatgtctggtatgrctctgctggcagccacttcacagtgaggtgagagagacagcatgacggtcatcagatgcgtacacttggctcccagcacttttccagaagggctacaaggggaaaccacagccggcattagtccagggatgagagagaggagggagaatggagaatgtatctgctcagtkgtcttctgtatttgatttcccattggccattgtttccctgaggcagaactaccatctctgctgttctgccttccatcatccagtccctaggtggaggttgtgaaagtcagacctcatgcccacagtgtggtgttccattcaagtcccaaatggaaggatgatctggatcaggcaaggtgctggccaggggaataggagatagtgaagggaatctaagaaagcacatgtctgtgtccaataccaccactctttgtgccgctcagatgtactcatgccctccagtcatggctggctttatgagcatatgacttgcacagttgcacagaggatactcctctgctgaagagggaatggtcttgcactaattccatagggatttgctctcccctctcccacaggcttgtcagagacgtgcacagagtcctataatgcccactatgtatgcctctaacagctttgaattctgctggatcatttggctcagtggccatagcagtttggatcagaacctatatctgctgtagagccctcttttgttctgggctccatttgagaccagtagcctatagaaacttcattaatgagtcagagcaatattctcaaatgtggaatatgttggctccaaaatcccagtaggcccccaaaacactgtgtctcttttgtagtgataggaaatatagagagagagcaacatgccgtttactttaaaaaagattgttttgacatgtggactagggacactgaaaacctgaaaacatcacctatgttgtcagtccctgaatcttcacatatctcttttcttctggtattttacttccattcaatgttatagtattttacaatattaagaatcttgcctcttcctgtttattttaccaaataatatataattattatttgagacagggtctcattctgtccatgaggctggagtgcagtggcaggatcatagctcattgcagcctcaaccttctgggctcagttgattctccctcctcagcattgctagcagctgggactgcagggacacaccaccttgcctggctaattttggtattttttgtagggctgggatttcaccatgttacccaggctggtttcaaactcctgggcccaagtcagcctcctaaagtgctggaattacaatcatgtgccacagggcccgggctgtaatattattaatatattaaattagcatgatgtttttaaaaaaatgtaaattaaacagagaacagaagtgacataktcctgacataaaacagtgaagcagtgctattattcttacaatacaaggcaaattgtcttgattttccctcataaagggtgtagattaacaaatattcaccaaatgacgagccccgtaaaaagtgccagaagctatgctctgctctgtgaagacagtacatcctagaaagcatttgtgagtgttgattgaagtttatggtaatctgcactcattctataatccatctggttttggtagaggccagataggttaagtgaatccrgttatagaaaggwctaccatcccctgtaacttgcaagtgttttgtcacggcagtgaccagttccattccttagggaatgcggttattatattttatacattgggttgccagcagtggagaatttcagaggcttcaacttggtcctgctataataatgtcccttactctacagttcacgaagaatgtgaaagtcctgccagctgccatacgtatccagttcaattacacgttcaggaagaggtagtaactacaaactgattagatccaccttgggatggacatgagacraarctctaggtagcatctgaccttcaaaacctccccctgcaggctggatgtgatggctcatgcctgtagtcttagtagtttgggaggccaaggtgggagaatcccttgagagcaggagttccctttgcaacatatggaaactccatgtctacaaaaaattgaaaaattagctggcgtggtgctgcatgcctatagttccaaatasttgggaaactgaggcaggaggattgyttgagcccagggtttcaaggctgtagtgggctatgatcctgccactgtactccagcttgggtaacagagggagactctgtctaagaagaaaaaaaaaaaagtgaaagttcttactggtgtcttaaatatcaagtaaaacaggttcaaatcaataattaacaatctttggttcctgcctatagcaaaaaggtaaaatggaaagcagttatacaaatagtatgttaactcataagaaaactagccaaagacagatttattatcatctgctttttttgttgttgttttctcgagacggagtctagctctgtctcccaggctggtgtgcagtggtgtgatctcgactaactacaacctccacctcctgggttcaaatgattcttttgctgcagccatctgagtacctgggattacagacgggyacyaccacacctggctaatttttgcatttctagtggatatagagtttcaccatgttggccatrctggtcttgaagtcctaacctcaggtgatccacctgcctcagcctgccaaattgctgggagccacgggcctggccaatcatctgctttttataggtgataatactgaggcagggagtagttgtaaaatggagtctcagatcatagctataccaagcagggaatctggtttcctgtcctggcagtctgactccaagatcccctcttagaaaccatcatactgtaaaaactgaaargaaataaaaatccaagattggagactgattttaacatctattcatctaaaccattaagtaatcaaaaatgaattaaatagaggaaaatacaactgactattcatacacagagaagtgtagactcttcaatggaaaacatgttttttaagtgcccaaggaatagttataaaattgctgagtattttaattaaacaactaatatttaagtattaggctcaagagaataatttagtcaaagtcctaaatatgagaggctaagtttgataaagattgaaaatgcactgaaaagcccaagtaagaaaattattttttcattttagaaattataggacaataatatttcccarctatgaggtgtgtgtatgtgtgtgtgtgaacrtgtttgtgttaatgagcttgttaacaataagttatacaaaattattagttggcagcaacsagatttttaggaatattggccttcctgggcttcccaagaaaacsytggatgcttttggtaggaaaagttaggactcactaaatctggcacagaaaaggtgaatcaacagtggtcgtgattctagttttgaccgagctgcatataacagtgtaggcatctgatgtasgatctatgtattaggttagaaaatttcccttacaactgccattgctcagcacaaattatagagaggttaaacaaggaataaatggcaaaatgatgaataagaatatgacctgatttgcatgctggcaaatgagaattcagcttttacttcaacatcagcatgaaacattttatcttataacaaggtcacagcatttgaataggagttaatttgagctgttttggaaattatcatgttttccattaagacagccttgaactcattcagtagcatggcccggtgcgttcctgcttgacattagtcagagaatttaaaaggaacaagaacattactgcacaatcagaaatcaggtgcacatagaaattaaggtcaggaccttaaagggaatattgcccattgatattaggcctgccttaaaaaaa

SEQ ID NO: 1636 - DNA, 12885 bp, Homo sapiens
ttctttaaatattttaaaaagtaagagataagcaggaagtctacctccacattcttaatgttagttttactatgaaacatcagattctggccgggtgcggtggctcatgcctgcaatcccagcactttgggaggccaagttgggtggatcacgaggtcaggagatggagaccatcctggctaacacggtgaaaccccctctctactaaaaatacaaaaaataagccaggcctgatggcaggcgcctgtagtcccagctactccggaggttgaggcaagagaatggcatgaacctgggagatggagcttgcagtgaggcagagcttgcagtgaggcggagcttgcagtgaggcggagcttgcagtgaggcagagcttgcagtgagccgagatctcgccactgcactccagcctgggtgacagagcaagactccgtctcaaaaaaaaaaaaaaaaaaaaaaaagaamcatcagattctgagcatctgtattacactagacacctttttttcttatttccaatttcattatttatgataacatttcaaagaggcagaaattagtgaatttccaataaattatagtaatatagatattaaatacacaggacaatttytataaatttatctctaaatgaaataattatgcccatttttaccattcaaagattataycatgcatgtgtacacatatgtgaggaaaaatattttgatagtacaaagtttttgaatattagagaagaattagtagaaagataattttgttgaggcataaagcatatttagtgtaactactttgactgctgtaataaaatcacccagattttgtsacagtagctgagattaaaaataaacagtagagagaatttcacttgttaataatgctattaaaagatgaagcttatacactttataattgcacagagtatttgtgtaagttcatataaaagtggaataaaattaaacagccaaaaagagagtattctttgctagaggtcacttttggggtaatttttagaatgtggtaaaagaaaaaatatcttgcaaatcattagaaatatgttgattttgtgttactcttgatgaaatactatgtgagggtatttgtctaggcctgattctgagaataatataagaatcgagccaggcaccatggctcatggttgtaatcccagcactttggaagttgagactggtggatcacctgaggtcaggagttccagaccagcctggccaatatagtgaaacccactgtctactaaaaatataaaaattagctggatgtgatggacagcacctgtaatcccagctacttgggaggctgaggcaggagaatcaattgaaccttggaggcggaggttgcagttagctgagattgtgccattgcactgcagcctgggtgacaagagcgaaactccatctcacacacacacacacacaaaatgtaaagccatgaggatgaataatagtgttctcccaccacccttaactctagtgctttgaaaagaagactcgaatcacaattatttagtaacattctccctttcaggtgacatcatcatcattattatcatcatctacatttacatctgtcttattaaatgatttatttctgaaatatttacatacataatttgggtaaygtctatgtaatttccaagagatatcattgtgggaaagttacattagtaaacagcaaagttcatgtcaggctgaatacattgagatttagaaagttaagtgtagtgtagtgtagtttaaaatacattgcttaagaaaacaattatagatgatattaaactaatccaaggaacactataaaaagattttgattttagtataaataaaattgcttagtaagaaaaataaataaaccatttcatgatcaagctcttatttctaaagagaggattttagggctaaataaatcaaacagaagtaagctctcccccacawcttgtctatatcatttggataatgatgtaattcaaaggcacagagcaccttttcaacaacataagcaaagtgaaaattatgtcatggaatacaatgatgtatctgyggttaatgaactatattttatctattgcaatgatattttgaaatccagtgctgctctttgagttccctttgagcagagtttgtggtggggacccagcaacagacaagctaatatccaaaaaaagstactcacatcaacttaatttccagtttctttcaaattgaaggtaaattctaacacaaagcttttattctattctctgactaaagtgttgggaaaagaagaaaattgttaccgttttcatttctaacatactaaaacaaaaaacaaaaaatcaaaaaaatcagaaacatttttaaaaagaacagagtgttaagagtagtttgttcagttttcctatagaaaataatgttcagaaagagaataaaagattattctgaacactaaaacaataagactaaaaaaatgaaatatcagtactgagaatccaatagaaagagtcaaccagttagagyackagaagagataattagtgaattagaagatagctamacagaatgaagcayagagagaaagaaatggaaaatgcaaggctagagggtaacacactgatgctatcatcaaaacacctaacatacttgtagagttctgtaagattagaggagagaaaacagagcgagagaaatgttgcagggatttttccaaaagtgaaaatgtatcccagcatatatctttagtaatcacaaacttcaggcatgataactaaaatcaagttaacaaaaaataatacaggacaccaaagaccagtagaaaatctgaaaagtagctagaggtagaagatagagtatgttgataagaaytgcattctaaatacaacctgattttaacagaaaatatggaaggaggaattcaawggaatcatgtcttcagtgtgtttccaaagagtagtagaccttcataaacagaaattgaaaatgatatttttcagatataataaaaattactgaaaatacaaagttgaacatgcaaggagcaataaaaattaatgacgaaaaataagtgtgtaattctaaataaatgttgactgtataaaacaatattgtcttgttggattaaaygtataattgatamgatatatgcaaatagcaataaagagactggagataaaggtgacaggaataaatttagtcaaactgtgttttgggcttttctatgtctgtgaggagaatttgaatgtcataatcaaggacsctgtaattctacacccagctatatawatgcaaaggaattgtagcaaatgatatgtgaaagaatgctcattgtagaattattctaacagctcagaaaagaagctgcccatatgtacatcaaataaggatgaataaataattacaataaaatcataaaatgraaaaacatagagaagtgaaaagaaatgaatcacatgtacatgcagttatgtgattacatttcagatccataatgttgagcacaggaagccatgaatacgaacatataggattgtatctatacagagttccaagcagaccaaaccaagctattgagtttagggttgcatacctagttggtaaagtataaagaaaaattttaaaaaatgatcatcataaattatggacgttgcgtattacaggaggtgtgaagaaaggtgtagagggatggaaacacattgaggtaaacctaggctgttagcaacattccatgtcttgccctacctgatggttacatgagtgtttatgacatattgctatgttttccatttttgttttggctcatttctaagtgtgcagtctagttataatataaaaattattaatcagaagaaatgttccatgaaaattattattactctgctcattatataccaaagggaaaaatacactgtatacattcatgtacagctctamaagattttaattagaaaatttttgattttagttgtgactactgaaaatttgacaagatgtttcctgccaaccccagatttttcagtagatatttcttctagttttaattatctacttcatgtgacaaaacattgacattttccatctatttttcccttggatcctgaattcctgacacaacaggggtggacatgtttcccacacgcttggcttagcagaatacctatatcayttaagtttttctgcaagagaaaatcctccaaaactgcattagatatttgtgtctcatrtgtctttggatttcatttttgtcagctaggtttggtggatggctgtggtgattggagatgggccacattctgcatcttgaagctactttggctgatttaggctggataaagcagtggcattctgactccattagtttctcattcttcttctgggaacagtgtactcaccagatgatgttctcayggtgaatggaaaagagcaagaaactccaatatggaaaccgtcttaaatctctgtgtaaagtctactaatttsctgttcactgaagcaaattacatgagtgaattcagagtccaagttccaggtagtcaccctgcctgtggtgggaggatactgcaggattatatgacaaagtgtagcgtacttagaaatatttgcaaaattgctgactgttttaattaaataattaatatttaaacaaaaaacagacttgagaataaatttaccaaaggcctatgttgggcacaggcccccaaatctggccataaactggccccagtaaactggccataaataaaatctctgcagcactgtgacatgttcgtgatggccatgacacccatgctgaaggttgtgrgtttaccagaatgagagcaaggaacacctggcccacccagggcaggaaaccacttaagggtattcctgagccacaaacaatagcatgagcgatctgcaccttaaggacatattcctgctgcagataactcgccagacccatccctttgtttcggcccatcccattgtttcccctgaagaatactttcagttaatctataatctatagaaacaatgcttatcactggcttactgtcaataaatatgtgggtaaatctctgtttggggctctcagctctgaaggctgtgagacccctgatttcccactccacacactatatttctgtgtgtgtcttaattcctctggcgccacaggattagggtctccacaaccgagctggtcttggcaggcccaagcatgagaaacatgtttgataaatattattcattgtctgacaaccctgagtggaatatgactaattccacctagatgacctcctggggaaactcgttttccaattggggatttataagaaaataattcattgcatctgctaagtgtgtsagtgcatgtgtgtctatgtattgaggagcttattaacaatgatgtcatataaatgtattggttatcagaaaccagattttaaggtgtattggcctcccaggactttccaaaataatcttggatgatattgataaaaggtttagattctggtattaaacaaaccatattggtattatcctagttatgaccaagctccttaaacaatttaaacctgtactgtatgatatgtgtattgggttttaaaatttccctatgtaacaactgacgatgctgracacaaattatggagaggttagcaaggacaacaattgcaaaacaattwaaaaaatgcctttatttgcatactaacacatgagaatttacttttcacttcatcctcaatataaaatatttcagcatatagtaagacagacagtgtatgaagaggagtgaatttgagctgttttgagaataagaatattttctatttctataaagacagctttgaattcatccattagcatatgatggtgctttcctgttgaaattagtcatgaatttaaaggcagaaaatgttactrcacatttaaaagtcaagtgtttatcgacattaaggtctggatattaagggaatcacaaccagtgttattaaggctgcattttttctttcttttcatttgttcaaacatgatatgttttctgctcatcattttatcaattctggtagtgtttgcatttgttcttggaaatgttgccaatggcttcatagctctagtaggtgtccttgagtgggttaagacacaaaagatctcatcarctgaccaaatttctcactgctctggtggtgtccagarttggtttactctgggtcatattattacattggtatgcaactgtgtttaatttggcttcayatagattagaagtaagaatttttggttctaatgtctcagcaataaccaagcatttcagcatstgggtgttactagcctcagcatatttcatttgctcaagactgccaatttctccaaccttatttttctccacctaaagaaraggattaagaatgttggtttggtgatgctgttggggcccttggtatttttcatttgtaatcttgctctgataaccaygggtgagagtgtgtggacaaaagaatatgaaggaaatttgtcttggatgatcaaattgaggaatgcaatacagctttcaaacttgactgtaaccatgccagcaaacgtcacaccctgcactctgacactaatatcttttctgctgttaatctattctccatgtaaacatgtcaagaagatgcagctccatggcaaaggatctcaacatctcagcaccaaggtgcacataaaagctttgcaaactgtgatctccttccttatgttatttgccatttactttctgtgtctaatcacatcaacttggaatcctaggactcagcagagcaaacttgtattcctgctttaccaaactcttggattcatgtatcytttgttccactcattcatcctgactatgggaagtaggaagccaaaacagacctttctttcagctttgtgacaggtgaaatgctgagtgaaaggacagaaaccctcaactccatagattcacaaagggagcattgtgtatcttttagctgaaaacaaactgacggtatctggaacattttatatttccattcgtttttccttagtgtatatatttgaataatttcaaaacagatacctagaaaagtcatctatctatctatctatctatctatctatctatctatyayacacacacacacatatrtgtgtgtgggtatatgtgtgcatgtgtgtgaataacaacattgaccacaaattatgaagccgagtatatttcacatatatatgtaggtatattttatgatagttcatcctatggtatttcatgtgaagaatttattacctctatttataattaggaacttacagcttttatcaggaaatcattgttgttttccattgtaatttgtaccacatatatgtacttaactatcattgtttgaacctctaattttttggatggtaaaaacattcaattctaaattaatgatgagaatggatctttggggtaggttttatttcattatgaattcttattttatatttattataaagcaaatagaatggttgttagctaatgatgcacacaataaaatttgagtgacaaacatacatacataagtagagtaaattttgtatgtgtatrccaaaaactgttctaaaggatactggatttaatagtagtatgtgaatagattagaaaaaaatcatttctataataggaatgaagatacatgatcatgatactttcagtgctgttataattttttaatgtgtagttagaaaagttgtttcttccactttttgaattaaagaaaaccttttttttttgaaattgacatctgatgtcaagtatttccatttattttgcttagccacctcygagcccttgaatttccaattttccctttgtctcccattcttaatatttctcaaaaaaattcaattattccctctcttaaaataaactcaatgtaaacagggtatataaactatggatcacaattgaatgaaacattctgcaaatattgaaaattatctgtctaatctatatattgatgataggaaatgtattaatcatatgtttcaytgtgggtgggcagtgagctgaggctcctcaagcatctctttctatttttattttgtttcttgacataggttctccagcatttggctcaaggcyccaagggcacatgtgacaagaaggcgccrgctttttaaacattggaagttcttctgtgtcagttctgtgacagaacatttacttaacacatcatgaaggctagtttggatgtggaggggaatagactccatctatccatatgaggtgagycaaagcacttagacgtgttttcaaaccactaatcttgatgattcagaaatgtgctcccttttccaatttcatcctgatacaaatgtawcatctccggatgatgccaatattctccccaattccatcatgagctgttctctataattcagaatctgtagactaagttgtaaaactaatgactgtcaatgtattctacatgaaatagtgggccaaagaaagagggaaacatgataagtagaaaaatatacatacaacatttttttcttacactaaagatcaaataaaacccataggaccaagcctcccacagatactttttataaattctggataaaatatttwaaaaaacagccattcattggcaatggagaatgaacaaaataggcagatactagagagaggtcagcacttggaagaagggaatagcaaggagtgagtttcctgattttatagctggccctagtgtgcaccaggcagaggactaaaacgtcagaagaaaactgtagacttactgggttgaagtaacagaggactgagtttggcataacacgagcagcaggagrtcaggagaaaatctgagaaaggagaaggccagaaaaggggagccccaacttctgaatataaactatccaaagctttgtctggtccctataccatgcatgtatagggcagacttcatgtagcccagctaaaataattaaattgagatttcagttatcatcaagcacagtgaagacagagatagcaacaaaacatattactttaggcaaagatactctattcttgaaaacctaaactacattccattacctttcataacagtcatattccttgtccattctggtttctaccttggttctaactcctacttttattaattacactaatcaaagtaattctctttcaaggagaaaactggaagttatgtaattgargactattaaaaataactattttggcagatgtgcaaaattctcaagcrcatatattacaactttctatagtcatatacatcctttttacacttgcttgaattggtctacaaaacccccatgtttcatagtgtaatccaaacaaatagccactccataaaatataagaataaaagttatatttatttattatataactttgattggtgaccacatttcagtattccaacttaactagaaattatcygaagattttcatcaactcactgaatttaatattagtctaaggtcttaaattgcaccaggaatcttggaaattaaatttaagctgataggctagagaaaataattactgtcaatatgtggagtttttcataatttgtattcagtttatttgaaagcataattttacattttttggtattttaacattatgtggacatattaatttaccttatcagtaaacagatataggaagtttaggaatttctttttttaaaatgtatttttaagtttcrtggatacatactaggtgcatacatttattgggtacatgagatgtgttgatacaggcatgcaatgtcacataatgaagaatggggtagccatcccctcaaacatttactcttttttgttacaaacaattcagttatactctttcagtcattttaaaatgtacaactgaattatcattgattatagtcaccctgctgtgctatcaaatagtaggtcttattaattctttctatttttttttttttttggtaaccattaacmagccactccttccctttagcctccactacctttcccagcctttgtttagcatccatgtactctctatgtccatgccttctgtgcaaacattgcagttgtttctgatgtattcaacttaacataataatctccaattctatccatatattgctgcaaatgacaggatctcattttttaatggctcaattgtactccattgtgtatatgtaccatattatctttatctattaatctgttgctggacactcaggttgcttccaaatcatggctattgtgaacagtgctacaacaaacatgggagtgtagatacctgtttgatacacttatttcctttcttttgggtatatacacaccagtgagattggtggaacatatggtagctctaatttttgtcttttaagaaaactttcaatggttttccatagtggttttactaatttatattcccacctgaggtgtagaatggttcccgtttctccacatcttcaccagcacttgttacatgccttttggatataagctgttttaacggggttgagatgatatctatctcattttagttttggtttgcatttctctgatggtcaatgatgttgagcaccttttcaccttttcatatgtgtgtttgacatttgtatatcttcttttgagaaatgcatattcaaatctttcacccattgtttgatcagattgttagattttttttttcctatacagttgttaaagctccttttatattctggttattaatcccttgtgagatgagtagtttgcaaatattttctcccattctgtgggttgtctctttactttgttgattgtamcctttgctgtgcagaagtattttttaacttgatgtcatcccaattgtgcatttttgacttggttccctgtgcttgtggggtattactactcaagaaatttttgctcaaaccaatgtcctggggagtttctctgaagttttcttatgggagcttcatggtttgaggtcttaaagatacatctttaatccattttgatttgatatttgtatagatatatgggactagtttcattcttctgcatagggatattcagttgtcccagcaccatttattgaagagactgtctttttccagtgtacgttcttggcatctttttcaaaaatgagttcacygtaggtgtgtggatttgtttccaagttgtctattctattccgttggtctatgtgtctgtcttaatgccagtaacatgctgttttggttactacagcctctgtagtataatatgaagtcaggtaacatgattcctccacttttgttcttttttcttaggatactyttggctattctgggtcagttgtggctccatataaattttaggattgttttctctatgtctgtgaagaatgtttttagtattttgataggaattacattgaatctgtagattctttgggtagtatggccattttaacaatgttgatacttctaatccatggacatggaccatcttttcttttgttgggtgtccttttcaatttcttgcattagtgttttatagttttcattatagagatctttcatctctttggttgagttaatcttcagctatttaattttatgtgtggcttttgtgagtgggattaattttttgattttgttttcagattgttcactattgacatatagaaatactactaattttttatgttaattgtgtatactgcaaatttattgagtttgtttatcaattctaatagttttttggtacagtcttcaggttttataaatataagatcatattgtttgaaaacagggrtaatttggcttattcttttcctatgtggatgctctttatttatttttcttgcatgattgctctagctagagcttctactattatgttgaatagcagcagtgattgtgagcatttttggmatgttccagatcttagaggaaagtcttttagtttttcccaattcagtatgatactagttgtgggtctttctatatgatttttattatgtttagattttccttctatattcagatttctgagggtttttatcatgaaggaatattgaattttatcaaatgctttttcagcattaatttaaatgatcatatggttcttgtcctacattctgttgatatgatgtattacattgattgattttgatttgtgtatgttgaaccacccttgcatctcagggataaatcccacttggccatgaggaattatctttttaatgtattatttaatttgattcgctagtatattgttgagactttagcatcaatgttcatcagggatatttayttgtagttttcctttttcaatgtgtctttgtctggttttggtatcagggtaataagattttcaagaataagcctgggccgggcctggtggctcacgcctgtaatcccagcactttgggaggctgagttcggtggatcacgaggtcaggagatcaagaccatcctggctaacacagtgaaaccccgtctctactaaaaatacaaaaatttagccgggcgtggtggtgggcgcctgtagtcccagctactcgggaggctgaggcaggagaatggcgtgaaccygggaggtggcgcttgcagtgagtggagagcatgccactgaactccagcctgggtgacagagtgagactctgcctcaaaaaaaaaaaaaaaaaaaaaaaagaatgagcctggaagtagtccctctttctctattttttcagaagagtttgagtaggattgrcatcagttctttaaatgtttggtagaattcagatctaaagccgtctgctcccaggcttttttttttttttttttttaaactgggagacattttattgcagaatttatctcattacctgtttttggtcttatcaggttttgggcttctttatggttcgatctttgtaggttgtatgtgtctaggaatt

SEQ ID NO: 1637 - DNA, 12930 bp, Homo sapiens
tgtttgtgcatatataattctactttgactgctatagtaaaatgatccagatttagtcaccatagctaagaaggggaaaaagcatttgcaagaatttggcttgctaatgatgctattaaaagataaactaaagttgatatactgtattattgcatagactatttgtccatgttwgtrttcaaaaatgccaaaaaaaawcccaaaatagaatcctaattgttggaggtcgtgtttcttatcgaattttaaaatgtagtaaaagaaaaaaaagcaaataaatcgttgaaaatatgttggttttacattattcttgatgaaataccatgtgagggtacttgtctaggcctaatgctgagaatcatagaagaatcrtgaggccatgaggaagaatartagtgttctctcatcacgctgagctccagtacttagaaacaagcctgaaatcacactgatcaaatagcattctccctttcacctgccatcatcattatcatcatcgtctatatcttcatctatmtcatgaagtggtttgtttttgaaatatttaaatacataatttggaaaataagtaattttaaaaagatcatcattgtgggaaagttacaatagtaaacagcaaagttcaagtcaagctccaatacatttagatttagaaattaagtgtagtttattttacaatacattgcttatgcaaataattatttatggatgaccttcaatgaatcctcctttcactatgatcatgatagaaacaattyagattttcgtgtaaataaaattccttaataagaaagataaagcgartaacacattttttgagcacgcttttatttctaaagagcggattttaggaccaaactgtcaaacagaggtaagaccccagatcttctgtcacacttgagtgagtgatgatggagttagaaggttgtagttctataaccaaaactatattcatggataggattaaatggtggaattccatagaagcaccagattcagttttgtttccatgggacttaaagtctacttatgtcagatgtccttcattttttgataaactcgtaagtactgttttactatttgatctttcaatgattgttataaactaagaagttttgatttctgctaattaaaacagcatagggcgggcgcggtggctcacgcctgtaatcccagcacttcgggaggccgaggtgggtggatcacgaggtcaggagatggagaccatcctggcgaacacagtaaaaccctgtctctactaaaaatacaaaaaattagccaggcgtkgtggcrggctcctgtagtcccagctactccggaggctgaggcaggagaatggcgtgaacccgggggacagagyttgcagtgagccgagatcgcgccactgcactccagcctgggagacagcgacactccgtctcaaaaaacaaaacaaaacaaagcaaaaacagcgtaaaatttaaatcatggaatagagtggtggagctgtggttgagatgctctatttaattaattttaatgacattttgagatccagtgctgctcattgaatttgcctgtgaaaagagtttgtggtgatgacccagcaacagataagatactatccaaaaaaagctactgacatcaaatcaatttccagtttcttctaagttgcaggagaatgcctagatcttgcttttattctcttctttgaccaaagtattacaaaaagaaaaatatggttaccattttcatgtcaggtatactaaaagtttaaaaaaactctttttttaataacttggttttaggamtacytggtttagtttctccgttagaaaaatgatttatataaggagaacaaaagttcatttctacttctaaaacaataagacaaaaacaaaaagagtaatcaattttgagaatccaatagagttaaaaaccagttaaacataagaaagaattagtgaatttgaagataactacccagaatgaagataaagagacgaatagatagaaaatataaggctagagggtcagagacagtgaagctacaatcagaacaactaacatacttctgcagttcccgaaaattagaagagarcaaatggggcagaagcaatgtggagatttttccaaaagtgataaagtatatcagttcatatatttttagaaactatcagacttcagacacgataactaaaaccaaattaacataaaatgacaggacatcaaagaccaatagaaaacctgaaaagtaactagaggaaaagatagattatgttaaagggaataactgtctaaacgacaagctgattttcaacagacaaaaataaagctagagttcaatggattcatgtcttcagtgtatttcaaaagtagaatagatcttgataaacagaaacttaaaatacatcttttcagatagaagaaaaattattattaatattattattattatttttgttggtagagttggagtctcactctgttatccaggctggagttcagtggtaggatcatggcttactgcagtctggaactcctgggctcaaaccatcctcccacctcagccttgtgagtagcttcactatgcctgactaactttttcattcattgtagaggcagttttactgtgttgcacaggctggtcttgaactcctgggtgctcctgccccagccttacaaaatgttgggattatgggtgtgagctaccctgcctggccaataaakggtcttwttgaaaatattaagttgaatatgcaagaaggaatacaaattaatgaaagtggtaaatatgtgcataattctaaatgaatgtttagaaaataataatgtcttgttggggtaattatacaattgataagacatatgcaaatggcaaaaaatagaatggaggtaaaggtgacaggagtaagtttagttaaattattttctgaacttttctatgtctatgaggagattttgaacaatgataatataattctactcataggtatatatgcaaaggaattgtatcaaatgatatatgaaagaatgttctagtagaattattcataactgttcaaaaaagaaactggccaaatacatattaaggttggatgaatcattacagtaattccatgcaatggaacaatatagagaagtgaaaaaaaatcacatgtgcttgcaactatgtgactaaatttcagaaacataatgttgagttcaggaagccacaaacaagaggaacatgtaggattgcacctatacagcgttcaaagtaggctagaccaagcgatggagtttagggttgcatacctagttggtaaagtatgaagaaaattgaggaaataaccattataaattatggatattgcttatatcaggagatgcgaagaagggtttagggacttggaaagtggaatggaggtggacctagsctgttttmggtgttccttgtcttgccctgcatcatggttacttgagtgtttatgatacactgtggtatttcccatttttgtattggttcatttctaagtgcgcattataactttaatatacaaatttgtaattaggagaaatatctcatagaaattattattactcgtctcattatatactgaaggggaaatatcaattatttgtatacattcctatacaactctaagatagttgaaataggaactttcttatttagttgcaacatgaggaaatttgagatgatgttatctgccacccccagatctttccaaaggatttcttctagccttaattatcgacctcacaggacaaacctttgccattccccatctattttttctttcggctcctgaattcctgacacaacaaggttgtacatatttcccacactcttggtttaagagttcttttatcagttatgtttctctgcaggagaagacccttcaaaactacattagatatttatatctcacatgtcgtttgatgttggttttttgttttgttttgttttgttttgttttgttttgttttttgacagagtcttgctgtgtcgcccaggctggagtgcagtggcataatctcagttcactgcaacctccgcctcycgggttcatgccattctcctgcctcagcctcccgagtagctgggaatacaggtgcacaccaccatgccctgctaatttttgtatttttrgtagagatggggtttcaccatgttggccaggatggtctccatctcttgacctcgtaatctgccttcctcaacctcgcctgcgctgggcctggattttatttttctaagctgggtttggtggatggctgtggtgatttgagatgggccaaattctrcatcttggaggacgttagagttttgccaatttaatctggatcakgtggcagcaatctcacgtcwttagtttctcattcttcttctgggaacagtgtactagataggccatactcttatggtaaatggaaagaagaagaatccccagtatggaagccatctcaaatctctatgcaaactgtagtaattttctgtttatcaaagtaagtgaaatgattgaactccaagttcaggggcaaggtagtcagtcttcctgtgataggatactgcaggattatatatcaaagggtctggtactgaggaattcttataaaattgctaaatattttttataataatatttaaacattagacttgagagaaactttaccaagtcctaagaattagagataatgtttttgataaataaatatkattcatgggctgaaaaccctgagtgggaaaataggactaatttcatctgcacagcctcttggaaactcattttttattttggaaattacaagaaaataatttgttccattcataagtggtgtgcacatgtgtatatttgtgtgcatatttatgagtttgtgaataaygaagttatacgaaagtgttagcagcaaccagatcttatggagtagtggcctgcctgtggttctcaagaaaatctgagatgcctttgataaaagcagttaggattctgtgtatttaaatctgtgatttaaaaaagtccgcattggtgatgatcttagttatgaccaagctccctttgagaatttagatatttactatatgatatatatattgagttacaaaacttccctaacaactgaagtcactaaagataaatgatggagaggttacacaaggaaaaattgcaaacactgaaagtgaatatgtccctatttgcrtactagcaaatgaggattcaggtttcacgtcaatttcagtgtgaataattccagcctataacaagaacagacagtgaatgaatgagttaatttgagttgtttgaaaataagaatgttttccataaagagatcattgaactcatcagttaacatgccatggttatttctggcttgacactggtcacaacrattaaaagtaaaaagaatgtcacagcacattcacaaatcaggtgcatatagaatttaaggycaggatattcaagcaatcacacccagttatattacattgagagatgaagcgagctatactttctgaatcgagtggggacttggagaacgtttctgtagctagcaaggggattgtaaaatgcaccaaacagtgcactgtaaaaccacagcaatcagcgctctgtagctagcaagaggattgtaaaatgcaccaatcgctctaaaatacaccaagcaacaggatcctaaaagtagccaatggcagggaggattgaaaaaagggcactctgataggacaaaaaaaggaaaatgggaggggacaaataagggaataaaagctcatggcttcagccagcagcagcaacctgcctgggtcgccttcctcycggtggaagctttgtcctttctctcttctcaataaaccttgctgttgctcactctttgggtccatgccatctttaagagcagcaacactcaccgtgaaggtcggtggctccatttttgaagtcagggagaccacgaacccacctgcaggaaccaactccggacacaacaccagcattaaaacaatttttttttgtctgttcagacatgacaacttttatacccatcattttttccagtgtggtagtggttctatttgttattggaaattttgctaatggcttcatagcattggtaaattccattgagygggtcaagagacaaaagatctcttttgctgaccagattctcactgctctggcggtctccagagttggtttgctctgggtattattattaaattggtattcaactgtgtttaatccagctttttatagtgtagaagtaagaactactgcttataatgtctgggcagtaaccggccatttcagcaactggcttgctactagcctcagcatattttatttgctcaagattgccaatttctccaaccttatttttcttcacttaaagaggagagttaagagtgtcattctggtgatgctgttggggcctttactatttttggcytgtcaactttttgtgataaacatgaaagagattgtacggacaaaagaatatgaaggaaacwtgacttggaagatcaaattgaggagtgcagtgtacctttcagatgcgactgtaaccacgctaggaaacttagtgcccttcactctgaccctgctatgttttttgctgttaatctgttctctgtgtaaacatctcaagaagatgcagctccatggtaaaggatctsaagatcccagcaccaaggtccacataaaagytttgcaaactgtgatctttttcctcttgttatgtgccrtttactttctgtccataatgatatcagtttggagttttgggagtctggaaaacaaacctgtcttcatgttctgcaaagctattagattcagctatccttcaatccaccsattcatcctgatttggggaaacaagaagctaaagcagacttttctttcagttttgcggcaagtgaggtactgggtgaaaggagagaagccttcrtctccatagattcatgagaggggcattgtgtgtcttctagcagaaaacaaactggtggtgtatgaaacattttatatttcttactggtttttctatactgtatgtgtatgaataatttcccaacgtatacctagaaaagyctttgacctaatattagtctagaaaaaaawatatatatatgtgtgtgtgtgtttatgtgtgtatgaaaacttaagaacattgacaataacatgctcttttctgtttttttcatacaaactgccaaattatacaaaatatgacaaaaatttcttagaattttgaagccatgtatatttcattcatgtattttatatttcatttgtagaatttatgatgtctatttataattattaagaagtarcagyttatcccaggataaatattgctcttttctattgttatttgaaccacaggaatacaccacattgtgcttagaattcattgcttgaacctcgaatttattggatggtaaagtcattcaattctaaatcaataatgaggatgtatctttggtgttttattccattatgaatttctattttatgtttagtaaaaagcaatgagaattattgttagaaaagaatgcacacagtagaatttgagtgagaagcatatgcagagtaaatttaatgtatgtctaccataagcggtactgaggaatattagatttcatatgtgaatagcttaggaaaaaatcccttctctaataaagggatgaaatatcatgatcatgatctggattggtatcatcagttatgcatatgcagttagaaacgtcatttcttccgcttttgaattaaagaaaagctgtttttgaagttgagatctcatgcaaattattttagtattctttctaaagcacttttaagcccctgaattgctaattatatccttaccttccatttatgaaattccttctaaacttcagataagagaactcaaatcctctctttttgaaaaataaaatcaatgtaaatatartatakaaattgtggaaaatatttcagtcaaactttttgtaaatgttaaaawagtatctatgaaatctgtgtattaattatgagatgagccttaacgttgtaattttgtcatcaatgatgaaatgaaagggtgttgacatattctttaataggaagttctattataagaaagaaatgtacagtcytgttcacagctaaattctacttgactgtattaattcttggtgttatgaaatttaaacaatgtgatttaaaccttaagatgaatcatccccccacctgatttgtgtatttttttaatcatatatcttcctcagtacaatgtaaggactgtaaaaaaagagataatgtctgtcttgctttctgttgactcccaggaactcgaaaccagcaccaagaatagatkrysaaaaatratactttaatgaacaaataaatrggtggctaaaatggrtaagytgatgtggtwaaccagtgaaaaggaaactcacacaaaatctgcagttgcatgaattmccctgttccrgtctcaggttaagattacaggcttatccaagcagaatccttctcctaaggaaaagtttggctattccacaattttaggggaaatatgacaataatatagtcttgatgcagctgtatcaggtgtctgagttggagacaaggtagaacaccaaaattagatggcacctattataatrgtttgaaaaatcatataaacaactttggtctatttgaatatgtatttttttctattgtcaattatttgtattatgatattttctagttgattatttaaacaaaaatgacatttcatttcaaaaaattgagttagtaaccagctactttaccaaaatgtttttaatgtaatacctgttattgaagtgctaccatttatttagaagtcaagttcaagacaaaaatggcaaggacgtgtggaaattgagaccggaacaaatgtgaaacaatgtgtggtgatgtctggtatgaccctgatggcagccacttcacagtgaggtgagagagacagcatgatggtcatcagatgcatgtacttggcttccagcacttttccagaagggctacaaggggaaaccacagctggcattagtccatggaagagagagaggagggagaatgtatctgctcatctgtcattagtcttctatttcctattggtcagggtttccttgaggcagaactatcatctctgctgttctgtcttacatcatccagtcccttggtggtggtcatgaaagtcagacctcatgcccacagtgtggtgatgcattcaagtcccaaatagaaggatgayctggatcaggcaaggtrctrgccaggggaatwggacatagtgaagagaatctragaaagcacatgtttgtgtccagtaccrccactccttgtgccactgaggcgtgctcataccctccagtcatggctggctttatgagcatatgacgtccacagttgcatagggttttgtgcttatagggacttgtgyttagagggactctatgcttggattaatrttctgcacttgctrttttgtttktcasacagaggatacttstctgctgaagagagaatgktcttrcactaattccatagggatttgctctccystctccaacaggcttgtcagagacatgcacagagtcctataatgaccactaygtatgttctagcatctttgaatcctgctggatcatctggcwcagtggccagagcagcttggagcagagtctatatcttctgtagagccctcatttgttctggattccacttgagaccagcagcctgggaaacttcrttaatgagtcagagcaatattctcaaatgtggaatatgttgtctccaaaatcccaataggcccccaaaacattgtgtctcttttgtagtgataggaaatttatagagagagcaacatgccatatactgtaaaaaagattgtttcaacgtgtggtctagggacactgaatgctttaaaacatcacctatgctgtaggtccctgaatsttctcaggttgrtttcttttcttctggtattttacttccattcatcgttagagtattttactatagttaagaaacttgccacttcctgattattgtaccaagtaatatattattattattattgctattattttgagacagggtctcattctgtccctgaggctggagttcagtggcaggatcacagctcattacagcctcaaccttctgggctcaagtrattcycccacctcygcattgctagcagctgggactgcaggggcacaacatcacgcctggctaatttttgtattttctgtagggctaggatttcacagtgttacccaggctggtctcaaaatcctgggctcaaatgatcttcccgtgtcggcctcctaaaatgatgggattacagtcatgtgccacagggcctggtctgtaatattattaatatattaaataatcacgatgttttaaaaaatgtaaattaaacagaagtgacatagccgtgatataaaacagtgacacagtgttattattatgatacaaggcaaattgttttgatttttcctcataatggktgtagattaagaaccattcagcaaatcacaagcccagtaaaaagtaccagaagctctgctctgcttagtgaagacagcacatcctggaaagcatttgtgagtgttgatttaagtttctggtagtctgyattcattctataacccgtctggttttgatagagkccagataggtttagtgaatcggcttatagaaaggactaccatcccctgtaactttcaagtgttttgtcacggcactgaccagttccattccttagggaatgcggttattatattttatatattttgttgccagtagaggagaatttcagaggcttccctttggtcctgctataataatgtcctttactctacagttcacgaagaatgtgagtcctgccggctgccatacatatctatttcaattatactttcaggaagaggtagtaactacaaactgattagctccaccttggaatggasatgagccgaagctctaggtagtatctgaccttcaaaaactccccctgcaggctggatgtgatggctcatgcctgcagtcctagcactttgggaggcgaaggtgggaggatcccttgagagcaggagttcccttcacaacatgtggaaactccgtctgtacaaaaaatttaaaaaattagctggtgtgttggtgcatgcctatagttccaaatacttgggaagctgaggcaggaggattgcttgagcgcaggagttccaggctgcagtggactatgatcctgccactgtactccagcttgggtaacagagggagactgtgtctcagaagaagaaaaaaaaacaagtataagttctcaccggtatcttaaacatcaagtaaaacagtatcgagtaaaacaaaaaactaaaaactccaaaagtcaaaaacacttttaaaaagaacatggtgttaagagtagtttgttcagtttccccatagaaaatgatttatggaaggagaataaaagattattctgaacactaaaacaataagactgaaaaaatgaattatcaatattgagaatccaatagacagagttaaccagttggatacagtacaagagagaataagtgaattggaagatagctacacagaatgaagcatagaagggaagagatggaaatacacagagctagagggtaacacattgatgctacagacagaacacctaacatacttctggagttctgtaagattagaggagagaaaatagagcaagagaaatgttgcaaggatttttccaaaaggtataaaatgtatccctgaatatatttttagtaatctcaaacttcaggcatgataactaaaaccaaattaacataaaataatacaggacrcaaaagaccaatagaaaatctgaaaagtagctagaggtagaagatagagyatgttgaaaagaactgtattctaaatacaacctgattttaacagaaaacatggaagcaggaattcaatggattaatgggaatcatgtcttcaatgtgtttccaaagagtagtagaccttcataaacagaaattgaaaatgatatttttcagataaaataaaattactgaaaatacaaagttgaacacgcaaggagcattacaaattaatgacaatccatgctggctaacacggtgaaaccccgtctctactaaaaataaaaaawaattagcctggcstggtggcgggcacctgcagtcccagctactccggaggctgaggcaggagaatggctaaacccggaagrcggagctttcagtgagcagagatcgtgccactgcactccagcctgggtgacagggagactatgtctcaaaaaaaaaaaaaaaaattaatgacaatgaaaactaagtgtgtaattctaaataaatkttgactatataaaacaatagtgtcttcktggattgaatgtataattgataagatatatgcaaatagcaataaagaggctggagataaaggtaacaggaataaatttagtcaaactgtgttttgggcttttctatgtctgtgagaagaatttgaacatcataatcaaggaccctgtaattctacamccagatatatatacacagaggaattgtagcaaatgatatgtgaaagaatgttcattgtagcattattcataaaagctcaaaaaataagctgtccaaatatatatcaaataaggatggataaataattacagtaaaatcaaaaaatgaaaaaaatatagagaagtgaaaagawatggatcacatgtacatgcaatgatggggttaaattttggatacaaaatgttgattccaggaagccatgaataagaacatataggattgcacctatacatagatcaaatcaggccaaaccaagctattgagtttagggtcgaataccttattggtaaagtataaagaatattaaaaaaagaccatcataaattagggatgttgcttatcacagg

SEQ ID NO: 1638 - DNA, 16726 bp, Homo sapiens
ccaccccctacctcccaggttcaagagattctcctgcctcagcctcccatacagctgtgaccacaggttcccgctatcatgcctggctaatttttgtatttttagtagagacaagctttcaccatgttggccaggctggtctcgaactcctgacctcaaatgatccacctacctcagcctcccaaagtgctgggattacagatgtgagccaccgcgcccggcaataacmgttcttttcaaagggtaaggtttgaatccaggtcttagaacagtgcctggcatataactaaataagggttatctctgattattattcctcaagctcagtttggtgaaccagatagatccacaaatgaataattatacaaacagtgaaatgcagttgagacaaatgcttctaagaactatagagtcctgagagggcataggaaggaggctgggggatgacctggcctggagagggcgttgggtcttttgggaagggatgtttgccatgagaatgggtaggaactggcctggcaaaatggagcaggaggaagagtattcccagccaagggagcaacacagggcaaggctatggccagggaaggggtcccagaggtttgagaggggtacggaaggtttagcaagggccaaggagtgtgggctttgttatagggacactgrggaggcacagagaggggttaagcagggcaggagcatgattaaatctgtgtttttcttttcttttcttttttttctttctttttttttttttttgagacggagtctcgctgtatcgcccaggctggcgtacagtggcgcgatctcggctcactgcaaactctgcctcccgagttcacgccattctcctgcctcagcctcccaagtagctgggactacaggcgcccgccaccacgcccagctaactttttgtatttttagtagagacggggtttcactgtgttagccaggatggtctcaatctcctgacctcacgatccacctgccttggcctcccaaagtgctgggattacaggtgtgagccaccgcacctggcctgtgtttttcttttctgtttgttttgagacagaatctcgctctgtcatccaggctggagtgcagtggtgcgatctcggctcactgcaacctccgcctctcrgtttcaagtgatcctcctgtctcaacctcccaagtagtaggattacaggtatgtaccaccatacccagctaatttttgtatttttagtagagatgaggtttccctgttggacaagctgggctcgaacttctgacctcaaatgatctgcctgcctcggcctcccaaagtgctgggattacaggtgcgagttaccacgccyggccgggaaggcctctttgaargggtgacattggagtggacacctgagtgaagagtgggagccagccaggaagatatctatgaaaagcatattcttttttttttttttaagagacaaggtctctgtcacccaggctagaatacagkggcacgatcatggctcactgcagtctcaaactcctagactcaagccatcctcccctctcagcctcccaagtagcatgccactactcccagataatttttttttttttttgagatggagtctcgctctgttgcccaggctggagtgcagtggtgcaactttggctcactgcaacctccgcctcccgggttcaagcaattctctgcttcagcctcccgagtagctggggttacaggtgtgcaccaccaagcctggctaatttttgtgtttttggtagagatggggtttcatcatgttggccaggctggtcttgaactcctgaccttgtgatccacccacctcaacctcccaaagtgctgggattccaagtgtgagccacggagcctggccagaaaagcacattctatccaaagcaaacagcaagtgcagatgccctgaggtgggagcaagctctgcgggtttgaggaacccagaggaggtgggggtggctacagcagagtgagcaagaggtgaggggtgggagatgaggctggagaggtaacagggcacagctcgtgggccaatataaggactctggattatggctggaatgaggcgggagccctgggagggtttgggggagaggaaagagaatctgacatctagaaggtaaaaagatccctgtgatgaccaggcgcggtggctcacgcctgtaatcccagcactttgagaggccgaggtgggcagatcacctgaggttgggaggagaattgcttgaacccagtaggcagaggttgcggggagccaagatctcgccatgtgcactccatcctggggaacaagagcgaaactccgtctcaaaaaaaaaaaaaagatccctgtggctctgtgcgtggagtagagtgggaagacgagagggatgacaaatgtccaggcaagggagggtgggggcttgggaaaaggtggaggtagcccactaccctccccgactcctgctcctcacctgttttttggccctgctcagctccaggtcaagtgcttgggccagctccagcagcagggcacagggcacagccgaatccgtggcccctacaaagggggtcgatccgggtgggaagagcttcgagtcataatggcaggcaagggtgaggtgacgggcagcccttgggtccagtgtggccaccacattgccaaagtccactggccccaggggtgttgaggctgtgaagggatccagctccacgtgccaacctgctgtcagggaccgcagcgtggcctccaggaactagcggcaagagagaggtgggagggtggacggggactggggaggaggtggggagaagggccacgtgacctgagccatgcagagcagatgggttgacactaaagccccactctgattgaatggatttctttctttctttctttttttttttgagatggagtcttgctctgtcacccaggctggagtgcagtggcttgatcttggctcactgcaacctctgcctcctggcttcaagtgattctcctgactcagcctcctgagtagctggggttacaggcgccccctacaacgcctggctattttttgtatttttagtagagatggggtttcacaatgttggccagcctggtattcgaactcctgacctcaagtgatctgcctgcttcagcatcccaaagtgttgggattacagatgtgagccactgtgcccagccccctactctgattaaaatcattcccttgacagtgctggtgagtacctactgggtgccagatgttggggagaccccacctcttgaagccagcaagactcatcacagcttacccttaaatagctctcactgtgtgctaagccctcttctaggaaccatttaggggagggactgccaatacatgaccccattttacagatgaggaaatgggctcagagaggttaagaaactagtccaggccgggcgcggtggctcacgcctgtaatcccagcactttgggaggctgaggtgggcggatcataaggtcaggagtttgagaccagcctggccaatatggtgaaaccccgtctcactaaaaatacaaaaaattagccaggcatggtggtgcacacctgtaatcccagctactcaggaggctgaagcatgagatttgcttgaacctgggaggtggaggttgcagtgagccgagatcgcgccactgcactccaacccaggcgacagtgtgagactccatctcaaaataaaataaaataaaataaaataaaaaagaaaccagtccaaggtcacaatctaagtggatgaggtagcattgggactcaggcagtatttaagtgactttttttttttgagatggagtctcgctctgtcacccatgctggggtgcagtggcgcaatctcagctcactgcagtctccgcctcctgggttcaagtgattctcgtgcctcagcctcccaagtagctgggactacgggtacccaccaccacgcctggctaattttgtatttttagtagagatgaggtttcaccatgttggccaggctggtctcaaactcctgatctcragggatctgcctgtctcggcctcccaaagtgctgggattagaggtgtgaaccactgcgcctggcctttaaatgactcttcatgctttctggaagacaacagatacattacagcaccagctcggagccaacctgtttgggttcaactctaggtctatgattttctaaacattgggtctcactaggttgactaggctagtctcaaacttctcaggtgattcttccaccttggcttcccaaagtgctgggattacaggcatgagccactgcacccggctaaggtctactacttattatctgtaggatttgtgcaatgtgtataacctctctgagcctcagtttccccatctgcataatgaagatcatattggtacccaccttatagggctgtctgttgcctatgcctagcacacagtaagcttttggtgggggcattaaggggggcagtacagcctggtggtttgttaccagcatggagtctagagtccgattaactccagtcagagccccagttcctcctcttagcttctttgggatcttgaacaggattcttatttcccattccctggagggctagggggtcarggactggargtgggtccctttacctttctgacttggagatttcccgggctgcccggggttcgcacaaccagcagggggcgcagataagtgctccagagacgctgtggatccagttgtcccaccaccctccgcagccgggcttcggggaggcttccgatcaatgggaccttgggaaggaggtgggatagggaagggaagaatgasagcaacccccccatttcaaccctaccccgggcgccgtcacccgcgaggagccccgggttctcttcctaatctgccgcctccagcatcggagacttctaggataaatccaaggctcaggaaaagtccttccaagaccatccggtccagcctacctcaaacttgatggggaaatcgaggcccagtgagagagaggggagatggaggaagggactcttccaaatagttgactaaaggcgtagaaccctgaacccccccgtcttactatttcagacctttcctcttaaaaggaagctactgttgcagaaccagcccgaagccttattcctttggtaagggtcatgcgctcagatgacgaagacggtggcatctgcggttagggccgtacgctaaagccacgtcaaccctgggtaacagcggggagggaatgagggtccccgcggtgcccgggtccccgcccagcctcacccgcagctcccggcccagcggcagctcctcagtcctgcggtgccagccgctccaaatggtgtagaacgccgagcccacggccagcgccagcaacagaggcaagagccgaacccgcggtagcaggcggcgcttcggcggcaagagtggctccatgaggccacgttcccccagccgcaggcggggtcgcccgcggcccccggaacgcatggccgctttgccctgaaacctgtaccagaccacggattgagtttaggcccagccaagttcctccccatggaatcggtgggccaataagcaacagctgcggctgcaccagcccaccccacagcgagcagcgaaaccaataagaactacggtcctgaggacacgcctcccagcctcccttaggtattggggttggttcccctgagaakggcacgacccaaatgggagcgcaagagaagtaggctccgccttagcggaggagggaaagccaatgaacagcgtttgatcatggaaaatattcgatctcccgggcgcaggtccatgccccttccggatgtaggcaggggattggtggcgcagggtcggaaagatcagtagatacgtcagtaacgcgtcccagagggaagaggggcggtgcctgtctccgaagcgaggagcggattggcttcacggaggccgcgcccccgaagtcacggccggcgggcatttggaaatagcttgtcatttccctccttcaacctgtaccattcttcaagaaacggtttgaatcagacygcctttccttttgtcttcattgtcataaacatctgcccccgtgtggttctgactggccgcgaacccctacccgaagcttttattccatcattgtgcaccgttggtggggaatgctgtggcaacaggccacgcctccacttactggttggctttgcgcaggcgccaacggaagtgggtcgcaggaagaggaagtcccgcctctctctcctcaggcagcagcaacgcggaggaaacgggagtgaacggagagcgtagtgaccatcatgtgaggccgggctaggcttaggcggcgggaatgaggttgagggtggatatttgaccgattgagtgtgggaagggttgagcagagcggggggggcaggggcagatgttttagggatgcagcgtcctgcttttctcctgatgagtttgagaacgggcgtggggcctttgacgcatcgtgacttcgggagaggggacagctttatcagataacgccctgggctgggcgcgggggctcattcctgtgatcccagcactttagtaggccaaggcggagcatcgctggaacacaggagttcgagactagcctaggcaacatagcgagacccccgtctctacaaaaaaaaaaaaaaaatttaattatgaaaaacatgttttaaacgataacgggagtggtcctagataattagtcctattgaaatgaatgttaaggggcagcgattttacgaatactgggggaggccgagcgcggtggctcaggtttgtaaatcccagcactttgggaggccgaggcgggcggatcacctgaggtcaggagtttgagaccagcctggccattgtggtgaaaccccgtctctaacaaaaatacaaaaattagccggccgtagtggcgggcgcctgtaattgcagctattcgggaggctgaggccggaggatcgcttgaacccgggaggcggaggttgcagtgagccgagattgcgccactgcacttccagcctgagcgacagagtaagactccatctcaaaacgaaacaaaagaaataaaacgaataatgggggagggaagttaggacttttagaaataattatttgaaataagggacttatcttgatcatttgagctggagacgggtgcgttttcgacttgattcacaacttacacggataacgaacgagtcattgacatgattttgcgcatttattagtgcagcagatattacattgaatgcttatgtatcagacactgcttaagctacataggatacatcagtgaatgaaacctctagtccccaagggaaaagaaaaatctttttctctttttctttttttttttttttttgagacggagccttgctctgttgctcaggctgtagtgcaatggtgcgatctcagctcactgcaacctccgccgcctgagttgaagcgattctcctgcctcagcctcccgagtagctaggattacaggcacccaccaccatgcccagctaactttcgtatttttagtagagaccaggtttcaccatgttggccaagctggtctcaaactcctgacctcaaatgatccacccgcctcgaccttccaaagtgctgggattacaggtgtgagccaccgtgtctggtcggggttttactttctacactgagatggggggaggatgggagggttttcttttgttttgtttgtttgagatggagtctcgctctgtcacccagattggagtgtagtagcacgagctctgtctcctgggttcaagcgatcttcctgcctcagccttcaaagtagctaggattacaagcatgcgccaccatgcccagctaatttttttttttttttttttttttgagacggagtctcgctgtcgcccaggctggagtgcagtggcgcaatctcggctcactgcagcctccgccccctggggttcacgccattctcctgcctcagcctcccgagtagctgggactacaggcgcccgccacctcgcccggctaattttttgtattttcagtagagacggggtttcaccgtgttagccaggatggtctcgatctcctgacctcgtgatccgcccgcctcggccycccaaagtgctgggattacaggcgtgagccaccgcgcccggcctaattttttttttgagatggagtctcactctgtagcccaagctggagtgcagtggcgcaatcttggctcactgcaaccttcgctgctggggctcaagcgtttctgctgcctcagcctcccaagtagctgggactagagggatgcgccaccacacctggttaatttgtttgcatttttagaagagacagggtttcaccatcttgccctgggtggtctcgaactcctgagctcaggcgatccacctcgcgtcggcctcccaaagtgctgggattacaggcgtgagccatcgcatctggcctaatttttgtattttctaatttgtatttatttattttttgagacaagagtctcgctctgtcacccaggctggagtgcagtggcatgatctcacttcactgcaacctccgactctctgagttcaagcaattcttctactttaacctcccgagtagctgagattacaggcgtgcaccaccacgcctggctaattttctgttggttgttttttttattgttgttttgttttgttttgttttgtatttttagtagaaatggggtttcaccatgttggccaggctggtctcgaactcctcacatcaagtgatcaatccaccttgacctcctaaagtgctaggattacaggcatgagccactgtacccataccctgggagggttttgaagagtgacatgttatgatttaggttttagcacaaccccctcagaccactctgtggagaacagactgtcagggaacgtgggtggaggcagagagaccagaaagattccaggacagagatgacagaggcttaggccatggtaagaaacggccatttcctacagatttcatgtaggatgtgagggaaaaagaggaatcaagttgacaaaagagtttttgcccagagaactagaaggatggagttaccatcaaagcagatggggaacgctgtagatagggtaggcttgggtggttgggtgatctggatcccgacctgagacatgcagagttgaaaatgtctggctgggcacggtggctcacgcctataatctcagcactttgggaggtcgaggcgggtggatcacaaggtcaagaaatcaagaccatcctggccaacatggtgaaaccccctgtttactaaaatacaaaaattagctgggcgtggaggtggtgcatgcctgtagtcccagctcctcaggaggctgaggcaggagaatcgcttgaacccaggaggcagaggttgcagtgagccgagatcacaycactgcgctccagcctgggcaacagatcaagactccgtctcaaaaaaaaaaaaaatgtctgttaggcatctagctgatgatactcagaaggctgaacaggaggacagatgtggtgggacaaggttggggagacactgaagccaaggccctgatcacccatcctcacagctccagcctctcaactccagcctctctcacttattggttccatgtttgtccatrcaggagcctcctcaacaagcccaagagtgagatgaccccagaggagctgcagaagcgagaggagkaggaatttaacaccggtccactctctgtgctcacacagtcagtcaagaacaatacccaagtgctcatcaactgccgcaayaataagaaactcctgggccgcgtgaaggccttcgataggtgagtgctgggtcctgggaggtgttctccgcaggcctggagaggccactccagctccagtctgaagagctcaaagacagctgtctcagaagcctggggtgtatggccaggcgtggtggctcatgcctgtaatcccagcactttgggaaggcaaggcgggtagatcacctgaggtcaggagttcaagaccagcttagctaaaatggcgaaaccccatctctactaaaaatataaaagccaggcgtggtggtgcacgcctgtattcacagctactcaggtggccgaggcacaagaatagcctgaacccaggaggcggaggttgtggtgagctgaaatcgcaccactgcattgcagcctgggcaacagagtgagattctgtctcaaaaaagaaaatgataattttcaatggccctgtgaggaaggtaacgtsattatcttccctcttaaaaaggagcaaactggcacagagaggtgcagtcctttgcctcagcctcaacctaaggactggcagagttgctttggcagcttggtcatcccggcctagcacctgcacccttccccaagccatgctgctggagggggcgagcagcaggcagtagggggcactgtcagaggcacgccccycacgcccagtgcctcccctccctgttccccaccaggcactgcaacatggtgctggagaacgtgaaggagatgtggactgaggtacccaagrgtggcaagggcaagaagaagtccaagccagtcaacaaagaccgctacatctccaagatgttcctgcgcggggactcagtcatcgtggtcctgcggaacccgctcatcgccggcaagtaggggcmgcctgtctgttgacagaactcactcctctgtcctatgaagaccgctgccattggtgttgagaataataaagctctgtgtttttttctagtggtatctgtttccagagccttgggagtggggtggattcaggagggcttgggggaggcagctggtatcggactgaatggtgggagcaggacccctgagcaagtggagaggccctggctctgccccatcgaggcctcactttctccatctgcaaagcaaacagtttgcatggaaatgagcgcccagytgtggctctggagaacattttagctctcctgctttaatcttcctgagcttctccttgtcactctgttgctctcttctctacctcttataatgaattggcctcgcttgaccaaagtatcttttggggccaggcatggtggctcacacctgtaatcccagtactttgggaggtggaggcgggcagatcacctgaggtcaggaattcgagaccagcctggccaacatggtaaaacgctgtctctactaaaaatacaaaaactggcygggcgtggtgtctcacacctgtaatcccaacactttgggaggccaaggcgggtggatcacctgaggtcaggagtttgagatcagcctggccaacatggtgaaaccccgtctctactaaaaatacaaaaattaacagggcatggtggcaggcacctgtaatcccagctactcaggaggctggggcaggagaattgcttgaaccccggagatggaggttgcagtgagctgagatggccccactgtactgtagcctgggtgacagagtgagactccatctcaaaaattatatatgtgtatctttcagcctttctttatgtttgttccttcagcaaacatcccccaaatgccccctgtgtgtccagccctgtgttgcagtgcaggggcaccaggtacccaggagcctctgrtctgccctgaaagacaggaggattagacaggtgatgaacgcagtcagtgccaccagcacagcggctgaggtgagagcattgcttaagcccagaagtttaggactagcctgggagaatggttgtgagttttatagacagtgtgatactatctctaaactaaatagataagaaacagaaaaaagggccgggtgcagtggctcacacctgtaatcccagcactttgggaggccaggcgggtggatcacctgagctcaggagtttgagaccagcctggccaacgtggtgaaaccctgtctctactaaaaatacaaaattagccaggcatggtggtgcacgcctgcggtcccagctacctgggaggctgaagcaggagaatagcttgaaccaagagacggatgttgcactgagctgagatcgcgccactgcactccagcctgggcaacagattctaagactacctctcaaaaaaaaggaaagaaaggaagaaagaaaagaaaagaaagcagtcagtagctaaatattactgctagtgatcctggctaacacttgctgagctgtttaggtgccaggccaggctcagcgcttttcaaacatcctcccaacagctctggcgcgggcctgttaatttattatcccccttttccagaagaaggaactgagacacagagaggcaatgtcactttgcggggacaaccagccaggaagtggtggtgctgtgatttaaactcacctccagagcctgtggcttcacccctgagctctgctgcccctcagattcaactgcattacccttgagaggaattctctgacaaatttggggagataaatggaggtgggaaagggaggtggtatatactggggggattaaggaaattccctgtgttgctctgacacacacatcgtgtgctccccatatctttgttttttgttgtttttttttttttttgagacagggtgtcattctgtctgccaagctggagtgcagcagcaccatcatggctcactgtagccttgactgcccaggctcaattgatcctcctgccggctttttgtagagatgggatttcactgtgttacccaggctgatcttgaactcctgggctcaagtgatcctcctgcctcggcctcccaaaatgctggaattacaggtgtgagccactgtgttgggccctccccccatatctttgtctctgcctatgtctctgtcctctggatataggcaaacacctgaaagktgcaagagtttgcaggcctgaggtcagtgcacactcagtgagatgtgtgccctgctctgagctgtgaaaggcacagcctggggccgggcgtggtgcctcacgccctgtaatcccaacactttgggaggccaagacaggcggatcacgagatcaagagatcaagaccatcctggctaacatggtgaaactgtgtctctactaaaaatacaaacattagctgggtgtggtggtgcacgcctgtagtcacagctactcggaaggctgaggcgggagaatcgcttgaacctgggaggtgaaggttgcagtgagccgagatcgcaccactgcactccagcctggcaacagagtgagactccgtctcaaaaaaaaaaaaaagaaaaagaaaacaaaaaaaagaaaggcacagcctgagatacactgtgagcattgtggcagagctgggaccctgcagcagagagaggcctgatacacagaaggcaatgggttatggggttataaaggcgtgcatttactacatctaattggaaacaaccatctgtggggtggatactagagctatttttttttttttttttttttttgagaaggagtctcaccctgttgcccacaggctggagtgcagtggcacmatctctgctcactgcaacctccacctcccgggttcaaacagttcttcctcagcctcccaagtagctgggattacaggcgcccgccaccacgcccagctaatttttgtatttttagtagagacaggatttcaccatgttggccaggctagtctcaaactcctgatcttgtgatccacccgcctcggcctcccaaagtgctgggattacaggcgtgagccaccacgcccgacctaagtgatcccattttatagatgagatcgttgaagccaagagagggtaagcaacttgctcggggtcacccagttaggaaacaatggtactatttccaaacccggggagccaggtcctccagaaaaagtcttaactcttgggtagcaagatggagctgcagtgtcctaatctataaagttgggacaaggggcatgcaacaggaggtcacccggggtttggttctgatacaggaagcaacacagccctggagtcagtctgggttccattcctgcctgccttctcaggtgtggtattgacctgtaattactgggaaatggaaatcagtttccccaccttgcgggttggcacccaagattccagtcctggccgctctgctcagcttgtctgaatttccttcctcacctcctgccccacatgctttccaatgcgtccgcctccagagggtgaaataaaagtagaggtggcaggcatagccctgggcaaactggcccagcattgtccacacaccagcaccaggcacggtcctaagcgtcactcatgggcatgccaggcgaccctaggatgcaggtaacatctgatcgtatatgtcacagatcacatgtaacatggccacttggggactctcttaggagggacagtggcagcaggtgtcccgttttcttgtagcaacacatggataaatttgagtaaagccaccacgggcccctactccaccaggcagcctgcctcggtcatttccctttgtgacactgccaagaagatgcttctacccaagaaagaaaaaaagcaactgtttcttatactttatttacaagagccttgccctaaggcccccaccccgcgagaacccacaaggcagggtgtaggggaattgggcagcagggccgcaagcttgaaaaggctgagttcagctttggggcatgtcggtccagggagccacagaccccagggaaaatgctcgacaacacccatacggtaacttaagtgtgcatatgtgtagggggaggatttaggggtgagggtcttgtgggtgtatgtacaggtggtccagccacaatgagactgtcagcatgccccctcattctcccaggttccaggggccacccatctaaggacagtggggatatgcgtcctcactccgcagccagcagtggccctggctgctctggatataaagtttcagctgcgaggcctgccttgcctcacctgtgctccggtccacaccaaatcaccctctcaggacccagtgcctctcacattactatctccagctcgcccctctcctgagagctccagacccttacactcagtgtcctgtcatgtcctacaaacactgccagcctaacctttccaaagagcacacgtggttctccccctacccgaacccaatctctctatctttagtctctccaccatccaaagccaaggagtcctctctgctgctgtgtcctcatgtgctccttcatgaaatcctctcacctccaccttttaaacagcttcaaatccgactgcttcatacccctcagtggcctccatcctggtccagccaccatcacttcccacctgcagtcccctcctttctgggctccagcttccacccctgcccctgataatttgtmctcctacagggcagacaagaaggatctgtttaaaacattagcccatttgggccgggcatggtggcttatgcctgtaatcccagcactttgggaggctgaggtgggtggatcacttgaggtcaggagttcgagaccagcctggccaacatggagaaaccctatctctactgaaaatgcaaaaattagccaggcatggtggcggtgcctgtaatcccagctacccgggaggcttgaactcgggaggtggagggtgcagtgagctgaaattgcaccactgcactccagcctgggtgacagagtgagactccgtttaaaaaaaaaaaaaaaagccgggtgcggtggctcacgcctgtaatcccagcactttgagagacccgtggtgggaggattgcttgagcccaggagttcaagaccaacctgggtaagagtgacatcctcattttttaaaaaataaaatattacccccargagacactcctaagaatctccaatgcacctgaaatgaaatcccaacttgggtgcccctgcccacttctctgtctctccccacctgttggctctgacttaattctactccagccaaggctgagcgccttcctgcccaagggcctttgcctatgctatcgcttccgcctagaatcctgttctccagctctccccaaagtgatctctttcacctctttcggggatggyttaagtgtcacctccttggagacgcctcccagaccaccctaggcccccttctcgcttcccttcataaccattccatagcgtgtgtggaacttgatgttttgtgttcacggtctgttttccccactcagttgtcatctccagaagggcagggaccttttttctgtttccttcaccatttccccagcgtcctccgtactgggcctggcacgcagttggcactcaataaatccatgctaactkaacagacacggggatcccgccccctagcagtaactttscaactcccggctggcctcattcccaggccctgggagggtccccgaggacaagccgcggctggtggggacctcgcccgggccggagccggagggcagggcccggaaggcgcgctccgggagctggcgttgctcctcgcccaggctgcggcgcaggcggcagtggtgccagccacggcggatctccgactgcacctgtgagacgatggcgctcagaggcggcgccgtaccccgcgctgccgccagagggcgggggcggcggccgggtctctgcctacctccttgttgatgaagcagtagaggacgctgaccaggaagccctgcccagaggaggcgcggaggttacatcgctggtgggggcaggactgtaaccgcctccgcgcctccctccccgttttttgtttgtttgtttgtttgtttgtttttaagagtcggaatattgctcttgttgcccaggcgg

SEQ ID NO: 1639 - DNA, 26213 bp, Homo sapiens
agccggggtttcgtcatgttggccaggctggtctccaacttgtgacctcaggtgatccacccacctcggcctcccagggctctggaattacaggtgtgacccaccgcgcctctatgtctctctccggctcagtccctgttttctctttcttggcttctctccctcaccccctcttatctgtgtctgtgttgtctgtttgtctctgtgtgtgtttctctctgtcgctgtctctctctgtctctctctccccctctctctctctctctctgtttcttctmgtctctctcttgtagtctctctctcttggtctttctcttcttgcttttttttttttttttgagacagagtcttgctctgtcgcccaggctggagtttagtggcacaatctcagttcactgcaacctccgcctcctaggttcaagcaattatcctgcctcagtctccccaacagctgggattacaggtgtgcaccaccayacccagttaatttttgtattttagtagagacatggtttcactatgttgtccaggctggtctcaaactcttgacctcaggtgatccgcccgcctyggcctcccaaagtgttgggattacaggcatgagccactgtgtytggcctctcttcttgtctttatctgcctcccactctagatctttcttggtccttgatttctttttttttttttttttttttttttttttgagacaggatctcactctgtcacccaggctggagtgcagttacgcgatcatcacagctcactgcagcctcaatttcctgagctcaagcaaatcctcctgcctcagccatccaagtagctgggaccacaggcgcaccaccaccatgcctggctaattwaaaaaaaaaatgttgagaggccgggcgcggtggctcacgcctgtaatcccagcactttggaaagccgagatgggcagatcacctgcagtcaggagttcgaaaccagccatggctaacatggtgaaaccccatttctactaagaatacaaaaacttagctgggcatggtggtgcgcacctgtaatcccagctacttgggaggcggaggcaggagaatcacttgaacccaggaggcagatgttgccgtgagccgagatygtgccattgcactccagcttgggcaacaagagcaaaactccatctcaaaaaaaaaaaaaaattggccaggcgcagtggctcatgcctataatcccagcactgtgggaggctgaggcaggccaatcacctgaagtcaggagttcaagaccagcctgaccaatttggtgaaaacccaactctgctaaaagtrcaaaaaaaaaaaaatagccaggcatggtggcaggtgcctgtaatcccagcctctcgggaggctgaggcaggagaatcacttgaacctggctcactgcaatctctgccctagcctgggcgacagagtgaaactctgtctcaaaaaaaacaaaaattttgtttttaattctagatgacgtgttgatagatgcagcaaaccaccatggcatatgcatacctatgtaacaaacctgtacgttcagcacatgtatcccagaacttaaggtaaatttttttttttaattggaaaactgaaaaaaaaaaatattttttttttagagacgggatctggctatgttgcccaggctggtctccaactcctgggcttaagtgatcctcccatgttggcctcccaaagtgctgggattacaggtgtaagccaccacactaggctcttagctccttttcctgtttcacaccaccagctcatttcctctccactgcttccccctccctgccagcctctcccttccccctctacagcctccccacccctcactgccttcctctgtggagtgacctcaggccctcattggggccaaggagagactcccttccaacctaaacttctcccaaggtgctgggcaatctcagacccccttccctctccactccaggacaggrgcctttcccaggacccrgagggcaccaggaatgtggggcagagagcggggaggcagcctaagtccaggaagcgagaaccctcgcctcccccgagacttgtctccttccagcctctggtgcagacctcatgccaccccttactccctgtccctcctggggcctctgggccttaatttctcctctacaaaatgggcagactcgcctctgtcccacttagagtcccaggggagtgcatgctcacaaatgtccattgtatgattaatgtgcaggaattggagtttgtattaacaggagatgagagctgggagctgggactgggctctgagcctgtcccccacccccagtcacgtacagatgttccccatatttagggcaaaggaacagactggaagtagagacagcagagaatgtgtgtgattcactggcgactgtcatgatgagaccatgtgaggctatgggttagtgtgcaattgtgacacgatggtgtgtgtgaccctgtgtgcacctgtgtgactgtgcgtgactgtgggaggtgggattgcagggtgtgacaagtcactgtgacgtgcacagctatgggacagtgaggttgtgtgygtgacatgtatatgactgtatgtgacttgtgaatrtgggtgagactaagggagagttgtgagtctgtatgaccatgtcactcagtgtgaccrtgggggtgagggtgacggtgtgagagtgtttgcctcatgacagttggggaatgtgtgttgttggaatgtgactgaggactctgtgggtgactgtgaagtgtgtgagtgtgtgacrgtgttaatgggtgtggttgcatgacattgtgtgtgactttcagcttgtgtcataaaaagactgtataataagacattaaaaaaaaaaaaggccaggcgcggtggctcatgcctgtaatcccagcactttgggaggccgagacgggtggatcacgagatcaggagatcgagaccatcctggctaacacggtgaaaccccgtctytactaaaaatacaaaaaattagccgggcatggtggcgggcacctgtactcccagctactcgggaggctgaagcaggagaatggcgtgaacctgggaggcgaggcttgcagtgagctgagatcacgccactgcactccagcctgagtgacacagcaagactctgtctcaaaaaaaaaaaagagtcgggcacrgtggctcatgcctgtgattccagcactttgggaggctgaggcaggcagatcacctgaagtcaggaatttgagaccagcctggccaacatagtgaaaccccatctcttctaaaaaaaaaaaaaaaaaaaaaagccagccacagtggctcacgcctgtaatcccagcactttgggagactgaggcgggaggatcacgaggtcaggagttcaagaccagcctggccaacatggtgaaaacttgtctctactaaaaatacaaaaattagctgggcatggtggcgcgtgcctgtaatcccagctacccgggaggctgaggcaggataattgcttgaaccaggmcccgggaggtggagattgcagtgagccaagatcacgccactgtactccagcctgggctacagagggagactcggccaaaaaaaaaaaaaaaattattagccgggcatggttgcgggcgcctgtaatcccagctacttgggaggctaagacaggagaactgcttgaacctgggaagcagaggttccagtgagctgagatcgtgccactgcactccagcctgggcgacagagtgagactccatcccaagaaagaaagagagaaagggagaaagggaggaagggaggggggaggggagaggggagaggggagaggaaaaggaaaggaaagtcctttgcagcaacacagatgcagctggaggccagtatcctaagtgaattaacaaaggaacagaaatccaaacaccagatgctcttacttataagtgggagctgagcactgggtacacatggacaccaacatgcgaacaacagacactggggactcctagagggggcagggaaggagacaagggttaaaaaactacccgttgggtgccatgctcactacctggatgatgggatcatttatacccccaacctccgcatcgtgcaatacacccccgtgacaaacctgcacatgtgccccctgaatctaaaataaaagttaaggccaggcgcggtggttcatacctgtaatcccagcactttgggaggccaaggcgggaggatcacttgaggccaggagttggagaacaatatggccaacatggtgaaacctcatctctactaaaaatataaaaatcagccaggcgtggtggcatacacctgtagtcccagctactstggtggttgaggcatgagaatcgcctgaacccaagaggcagaggttgccaagttggcgccactgcactccagcctgggtgacagagtgagaccctgtctagaaaaaataataaataaaatgaattaaaataaatgaataaataaataaataaaagttgaggctgggtgtgatggcacatccctgtagtcccagcactttgggaggccgaggcaggaggattgcttgaggccaagagttggagaccagcatggccaacatggtgaaaccccatctctactaaaaatacaaaaattttagctgggtgtggtggcacacacctgtagtcccagctactcgggaggctgaggcaggagaatctcctgaaccctggaggcggaggttgaagtgagccaagatggcgccactgcactccatcctgggtgacagagtgagaccctgtctcaaaaaaaaaaaagttgaaattattttttaataaaatggtggggcatggtggctcatgcccatagtcccagctagtcaagaggctgagttaagaggatcccttgagcccaggaagtggaggctgcagtgagctataattgttccagtgcactccactctcataaataaataaataaataaaatgtaaaaaggattgyatgggccgggtgtggtggctgtcgcctgtaatcccaccactttggaaggccaagacatgtggaacacctgaggtcaggagtttgagaccagcctgggcaacatggtgaaacaccgtctctactaaaaatacaaaaattagtcggttgtggtggtgtgtgcctggaatcccagctacttgggaggctgcggtgggagaattgcttgaacccaggaggcggaggttgcagtgagctgagatcatgctwctgtactccagcctcagcaacagaggaagactctgtctcaaaaaaaaaaaattctatgtctgcgagtaaccacacaactgcatactgcgtatatttatttcatgacaatccttccttgaacccctgctcttaacgattttggggacccagtggtgacccagatgtcctggctctaccctcctgggccacacaggctagcagggcaacagtgtttgtgatgaaacccggtgattgcgtgaatgtgtgggtgattgacagtgttgttggaactgtgagacactgtgagcgttactgtgtgtgtgcaggagtccatagccctgggtacatgactgtgtgtcacagtggatgactgtccacctgtgagtgagagactgtggctgtctgggtgtgaccatgggactgtatgggtgtgactgaatgtgtgactgtgtgagtaacagcttgtgaggttctgtgactgtgcctttccatggctcagcctatgggattgtgtgtgacactgcatgtttgattgagtgactgaggctctgggaatgagtggcggtgggggcgggtacctgtgggtgggacagcatgagagattgtacacacttggtgcaggggtcctcaggacgataaggacaattcagtaactgccctccctcatgaccttgatgactgccccctgctcggctctctgccccagagctccccgcttccgttccctgtcccgccttggccccgccccctcccatcaccccgggctgccagcgcctgtcacctctcccagagccgagacaaggcagtggaggcagcggtggcaggggctgcaggagcaagtgaccaggagcaggactggggacaggtgagggctccccaatcccagcccattctccctgcccccccttgaccyctcaagtctctggcactctccctctctgcttctctgccctgcctttgtctctctgtctctgtgcccaccaccatctctgctcatctctgtctcttgatgtctctgtctgcgtgtttccatctctggttagctgctagataacttctctttcccctgctctgtctccctccacgtctctgcctcttctttgtctcctagcccacatctgcgtctctttctctgtttgtttttctctggtctctggctgggggtctcattctgtccctccgtctctgcgcctctcagtctttacatttctgtctcttgtgtctgtgacgccgttgtctgtccttctgaggctcgacctgagatcctctctgcttccgtctttctctacgtggagccgcgggggcgcgggtgagtgggtgtcgggcgttagaccgatttccaggcatctgcacatctaaccccggatctgtcgcttctctagtccctaagtatttggatgctgggaaagggttgttccacttactctgggctttatctacccccagcggggaaagttttgtaaggtcaggttcctatgtgtgctagaaaaccctttgggcttggagagtgggagctcggatgggcgtttcaagttctccaccaggctgtgggaactcagatgggcgtttcaagtaccccactagggrgtactgaaaaccttcaagtttttcagttccccatagaaaaggggtctaggctgacggtttctaccccctcctctccaaggcggtccccgggttcccaggagtctgtaggtccagacttgcggtgacactgacacttccgcccagcgtagctctagggcaaccgcccgctcagcaaacaccccscccttccacctttgctgccccaacaacagtcaggggaggccggggaatcacttaaggggycccgcccaccaccggagttccacccactccgcgtgcctctccctccccmcagatcatcacgcctgggagttgcgggagcgggtgcgctgcctcggagtcccgcgtgtatacggctccccagccgtctgcccctgtgtgtgaatccctgaggcggggtgacgctggggttggagtaggagggcagaggtgctgaccttgccctgggaccctccaggcctgatcgcccctgcacgaaccagacccttcgccgccctcasgatgactacctctccgatcctgcagctgctgctgcggctctcactgtgcgggctgctgctccagagggcggaggtgaggaagcgaggagccagaggagctccaggcttggagggaggtatggggacggttttagggcttccgtcgtcagggcgctgtcgctcacgcctgtaatcccagcactttgggaggccgaagcgggtggatcacttgaggccaggagttcgagaccagcctggccaacatggtgaaactccctctctactaaaaaaaatacaaaaattagccgggcgtggtggcggccgcctgtaatcccagctactcggaaggctgaggcaggagaatcgcttgagcccgggaggcagaggttgcggtgagccgagatcgcgccactgcactctaacttgggtgacagagtgagactctgtctcggggtgggggggggaggcttccctcagcgcaaagagagtttcaagactgtcccgcttgcccagattcaagttgttgggtggtggtttgtttgtttgtttcgagacggagtctcactctgtcacccaggctgagatgcagtggcatgatctcggctcactacaacctccgtctcccgggttcaagcgattctcccgcctcagcctctcgagtagctgggactacaggcgcactccaccatgcctggctaatttttggatttttagtagagacggggatttcaccatgttggtcaggctggtctcgaactcctggcctcaagtgatccacccgcttcggcctcccaaagtgctgggattacaggcgtgagccaccgcgcccgggcccagattcgagttttgattatcgtttccactcccttttcttcccccaacaagtcctcctgataatttccagccaccccctccccaattttcttgaaggttttcagtctcccatagcaactccagtgggtggcttccaggcaccccaccccaagacttggaactggtttccaagctacccaagactcccgaacaacacgcaacagaccctcaaagtctctctggggcgcttctgggccacatggacctagcagcctgggagcgggggtcggtctgggggggtcctcccttctttcttttcctagacaggctctaaggggcagacggcgggggagctgtaccagcgctgggaacggtaccgcagggagtsccaggagaccttggcagccgcggaaccgccttcaggtgtgaccaggagggctggggacgcggggaggacctgaggctgagaggggtgggcttgggatgggccttgggctgacgggcggggaagaaatctcggggcgctgtgggctggagaggcccggggactgacctgagcatggtgggaactggggcgggaccacggttcctgggggaggcctgggaggaagcttgaaatgggaggagccttgggcggggcctgcacagaaataaaccttgaagggggcggggtttgggatggagactgggaagggcccttccgggtgggacgatctggggcggggacttgtttggtgggaggagcccagagtggggccgggaggaggggcggagctttgaggctggtgggaggagcttgtggccgagymgggacggaacgccctccgagtgggcggggctagagccgggcttggtgtggccggcggagaagcacttggcccactgcggagaagcacttggcccactgcgcagtagcacttggcccactgcgcagtaggtccactgggcacctggcccccgtgcccacccccaggcctcgcctgtaacgggtccttcgatatgtacgtctgctgggactatgctgcacccaatgccactgcccgtgcgtcctgcccctggtacctgccctggcaccaccatggtgaggtgctccctgggcccggagccctccccagacacaaacaactgctaacctttgcccccagacacctacatccgagtcccacagctcacctgcacccctctcctgctcctctttgccccctactcctttccggcaggctgggtttctcctgtctgtccaaccctgcctatctcacataacgcagcttctctgtctccgtatctctttctatttatttatttggagacggagtctcgctctatcgcccaggctggagtgcagtgggatgaactcggctcactgcaacttccgcctcccgggttcaagcgattctccagcctcagcctcccgagaagccgggattacagaagccgggattacaggcgcgcgccaccacacccggctttttttttwtatatatatttttagtacagacagggtttcaccatgttggccaggctggtctcgaactcctaacctcaagtgatccgccggccttggcttcccaaagttctgggattacaggcatgagccaccgcgcccggccaccacaggattcttattttgtctccttttcctgagtctgtcagtctctgggcatcttaacctaactagctatgtcgcctcagacactttatttatttaacctatttttttctttttgagacagagtctggctctgtcacccatgtggtggcagcatcatagttcactgcagcctgggaactcctgggttgaagcgatcctcccgcctcagcctcccaaatagcagggactacaggcrcacgctaacacacccagctaatttttttwaaaaaattggcagtgacagagtcttgccatgttacccaggctggtcttaaactcctggcctcaagggatcctctcacctcagcctcccaaagcgctgggattacaggcctatttaacttttgttgtttttgttgttgttgagacagagtctcgctttgttgcaaggctggaatgcagtggcgtgatctcggctcactgtaacctcacctcccgggttcaagcgattctcctgcctcagcctcctgagtagctgggactacaggcgcacgccaccacacccagctaatttttgtatttttagtagagacagggtttcaccatgttggccaggatggtctcgatctcttgaccttgtgatccacctgtcttggcctcccaaagtgctgggattacaggtgtgagccaccacgcccagccttaacattttgtacctcaattttcccatatgtagaactaggttaaggatattactaattccatgggctagtatgaatattaaattaatacaaataacatgccatataagggtttatcatcatcatcatcatcatcatcatcatcaccacttcggctctctccctctctgttattgtctcacagtttgtctttctgtatttatctctttctctgtgtgccttaattccctctcttctttccccacagtggctgcaggtttcgtcctccgccagtgtggcagtgatggccaatggggactttggagagaccatacacaatgtgagaacccagagaagaatgaggcctttctggtaagaagaggtgagggcttcaggttaggagtccagggagagatggaaaggcagtagattcaggcagggcctgaaaccccttggactgttcagacctctgggttgtaagtgagagaaactcaactcagacttgcttcaaagagagaaagatgtactgccttctgtgatggaaaagaataagatggccgggtggtgtggctcacgcctgtaatcccagcactttgggaggycaaggagggtggatcacttgaggtcaggagtttgagaccagcctggccaacatgtcaaaaccccgtctttactaaaaatacaaaaattagctgggcatggtggtatgcacctgtagtcccagctactcagagggctgagacatgagaattgcttgaacccaggaggcagaggttgcagtgagccaagatcgtgccactgcactccagcctgagtaacagagcgagactccatctcaaaaaaaaaaaaaaaaaaaaaagaatgctgtagttgggccaaggtcaatggctcatgcctataattccaacactttgagaagatgattgcttgaacgcaggattttgagaccagcctgggtaacatagtgaaactccatctctacaaaaaatataaaaatttggccaggagtggtggctcatgcctgtaatcccagcactttgggaggccaaggcgggcggatcacgaggtcaagagattgagaccattctggccaacatggtgaaaccccgtctctactaaaaatacaaaaattagctgggcatggtggcacgcacctgtagttccagctactctggaggctggggtgggaggatcgcttgggccctggggggcgaggctgcagggaaccatgatcctgccagagcactccagcctgggcaacaaagcaagaccatgtctcaaaaaaaaaaaaatctctggttggctggtcacatgcctcgtgccctggagctgaagggtggagtcagcccttctcaaataagggtaagcagttccccaagataaaatagggtayttgggcagaaacaaagagcagaggtccttccagtctctctctgggcctggggcttcgagccaagccttgttcccttccccttcttgccccgaccaggaccaaaggctcatcttggagyggttgcaggtcatgtacactgtcggctactccctgtctctcgccacactgctgctagccctgctcatcttgagtttgttcaggtgggaccttaaccctgagtggtggcggcagagatgtgagctcggcctcagtttgtccagtaagatggggtggtctgtttccaccaggtccagctatccactggtggttctatggggagcagtgggggtggttaaaggagctctgtgtggccgggagcggtggctgatgcctgtaatcccagctctttgggatgccaaggcaggaggatcgcttgagcccaggagtttgagatcaggctgggcaatatagtgaaaccttgtctctaygacaaataaaattagctaggcatactggtggtgcacctgtggtaccagctatagggggscgctgagacaggaggattgcttgagctcaggaggttgaggctgcagtgagccctgattgtgtcactgcattctagcctgggtgacagagtgagaccctgtttaaaaaaaaaaatagaactctgtgtggctgaggacagctctccaggggcccccacactgccttccaaattcccctaggcggctacattgcactagaaaytatatccacatcaacctgttcacgtctttcatgctgcgagctgcggccattctcagccgagaccgtctgctacctcgacctkgcccctaccttggggaccaggcccttgygctgtggaaccaggtgggcatcctccttccgttcctccaaatgggaatcttgcttctctggtgggaccaggaagttctcagtccatttcctatctcctacactctccacagtttatctgagttgggagggtccctctccaaatgtgtcttggggtgggggatcaagacacatttggagagggaacctcccaactcggcctctgccatcatttaactctcccagcctatcactcccatactggaattttccgttcctctccctcattatttcacccatcattgaactttttcaccaatgagagaatccacctgctggcggtgaggcatggcaggatacgagaaagtaagtgggggtggggatgtggcaggtgccagtttgttactaggagacagggtgggagagactagagtctgggagcagacgtggtaagaactaacttgttgaaagttggaccataccaattgttaagaagccgcacgcacccaggcacagtggctcacatctgtaatcccagcactttgggaggccaagacgggcagatcacgaggccaggagttcaagatcagcctggccaatatggtgaaacccygtctctactaaaaatacaaaaattagctgggtgtggtggcggacacctgtaatcccagctactcaggaggctgaggcagaagaattgcttgaacccaggagacagaggttgcagtgagctgagattgcgccactgcactccagcctgggtgacagagcaagactccatcgcaaaaaaaaaaaaaaaaaaaaaagccatagcgtggcccggcagtggctcatgcctrtaatcccagcactttgggaggctgaggtgggcagatcgctttttgcccaggagttcaagaccagcctgggtaacatagcaaaaccccacctctacaaaaacatacaaaaattagccaggcatggcggccctcgcctgtactcccagctacttgggargctgagatggtaggatcacttgagtccatcaggtcgaggctgcagtgagctgtgatgctgtgatagygccagtgcaatctggcgaaagattgagaccctgtttcaaaaaaataaaatgaaataaaataaaataagaggggccaggcacagtggctcatgcctgtaatccaagcactttgggaggacgaggaaggcaggacacaaggtcaggagttcaagaccagcctgaccaacatagtgaaaccccgtctctactaaaaatacaaaaattagctgggcatggggcacatgcctgtagtcccagctactcaggaggctgaggtaggagaatcacttgaacctgggaggcagagattgcagtgagccgagatcgtgccattgcgctccagcctgggcgacagagcaaggctccgtctaaaaaaaaaaaaaaaaaagaggaagccatagggcaggagagtccataatgtgggtactggcagggagttcagttcttagaaggagctggggtgaccagtgacagaggtcacattttggggatctaggggggaactgacggcaatgatggaagataccaattattttttgttttgtttttgtttgttttgtttctttgagatggagtctcaaaaaagaagctgatttttttttttttttttttttttytgagacggagtctccctctgtcgctcaggctggagtgcagtggtgcaatctcggctcaccgcaacytccrcctcccgggttcaagcgattctcctgcatcagcttcccgagtagctgggattacaggcgcctgccaccacacctggctaatttttgtatttttagcagagacagggtttcaccatgttggccaggctggtcaccaactcctgacttcaggtgatccgcccacctcggcctcctaaagtgctgggattacaggcgtgagccaccgcgccctaccagataccaattgttaaggggttcagagtgggagagtccatacagggaaagggaatagggtgagagaaaccaatcacagataccattcactggggacacagagtggaagaacctttgatggcaagagacggggtggaagggcgatcaaagctgggggagrctgggagacacccgggcagcgctgactacccctytaccggtctggcccctccctaggccctcgctgcctgccgcacggcccagatcgtgacccagtactgcgtgggtgccaactacacgtggctgctggtggagggcgtctacctgcacagtctcctggtgctcgtgggaggctccgaggagggccacttccgctactacctgctcstcggctggggtgagctccgatcccgtcccccgcccaacccagcgcgcctctcctcgkctcccccaactgccctgctggttggcctctgcgggtctcctcccgtctctaggcttctgccttccccaccccgacagaggaattccgcgggtcttgggcctggcggggcccgtgagcgcgctgacagctgcggcggggtgggggggcggggtcggggtctgcacaggggcccccgcgcttttcgtcattccctgggtgatcgtcaggtacctgtacgagaacacgcagtgagttgcagggtctggggcggggcgtgggaggtgggcggggctttgagggactgtggcgggttgtgatggacatgtgggcagggtcggaaggctattcggtgctggggatacgtgggcgggatccgaagtaatggggagctaggaaaggttgtgttccagggcaatcggcaaggggagggggtggggcctggatcgtaatgggcgggaccttagagaatgtgtgtggtctcaagtgcggtgggcggggcctagcgagcaaatgagcttggtgatcggtgagtctagagtttttctatctcttagctctactccgccttccccaggtgctgggagcgcaacgaagtcaaggccatttggtggattatacggacccccatcctcatgaccatcttggtaggatcggtcccgcctccaccaggccgccctcagggatttcccattctgggaagtgggctgccacctcctcctgccccttcagaatgggatcgcggctggctcagcccttatctctccccacagattaatttcctcatttttatcckcattcttggcattctcctgtccaagctgaggacacggcaaatgcgctgccgggattaccggctgaggtgagggcatgcgttggggaccgaggggaaggggccgggtgcgagatggggaaccagggctgcgggatcactgctgccgccctctctccccaggctggctcgctccacgctgacgctggtgcccctgctgggtgtccacsaggtggtgtttgctcccgtgacagaggaacaggcccggggcgccctgcgcttcgccaagctcggctttgagatcttcctcagctccttccaggtgctcaggcagggtgcaggggctccatccttccacccagggcctcctccccagaggggcacgaaagctacagtcgttctctggtgcagccactgaatggggtgggaagatgggatttagttcgttcattaattaattcattcttttttttttttgagacggattctcgccctgtcgcccaggctggagtacagtggcgcgatctcggttcattgcagcctctgactcccgggttcaagcgattctcctgcctcagcctctagagtagctgggattacaggaatgtgcgacaacacctggctaattttgtatttttagtagaggcggggtttcaccatgttggccaggctggtctccaactcctaaccttgggtagtccacccgcctcggcctcccaaagtgmtgggattacaggcgtgagccatggcgcccagcccgttcattcattcgatacaaaatactgagctaggactgtcctgggctgtggggagcagcagggaccaggacaggagattggcggccccagcagtgctgcctgctagtgaagagtgagggcttcgaagctggacacagctgaggccaaattcaggttctgtcactttctagctgtttgccagctgtgtggccttcacctcagggttgagggtagggagaggtaagtgaggtgccaacgtgcagaatctaaggaaagattcattccaaaattgaaggcccaccttacacttgcttggtttacctgagtccccaacctgcttcacctcattcggcctgttttctcatctctaaagtggggaaaatactagtctcagtggacaaggcwgttcattcattaaattcagcaaaaaattactgagcatgtgtatatgctaagcactcctccaggcttatcacaggaatacagccaagaaccaaatggtccctaccctccagtgggaaagacacactaaacacactatagaagtaaggcatacagctgggcgcagtggctcacacctgtaatcccagcattttgggaggccgaggcaggcggatcacctgaggtcaagagttcaagaccagcctgaccaatatggtgaaaccctgtctctactaaaaaaatagaaaaattagctggatgtggtggcggccgcctgtaatcccagctactcaggaggctgaggtcggagaatcgattgaacccgggaggtggaggttgcagtgagccgagatcacgccactgcactccagcctggccacagagggagatcatgtctcaagaaaaaaaaaaaaaaaaaggaaagcatatagaatgtcagatggtgagatgtgcctagagggagaataaagcaagaaaagagatgaggagtgtccactgagggatgggggttactgttttatttatttttatttttttagagatgaggtctccctctgttgtccaggctggatccagtgcaggggtgtgatcctagctcactgcagccttggactcctggtccaaagcaatcctcctgcttcagcctcctaagtggctgggagcacaggagcaagccatcacacttgactaatttttttttttttgagacagagtttcactcttgttgcccaggctgcagtgcaatggtgccatctcagctcactgaaacctctacttcccagattcgagcgattctcttgcctcagcctcccaagtagctgggattacaggtgcccactaccacgcctggctaagttttgtatttttagtagagatggggtttcaacatgttggccagactggtctcgaactcctgacctcaggtgatccgcccgcttcagcctcccaaagcgccgggattacaggtgtgagccaccgcgcctggccaagatcctcatctctaccaaaaataaaaaattagctgccgggcgcggtgcctcatgtctgtaatctcagcactttggaggccaaggaggccagtccagcgtgaccaacatggagaaaccctgtctctacttaaaatacaaaaattagcsaggctaggtggcacgtgcctgtaatcccagctattcaggaggctgaggcaggaacatcgcttgaacctgggaggcagaggttgcactgagctgagattgtgccactgcactccagcctgggaaacagaacaaggccctgtctcaaaaacaaaaaaaaaattaacttggtgtggtggtgcatgcctgtagtcttagccactctggaggctgaagtgggaggatccctctagctcaggagttgaggttgaagtgatgaagtgagccatgatcactccactgcactccagcctgggtgacagagccagaccctgtctcaaaaaacaaaaacaggctgggtgcgttggctcacgtctgtaatcctagcactttgggaggctgaggcgggcgtattgcctgagctcaggagtttgagacagcctgggcaacatggcaaaaattctgtctctactaaaaacacaaaaaattagctaggcgtggkggcgcatgcctgtaatcccaggtacttgggaggctgattcaggagaatcgcttgaacstgggaggccaagtttgcagtgagctgagatcgtgccactgcactccagmctgggcaacagagcaagactctgtctccctgtctccaaaaaaaaaaaaaaaaaagcaaaaaacaaaacggcaacacaatcaccctaaattttcacaactactactatattactgctccattttccagatgaagaaactgaggcacagtgtggttaagcagcttgcccaaatgggaaagaaagtggaaaggtggtttttgagtccagggagcccacctccagggtccacagttcttaacccccagccagcagtgctcagctaaccttctggagcaagcagtggggttggtgtgggggaagccaggaaccagtgaaaagatgaccctaatagtttaggaccacggtggcggtagctgaggtgcttcagggcctggcaagggcgcgagcttattaagagaacagttacaaaggctaggcgcggtggctcatgcctgtaatctcagcactttgagaggctgagatgggtggatctccagaggtcaggagttcgagaccagtctggacaacaggatgaaaccccgtctctactaaaaatacaaaaattagctgggcgtggtggagggcgcctgtaatcccagctactcaggaggctgaagcaggataatcacttgaacccgggaggtagaggttgccgtttgccgagatcgtgccactgcactcccgcctgggcaacaagagcaatattccgactcttaaaaacaaacaaacaaacaaacaaacaaaaaacggggagggaggcgcggaggcggttacagtcctgcccccaccagcgatgtaacctccgcgcctcctctgggcagggcttcctggtcagcgtcctctactgcttcatcaacaaggaggtaggcagagacccggccgccgcccccgccctctggcggcagcgcggggtacggcgccgcctctgagcgccatcgtctcacaggtgcagtcggagatccgccgtggctggcaccactgccgcctgcgccgcagcctgggcgaggagcaacgccagctcccggagcgcgccttccgggccctgccctccggctccggcccgggcgaggtccccaccagccgcggcttgtcctcggggaccctcccagggcctgggaatgaggccagccgggagttgsaaagttactgctagggggcgggatccccgtgtctgttmagttagcatggatttattgagtgccaactgcgtgccaggcccagtacggaggacgctggggaaatggtgaaggaaacagaaaaaaggtccctgcccttctggagatgacaactgagtggggaaaacagaccgtgaacacaaaacatcaagttccacacacgctatggaatggttatgaagggaagcgagaagggggcctagggtggtctgggaggcgtctccaaggaggtgacacttaarccatccccgaaagaggtgaaagagatcactttggggagagctggagaacaggattctaggcggaagcgatagcataggcaaaggcccttgggcaggaaggcgctcagccttggctggagtagaattaagtcagagccaacaggtggggagagacagagaagtgggcaggggcacccaagttgggatttcatttcaggtgcattggagattcttaggagtgtctcytgggggtaatattttattttttaaaaaatgaggatgtcactcttacccaggttggtcttgaactcctgggctcaagcaatcctcccaccacgggtctctcaaagtgctgggattacaggcgtgagccaccgcacccggcttttttttttttttttaaacggagtctcactctgtcacccaggctggagtgcagtggtgcaatttcagctcactgcaccctccacctcccgagttcaagcctcccgggtagctgggattacaggcaccgccaccatgcctggctaatttttgcattttcagtagagatagggtttctccatgttggccaggctggtctcgaactcctgacctcaagtgatccacccacctcagcctcccaaagtgctgggattacaggcataagccaccatgcccggcccaaatgggctaatgttttaaacagatccttcttgtctgccctgtaggagkacaaattatcaggggcaggggtggaagctggagcccagaaaggaggggactgcaggtgggaagtgatggtggctggaccaggatggaggccactgaggggtatgaagcagtcggatttgaagctgtttaaaaggtggaggtgagaggatttcatgaaggagcacatgaggacacagcagcagagaggactccttggctttggatggtggagagactaaagatagagagattgggttcgggtagggggagaaccacgtgtgctctttggaaaggttaggctggcagtgtttgtaggacatgacaggacactgagtgtaagggtctggagctctcaggagaggggcgagctggagatagtaatgtgagaggcactgggtcctgagagggtgatttggtgtggaccggagcacaggtgaggcaaggcaggcctcgcagctgaaactttatatccagagcagccagggccactgctggctgcggagtgaggacgcatatccccactgtccttagatgggtggcccctggaacctgggagaatgagggggcatgctgacagtctcattgtggctggaccacctgtacatacacccacaagaccctcacccctaaatcctccccctacacatatgcacacttaagttaccgtatgggtgttgtcgagcattttccctggggtctgtggctccctggaccgacatgccccaaagctgaactcagccttttcaagcttgcggccctgctgcccaattcccctacaccctgccttgtgggttctcgcggggtgggggccttagggcaaggctcttgtaaataaagtataagaaacagttgctttttttctttcttgggtagaagcatcttcttggcagtgtcacaaagggaaatgaccgaggcaggctgcctggtggagtaggggcccgtggtggctttactcaaatttatccatgtgttgctacaagaaaacgggacacctgctgccactgtccctcctaagagagtccccaagtggccatgttacatgtgatctgtgacatatacgatcagatgttacctgcatcctagggtcgcctggcatgcccatgagtgacgcttaggaccgtgcctggtgctggtgtgtggacaatgctgggccagtttgcccagggctatgcctgccacctctacttttatttcaccctctggaggcggacgcattggaaagcatgtggggcaggaggtgaggaaggaaattcagacaagctgagcagagcggccaggactggaatcttgggtgccaacccgcaaggtggggaaactgatttccatttcccagtaattacaggtcaataccacacctgagaaggcaggcaggaatggaacccagactgactccagggctgtgttgcttcctgtatcagaaccaaaccccgggtgacctcctgttgcatgccccttgtcccaactttatagattaggacactgcagctccatcttgctacccaagagttaagactttttctggaggacctggctccccgggtttggaaatagtaccattgtttcctaactgggtgaccccgagcaagttgcttaccctctcttggcttcaacgatctcatctataaaatgggatcacttaggtcgggcgtggtggctcacgcctgtaatcccagcactttgggaggccgaggcgggtggatcacaagatcaggagtttgagactagcctggccaacatggtgaaatcctgtctctactaaaaatacaaaaattagctgggcgtggtggcgggcgcctgtaatcccagctacttgggaggctgaggaagaactgtttgaacccgggaggtggaggttgcagtgagcagagatkgtgccactgcactccagcctgtgggcaacagggtgagactccttctcaaaaaaaaaaaaaaaaaaaaaaatagctctagtatccaccccacagatggttgtttccaattagatgtagtaaatgcacgcctttataaccccataacccattgccttctgtgtatcaggcctctctctgctgcagggtcccagctctgccacaatgctcacagtgtatctcaggctgtgcctttcttttttttgttttctttttcttttttttttttttgagacggagtctcactctgttgccaggctggagtgcagtggtgcgatctcggctcactgcaaccttcacctcccaggttcaagcgattctcccgcctcagccttccgagtagctgtgactacaggcgtgcaccaccacacccagctaatgtttgtatttttagtagagacacagtttcaccatgttagccaggatggtcttgatctcttgatctcgtgatccgcctgtcttggcctcccaaagtgttgggattacagggcgtgaggcaccacgcccggccccaggctgtgcctttcacagctcagagcagggcacacatctcactgagtgtgcactgacctcaggcctgcaaactcttgcamctttcaggtgtttgcctatatccagaggacagagacataggcagagacaaagatatggggggagggcccaacacagtggctcacacctgtaattccagcattttgggaggccgaggcaggaggatcacttgagcccaggagttcaagatcagcctgggtaacacagtgaaatcccatctctacaaaaagccggcaggaggatcaattgagcctgggcagtcaaggctacagtgagccatgatggtgctgctgcactccagcttggcagacagaatgacaccctgtctcaaaaaaaaaaaaaaacaacaaaaaacaaagatatggggagcacacgatgtgtgtgtcagagcaacacagggaatttccttaatccccccagtatataccacctccctttcccacctccatttatctccccaaatttgtcagagaattcctctcaagggtaatgcagttgaatctgaggggcagcagagctcaggggtgaagccacaggctctggaggtgagtttaaatcacagcaccaccacttcctggctggttgtccccgcaaagtgacattgcctctctgtgtctcagttccttcttctggaaaagggggataataaattaacaggcccgcgccagagctgttgggaggatgtttgaaaagcgctgagcctggcctggcacctaaacagctcagcaagtgttagccaggatcactagcagtaatatttagctactgactgctttcttttcttttctttcttcctttctttccttttttttgagaggtagtcttagaatctgttgcccaggctggagtgcagtggcgcgatctcagctcagtgcaacatccgtctcttggttcaagctattctcctgcttcagcctcccaggtagctgggaccgcaggcgtgcaccaccatgcctggctaattttgtatttttagtagagacagggtttcaccacgttggccaggctggtctcaaactcctgagctcaggtgatccacccgcctggcctcccaaagtgctgggattacaggtgtgagccactgcacccggcccttttttctgtttcttatctatttagtttagagatagtatcacactgtctataaaactcacaaccattctcccaggctagtcctaaacttctgggcttaagcaatgctctcacctcagccgctgtgctggtggcactgactgcgttcatcacctgtctaatcctcctgtctttcagggcagaycagaggctcctgggtacctggtgcccctgcactgcaacacagggctggacacacagggggcatttgggggatgtttgctgaaggaacaaacataaagaaaggctgaaagatacacatatataatttttgagatggagtctcactctgtcacccaggctacagtacagtggggccatctcagctcactgcaacctccatctccggggttcaagcaattctcctgccccagcctcctgagtagctgggattacaggtgcctgccaccatgccctgttaatttttgtatttttagtagagacggggtttcaccatgttggccaggctgatctcaaactcctgacctcaggtgatccacccgccttggcctcccaaagtgttgggattacaggtgtgagacaccacgcccrgccagtttttgtatttttagtagagacagcgttttaccatgttggccaggctggtctcgaattcctgacctcaggtgatctgcccgcctccacctcccaaagtactgggattacaggtgtgagccaccatgcctggccccaaaagatactttggtcaagcgaggccaattcattataagaggtagagaagagagcaacagagtgacaaggagaagctcaggaagattaaagcaggagagctaaaatgttctccagagccacarctgggcgctcatttccatgcaaactgtttgctttgcagatggagaaagtgaggcctcgatggggcagagccagggcctctccacttgctcaggggtcctgctcccaccattcagtccgataccagctgcctcccccaagccctcctgaatccaccccactcccaaggctctggaaacagataccactagaaaaaaacacagagctttattattctcaacaccaatggcagcggtcttcataggacagaggagtgagttctgtcaacagacaggckgcccctacttgccggcgatgagcgggttccgcaggaccacgatgactgagtccccgcgcaggaacatcttggagatgtagcggtctttgttgactggcttggacttcttcttgcccttgccacycttgggtacctcagtccacatctccttcacgttctccagcaccatgttgcagtgcctggtggggaacagggaggggaggcactgggcgtgrggggcgtgcctctgacagtgccccctactgcctgctgctcgccccctccagcagcatggcttggggaagggtgcaggtgctaggccgggatgaccaagctgccaaagcaactctgccagtccttaggttgaggctgaggcaaaggactgcacctctctgtgccagtttgctcctttttaagagggaagataatsacgttaccttcctcacagggccattgaaaattatcattttcttttttgagacagaatctcactctgttgcccaggctgcaatgcagtggtgcgatttcagctcaccacaacctccgcctcctgggttcaggctattcttgtgcctcggccacctgagtagctgtgaatacaggcgtgcaccaccacgcctggcttttatatttttagtagagatggggtttcgccattttagctaagctggtcttgaactcctgacctcaggtgatctacccgccttgccttcccaaagtgctgggattacaggcatgagccaccacgcctggccatacaccccaggcttctgagacagctgtctttgagctcttcagactggagctggagtggcctctccaggcctgcggagaacacctcccaggacccagcactcacctatcgaaggccttcacgcggcccaggagtttcttattgttgcggcagttgatgagcacttgggtattgt

SEQ ID NO: 1640 - DNA, 43363 bp, Homo sapiens
gagtagatcttatagaagtggcagctcagccttcccactccttgacccttcagaggcccagggctgctctctgaatttccccactctcttgtgcttctcaggaattcaccgtcccccagctccrtggccagcagcgactcaggaagtacagatgagatccaggatgagttcgagcgcgaggcggatgtggagcccatggtcagctgatgactgaggccctgcgagcctggtggtcttggtgatggggccctgccacctctcctcatggggccaggaaggcccctcggagtggggttcgaagccacaccacacagactttctctgccctcccttctctggaggcccygagggactgctgcttccttccttccttccacaccaccaacgggtgccccgtctccatcccccacccacccaaggaatggtgctgtcaatttctattgttctccacattacaaatgcagacttctgtgcggactttgcagtgttaactgtgccttctcccttaagctgagccactttgagctccaaagaattattcctagcaggtgtttttatacagaactctaagctgagggccgggccaaccggccgtggtgtaatgtggtttctgccgtccgtcccacctgctcctctgattggccatgggctatgccctcccttcctcctgagccagcccagactcggcctggagcttggggtgctctgccaacccccaggaaggagccgcttgcctctgtgagctttctaggcctgggtagggaccaccccaattttctcactccctgaaggagagaaaggtggaaggaagggaaggaggacacattttaattttttggggggatcgagtggcaaagttgaagggacaaggcactgtgaggggaaggcagagsctcactgtgtttaaactactatgcaaaaaacaaaacaaacaacaaaagcagcttgccttatatcattgtggaaggcaggacctctcctgggctcctggcttccccctggagctgggagagaggccggggttagggtgatctgtgtggcagcactgactgggtagtgtgggtttggccgaggttggtcatgaggcyggggttcccgcaaggcactggcctccctgaccgcttgctyccttccggacctctgggttcagggcgggggyggagggatccttgatttccctgataacttgatgttcttccctccctcgccagccaacaatagaggcttagagatctgtaatttctctgtgagaaagtctgaaggggccaggcctggtctctgctcccttctacccgccttgggttaggactgtccggcagttgcctgcttttggctgctggcaggagagaagcagggtgggctgctggcagtgcaggagctggagtgagggccatcctctttctgctcctcgacacacgcaagccgctctcagcagttccctcgactggccagtcggggtattgatctgagccagcatcccccaagacttgaatggcttgagtgggactgcrttgaagggcactgtgtggcccccttccaaatctcagcttggagccagctgagcaggctttgctttattattattttttaagcctactgcagtgggtctgttgccaattttaattttttattgtcccaggagctccctctagtggtcaaggtagcaaaatgtgcccaaggactagaacttgggtccctctgccttgcctggaggcagaaggagggggctctgggtttgactgggattgtggtccccaggggtccgtggcctttaaggctcttctctcttttctgtttccsccacctgtgttacagtcttaaaaatactgtacataaaagatatatgtagagagagagagagagcgtgagaatgtgttagtgactatgtgtgatgtaatttatcacgatttggtggccttcgtcatgagttttttcctttgttttcttttgctgggggcacctcccacgggtcccctgtggcagtctggctgtgacacttccatagtcagcatctcttgttagccaaacagttccctttgacaggtacttggagggacaatggttttggaagagagacggcccttctctctcctcactcacccttgttctaaaggttacagggttcaaacatacctgattcttgttgttattgttgttgaatttttattttaaccaaaggttatcagagccagttgggcttggacctcagctgctaaaaagattttccgtttcctcgagggcaggaaaacatccaccctcgtgggtctcctccgtccagggccgagggaggcattggayaatgtggtatgggagtttcgtgggcagcgtggaagccggccctgggttgttccccaaggtggtgggagggtgacagatatatctttagacttaagactgtaaggcagcagtgttagcatgggagtaactaaggttactgtggttatcggtgtccggcggtattatttttactttcctccttgtatacataggtcatttgtctttgaggactagggtactctagggagtttgaaaactgcaggagccagaaagagatcctggcctgagagtcccytcyggctggcttttaatatctgctctcctcttgggagtgaggacttggggcaggtgggtaggagagggaaagccagagtgtgatgggcctgcctcctgggctggttcctgggtccggcctgcctgcctgcctgcctgcctctccaccacatgcttttttcagttaatgtcagtgggccctgcttgtcccctcaccatgagcccacagcttgccaagaaagaccccaacgctcgctggggcagcaccagtcctagctgggacgaattggtccatcctytgtaaagctgtaaatrcttaattttgactttctatttctaagcccagtgtcatattgacactggtattttagaattttctcagatgggctctcctgcgctgccctctgtctcctgtttttgggggttttatacaaacagaggattggggagggataggaagactagcatccttttggctccctggttggttgtgaaatacacacacacacacacacacacacacacacactcgcactcctctgagactccgaacagagaaaaaaattattggcaaatcaacacatttttctttctcgtcttgagaaaatgtcttgaggtccctgaagggccaaatccatcgtggactaactctgtgggtagagctcagatgacctagggagaattaaaccacttamgcttggagtgggaggagagggggtggggtgggggagaatataagatgtaacttaagctaaatgtaatctatttataaagcaagagactctcatctatttttatgaaaggaagggttttttaatctagggtaggcagttgtggtagcccagcattttcctgtggacgagacatggtgcatgttgttgctggattgaatggaacccattcctgtccccyggcctcgtcttctgtcctcacttttggtcatccacacccatgagcagcttcagcagagtgtaggtcccacttcaccccattctcctctcctctgacccctcagctccttggaagtcttggggtggggatctgagggggtgggtgggctgcaggaaattcagaaatgtggtgggtgggggaagggacaaggcgcattagggagggaacaagctgggctctggggataggctctgattaattagttactctgactctggtctgccgagatccatttccaacccagttgcgttgggagagggttgggaggcagcagagcatgggtracagtgggagcacacgacttccttggagcctgggcctttgcgggtcccaggtggtcaggcagctggagcaraagtggaaatggcttaagatgctcatagcccagccccggctgtgtctactccaggccaagcctgggctgcagtccttgctatgttccccccagggccctgrggggagggatcagggtgctgggggtttcctaggacaggggtcttcccccttgagacaccaagctctggctctagaagagctctctcctggagtggggagtctggaggggactgggtgggtgcaggtaaagccagattctctctggaagggaattttctakgaatggatgatttccaggctcagggtgggctgtgtgttagttctgagcaaatccctcaccaagacccttccctcccaagccctcaaagaaatgaggcaaagcccttccctgcaagaccccttgtggaygtttttgcatctacctgatttttagccccacccagggagactttataccccatgatcctgccccaccgttgctgttgtctgccagctgggtctagcatcacagggaagggggggatttatactcayggaaagactactgatcctaccggaaaccaacctgtttactgtactgttgtaaatatcatgccctttatatcctgtatattggcttcttttaaataaagtgaaatgtcttagaactgatggtgcttttttttgtttttgtttttaaacagaagatgaatctggtgttgggggaggggtaggaggacggaaggccacagaaaccctcaaactcattagttaattagccataaaataggggatttcatatcacctgttacatttgtagctcacaataaaagctttggaagatgacaaagcaggaatcattacacacattttactgaaggggaagagaggacatgagacatcacaggctcagtaactggcttggcctggtttggaactgatgtccttttaaccacaaagcccccatttttccaggctctccaacgtgcccacaggaggtcaccttcccaggctctggatttgacagtaaccaatgttctagtttttcttgtcaatgggcatgttcagggcaacattgcccaaatgtgaactgagcccacctgtctagggttttctccaaaggtgaagacaaatagccgccaccaattccaatttgctttttgccattcctaatacttggcayttaggtaatctccctctcctactcttcatttaaatgtttacattctcccaaagtacctcaaatggtgtaatctggagaaaaataagtggcttaagatcacgggggctttgtgagttgggtactattacttccgttttacagatgaggaaactgaggcccggaaaggatatgtagtctgcctagtgccctgcttgaggaaccaaaatcagcatgggaactgactcctaagcaggtgcgcggttcatgctgctggaagaaatataaacaaattagaacagagagtaaggaaacgtaacattactttaggaatagattgggtccctgagacctcgtcatcagagaagacttcagaatccaagttttaaatagcattctagtgtttaccaagcacacaacattttgcaaagaaagctraawtttttacttgggggtaaaaggctcaggaacaactggttttgcggccaaaggctttaaatgaaaagctaagcgttggccagctcaggttttatcttgcattgatcgtaatctgcaaggaagctaagaagctggccggccccgcgcctggagggtaggtggagagcggctgggtcctggccaagaagctggaaggcaggctcattccaggggccgcagcccccgggaagaagcagggggctggccgcgctgtggccctgcggggtcgaggagtctggtagcggacaggtttccagccttgtacaagccaccggcagcccgagagaagtcagtcggactcccaycgaacccggggcscacgccagagggccggrcgcagcgagtccttctgccccgcttcagcacgtgtcccatttcggttatctcattggctctattcagcccctctctgctccgctttggaaggctgccgcaggaccgccccgctgattggttcagaagctttggtgtgtcactctgactggtcgacagagttcacgccctctctcccgggtcataccataaagagaggaggggaaaacgcatgcatttcaggacttcgctttcgggttcccttgtcctgtgttgtgtaatgcccccgttatggcactagaaatattttttattagccgaagctaaatatagtgggactttggctgatcccgagctcggaggacagccggggtgatccgtttccccccgaggatcgaggtggtgcgctctggacggggttgtgcattctcgccgcgcccgggcggacgatccagcgaacagccccgcttctarccmgagatgctgctgccggcgcccgcgctccgccgcgccctgctgtcccgcccctggaccggggccgggtgagtgagcacggggcccggggcggcccgagcgcgcgcctggggcccgggagcctgagagtcactgggcgtcccccgcgccgcactccctccctgccggacccccaagctgcctcggtcaacgccgggttcctcaggggctcccctccgwcccccacccaggcctttctcccactgagatcccttagcctcctccctcaggtagtcaccttcctttagcgaggggacccctcttcccgaatcctgcgaccgagtagggtgcctcggtggccctgccggttcccacgctcggaaagtagcctctgtagtcactcacctcactcctaatactggatcttcgcaatttgctggcttcccctgaggggcccttctatttttagcacaccacacatctcacttccccaccctcgtctcacgttcagtgtccccatcccgccccggattccccgagtcctctccttctaccaggatttctacctctctcttttccgctccccacacaccccgccgcccgtttttttttttttttttcaagttaaatgttggacagaaaaaaggattcctttcttcttgtaggtggaataatcatatttatagagtgcttataatgaaccaaatgctggccgggcaattggcaggtgtcttatgaggattaaatgagttaatacatggggagtgcactgaacagtgcccagcacaaaggcagcgcccggttattattattgccacgatcatcatcattatcacctctatttaaacttctcactcctgtgaggcaggtcattattccaaataatgaagaaacccaggagcagttcaggggtggacctgcccttcaaatcccgatttgcaaacctgacattgtggagccaggtgcctggacccttgcccactcaatgacaaatattctcagagcccctccagctcggagctaggtttggagaggtaggtgggacacagaccctgccccagaggggttcctagtctggtggggctgcccacctgtggatcagccccccctcccattkgargtttgtttgcttgacccctggggctgttagtggcagkgtctttcctgatgagctgtgccctttctgagttaatcagtggccctctcccttcccccaagggatggcatggtggtgctctgagcacawgtgagttkcaacactgctgtgtgtcctctgtgggtgragaggggataggaaagggcgcaggaagaggacatgggacagaggggttcctcttctaggctgagactggggccacacttgccatactcyckgtgtgatcccgtttgcaggccttccctgcactctgagactcaggaagatggagcttatagagtcctgtgtttactgagtgcctactgtgagctggtgctctgccaaacaccctagagatgaggrgtacccagggaatttacatggggtggggcctttgaggagttttcggcttaataggggagaaatgcataggaaaaccctccaatatctagtagaaagcaatccatattctaaaagataagcccatgataacaataatgattatcaagcaatcaagcaccatgggcctaacaccgagccggtaagtactgtctcattcctgtattatcatgggaaacgatctgccatcagagatatatgactgaaattacatttggtctaaatccagatttatgctctgaattatgaggcctcctgaattgagaggggaaagagaaagagcattttgcagctggttccctgggctcaagttacccctttgatacagcagctggccgcatgccctagacaggatttctcaacctcaccactattcgcatttggggctacattttggttgctgtggagtctgtcctgtgcactgtagaatgtttagcagcgtctctggcctttacccgctgcatgtcaggggcacccccggccctgacaattacgaaaaaaaccctggccctgacaggaaacacaagttcccagacattgtcagatgttacctgggggacaaaagtcacctccggttgagagccagtgctctagaggaacagctttgatgtttgatcacttgttcatttactcagtgaacatttagagcacacccgtgacatgccatgtctgcatttatggagaaacagtcgcagggcattttcagtgacatccctcagtgtcctacgtgtaaaactctagtcctgagaaaaaccgctgcttttgaggaacgggtataggagatgcttcttagtgttttcttttttgccttgagtgccaggaatctctgctagttttaaaaaatacccttgatacatgttttcttttagtttaatacatgtcaactgtgaaaagtacagataaggcaaaaaaatagaaaaatcacctggaattgtaccacacagaggtacccactgttaacattttgattcatgtcctttaactttccatgaatagatatgcttttaaaaaaaacctcatagaaacaagctcatctgcccatactttattgtagcttgttttttccctttatacacttgtctgccttacagtatgttcccaggccctggaactgtgtctggcacctggtaagcccttggcaaacatttagggaatgaatgaactaatcatgtgagcccttccttgtcaatcgatatttatcacggccagcctcaggacaatcaccataaagtgtggcctttataggtgggcccagggatggcagctggtgacaatgactgccatttacttttcatgtggattattttactcagcctctcagcaacctatgatgtaggggttaccacccccatttcacagattaaacaactgaggcccatggaaattaaggaaaacttgtccgaggccttgagctggtgaacaccaggcctcccaactgactgtctctttcctcctttaaccctgacttcctgtttttttctcaatcaactttaccatcagtatcctcagttctctttggaaacaggcaggatacagattaatagccagcccaggcatgtagtaggcttataagagttcacttctgttccttatttcttgtgccaagcccagacatgactccagctcagcccgtctgacatcagggggcttgtgggccggaattggttactaccgtgtcccctgcagtgatcctgggtggttttggactcttctcaggctacctgatggtttaattttcaaaatatcaaaagcacacaatgcttttccyagtctgcccagcccttggatgggcacagcttgccctgggtcgagggctggcatttcccaccattccttagacattctctgctcttgaactcctccaaccagtggctggggcagtgcctttggcctggaatgtcctgctggccacctcrgtgagcccatccagtgctttgtggccttggcaaggcagcttctgtcccttcagtatcctcgtctgcaaaatggggatgattgtattaacagccacgtagcaggtggctgcaaggattagcggtgatgtgatcagtggtttcctggatgctggtaccgaatgcgtgctctgtgagtatttgagttggagaataattaaaacctgtgattatcatcacacttctaaagtagtgaaagcgccattgaggcagtgcttggcagtggcacccctgggagcagcctgcctcctgtgccctgcatctggcccggcacacagtaggcgttgaacggttgctgttgagatggtccagaacacagcatggcttggatcctggctccaactcttggcagctctgtggccccgggcaggttactcaccctctctgggctcccttatgttctcatatggaaaataaagatgacagtagtagtcacctcataggattgtcctgcgtgttaaatggtctcatacatggaaagcactttggagtgcccagcacctgaaatgctcagtaagtgctgctgtggttatgatgatccccctctcccaccaatgggcttcctggagtgatcatcttcgatcaggaatatcaagacagcagggcccagcagtgaaggatggtggcaggaggggaggtatggaactcagatgtcctcggtctcttctgtttattccaattaagtaccccagatgccaaacctcttctgttattattgttggtttgtttgtttgtttgttttggagacagagtctcactctgttgtccaggctggagtacagtgtcatgatctcagctcactacagcctcaacctcctgggctcagtcatcctcccacctcagcctcccaagtagctggaactacaggcgcacatcaccatacccagctaatttttgtattttttttttttcgtagagacggggtttcaccatgttggccaggatgatctcaacctcctgggctgaagtgatcctcctgcctcagcctcccaaagtgctgggattataggcgtgagccactgcgtccgaccttctgttagggttttgaccctgctcacctcaggggatggaaragacttctccctttcttgcagcctccttaatccccaaaccttccctttcctggcagaggtcatggcatggagtgaagagtccctgggctgagctgctgtgccagtggacagctgagtgaccttgggcaagtcactgcccaccttggggcggcggctttcctcaggtggaaatgaggttctagctgtatggtgaggaggatgaacgtgtcccatcagccccacctgaccatgggcctctgagatgttccaggtgcttcagccatactgtaagtctcctgagtaaggaacagctggggtcaaatcctgctctgtcactcatgagctgtgaccctgagccaggagtgagtaactctgaacctcatccgtaaacagatcattctacggtcgagtgtccctcatctgaaatgcttcagaacagagtgtttcgttttttgggtttttgtttttttgagacggagtctcgctctacctcccaggctggagtatagtggccagatcttggctcactgcaaccttcacctcctgggctcaagccatcctcctacctcagcctcctaagtagctgagactacaggcacacgccaccacgtccagctaatttttgtacttttagtagagatggggttttgccatgttggccaggctggtctagaactcctgacctcaagtgatccgccctcttccgcctcccaaagcgctgggattataggcatgagccactgcgcctggccggaagtgttttgtatattggacttgcttggattttggagaatttgccgaacaagttgagcatccctactcccaagttccaaagtccaaaatgctccaatgagcatttcctttgagcgtcacgttgacactcaaaaagtttcagattttggaacatttcggattttggatttttggatcagggatgctcaacttgtcatgcgttcctcatacgcttatgtggtggattcagtgagatgatcctgtctcacttaggttaatgcttggcatgtggtggcaagtgcttgacaaatgttgcctgatgtttgctgggcagtggctgaagcagctcatccctggcattgggtctttctttcttttttttttttttgagacatcgtctcactctgttgcccaggctggagtgcagtggcacgattttggctcactccaacctcttcttcccgggtacaagcaattcctcttcctcagcctcccaagtagatgggattacaggcatgtgccaccatgtccagctaatttttgtatttttagtagagacggggtttcaccatgttggccaggctggtctcaaactcctgacctcaagtgatccaccctcctcagcctcccaaagtgttgggattacaggtgtgagccactttgcctggctgggcctttctttccctccaggccccgccctgggccctgcactttctctgctcacctagtgttgcctttatgtcggtgatagggaggattagccttatcaggctccagataatggctggaaaagtcaggaggctgcatgaagcaaagataatttcctttctatttctcctctccttgtccttggccacccctcaccttagccactggggaacccaaggggccagtgtccagccccaggtgatagcagaagagcactggccttggagtccagtcctgggggcctggtgtcagctctgacactcatgcattgattgtatttctcaggtgcttactgtggccagtcagtgtgttaggcttggggtgcctggtggtgaatgggatgggtacgggctggctgtgtggagcctgtggcctggcgggcacacagatggtcagtcagagctctataatagggttttcactagtgcttccagaaaagtctagagctatgagaggaatccgataggagccccattccggctatgtgaggttggaccagtggaggacatctcaagcagagaggaccccagaagagaccggggtgaccggattgcaccaaatggggcagggtgatggggaatacatttggaggccttggtaaggattctgatgtctttattttagaagaaatgagaagccactgagtagtttctcactgagctccccactgtgccatctctctgatgatcagattttcatgttaactttggttgcggtgtggacctgagtgacttggagactggagcagggctggcatggcgtgagtccaggttgaagtgactagtacctcggacgaggtgtcttgggcaaggtggagtctgggccctctgtgtcttttcagtttttccctctatagatttctgaagctgcattggctggcccrcagctccttgcaaccctgacatctcctggtgcagaaggtgaaatggtgcctggcctttgtagatcagatcccagtacttgcaaccctgacatctggtgcaggaggtgaaatggtgcatgtcctttgtagatcatatctcagtacttgtagccctgacatctccygccacaggaggtgaaatggtgcatggccttcatggatcggatcccagtacttgcagccctgacatgtcccgctgcaggaggtgaaacggtacatggccttcgtggatcagatcccagcatttgtagccctgacaacttccagtgcaggaggtgaaacggtgcatggccttcgtagattagatcccacttgtagagggtgagggggaccaacttgaggtctcaggctcagggcatgagcagaaagggcactgcagattttcagggaaacctgagtcagattcagactctgtcttgtgccgccttccctaagtgggaggactgagggctgctctgagaaaggttgggttggatccatatctgcctcccagagccaggcacttcctgggtgcttggaaaacgcatgctgaataattgagtgagctgttattgacctgatccaatttatctctgcatcgttgccatgtggaataaatgtgtactgactgcataaatgcgtgaatggatgaggaatgctgtcctgccaagaaggtcctcatggatcctcagagaggccccaagtcctgtgactgattcatctctgccttcaccygagcagccagtggatggatactcctgttagcccaaaattgttcatgamccaaaaaaaaaaaaaaaaaaaaagaaagaaagaaagaaaaaagaaagcactgatgggtgggagtccttaggttatttttagctgcagtcgactcaggctgaactttgaactagtgtctgttctccaggccacactcagactgatggacggacagctgggccagtgcttggagacttccaggcacagggaaagccgtgggggcatgtgatcctgaggtcacagtgggcatctgggcctctgccctgtggaaggaggagggaggcctgcaggatctctgactctgacatttcctgggagggaacggagaaaggagaactggccgctactacatttatttatatattttgagatggagtcttgctctcttgcccaggctggagtgcagtggcacgatctgggctcactgctacctctacctcccaggttcaagtgattctcctgcctcagcctcctgagtagctgggtgtataggcgcgtgccaccacgtctggctaatttttttgtagttttagtagagatggtgttttgccatgttggccaggctggtctcgaactcctgacctcaagcaatccgcccacctcagcctcccaaagtgctgggattacaggcgtgagccactgcaaccggcctactccgttttaacctggggatggaatatggtgctgtgtattcctccagcagttgctgagtacctgggccagtccccgaggctgtgatttttgggggcatctgggagcccatttgtctctgaaagcctgatctactgaaatagcattctgagacctttacagttttctttggaaagcaagagcaggaggggtgaggaaaggccaacacttgtaatcctcctgatggccctgcaaggtgcatcatgtcaaccttaaatagtgagattcagaaagaaggattaagtagtttattcgagctcagaacttgaggatggccaccggggagcatagattcaagttacctcgaatatacactccgattagctgcagtaacaagtgggattttaaggtgcggaggaaagaggcagtttctaagtcatttaccaaaaatttatattaaaataatataagctaccggctgggcacagtggctcacgcctgtaatcccagcactttgggaggccarggcgggtggatcacttgaggtcaggagttcgagaccagcctggccaacatggtgaaaccccatctctactaaaaatacaaaaaatgagctgggtgtggtggcgggcacctgtaatcccagctacttgggaggctgaggcaggagaattgcttgaattcgggaggcggaggttgcagtgagctgagatcgcaccactgcacttcagcctgggtgacagagtaagactccgactcaaaaaagaaaaaaaaaagctactgattkgctgtgcattgttctttgtgtgacgctttccaggatcatgaagttaatggatgmggcagctagtcagaaacaaaatgccttgaaataattgccatcgggtgtggatgcaaagggcatgactcaggtcccatattcgtgtctccctgggcctgatacattttgcatacttcacatagctcacrctgctctgagctatttttctcttttcggtagtattgtacccattttccaggtgaggaaactgaggctcgcagactttctaagaatgcactgaggtcatggagcaggtgtgagctttgcctccggatttgtccacttctggggcctgtgcttttcccatccactgggacctgggctccaaagaggggctgggacagactcagttatttggagtcccgcttctcggctgaaagagttgatggtgatatctggctcaccatctttggtgggtgtggtgctgttgaggcctggagcgcagcttgaatgcagggtcaggagcttagctgaggtccctgtcagaagcttccagatggtcccaggggattgacactgccttgtcccttcctgagggactgtggagactcgtggctgcctctycattcttctcatgatggtagatggaagagggccgtgcagattttaatgtatttatcgttatcaaatctccatattaaccccatgagggggtgtcagtgttttakggagggagggaaactggcttcaagacatgtgacttgcccaaggtcacacagctagtgggaggcagagtgggggtggggagtgcagagctaccggctcagggtggaggttggtggggaggggaggggagtggagagaaggtcctatgtgctcactttacctgtcaggatcttgggtgccctgcccctgcctctccctctccctctaccacgcaggcccctctcagcccccccccgcctccttctacctgggatgctcttcccagctcctctcaagcctcctttaagtccctctcagggtcacctcctcagagaggccttccctgaccaccctggctgaagcagccctattctcccccttgtttgccatgctcaccatctgcggttaccttgcttatttcctgaccaggcctcacactgaaggtcacctgtgtgcagccaggggcctcgctgtctctgtcactgctttatctccagggtctgagacggcaccagagacccagcaggtcctcagtcaacctcaagtcaagtggaatgaacacagggcctggccacactcctttggttttgtgtccttccttcaggcttcccaggctgggtctttgagccccagactccttctggcccccgacactcatagccgggccagtctgtctcccatagggcaaaaacaatcccgcagaacactagcctcaggccacgtccctctgagaccatgatcagatgagacacaataagccctcttcctgatttttttttttttccttgagatggaatcttgctctgtcatccaggctggagtgcagtggcgtgatctcagctcactgcaacctctgcctcccgggttcrtgtgattcttctgcctcagcctcccaagtagctgggagtacaggagtgggccactacgcccagctaatttttgtatttttagtagagacggggttttaccatattggccaggctggtctcacactcctgacctcaagtgatccgcccaccttggcctcccaaagtcctgtgattacaggtgtgagccaccatgccgggccttctcttcatgatttttgtctaagcacggacaaaaacaaggtctctgtgccacccacaaagctctgcacatcttggtaaatgttccttttttcccagtcagcctcacccccactttctgatggcagccaatccagagctaaccgtggcttccttaaaccctccccaagtcaccctgccaaaccccatgggtttcctaacagcatcttactgagatgccctgtggttccctacgctgtgtgttttccctcattgcgccgaccagtgaaccccacctgtgcacttccagctgttcgggttgtctggggccattgacaccagagagagatggtatctgggccttctggactcaagtgcaggtttcccctactcttgatcttgaactagtcattttccttttaggaccaaaatgaccttatttctgtagagaggtggctggtgaggcccgtcctatgccacggtagatgggaagtttgtcaatttcaagtgccctttgggcattagttgactttgtcatcatcattcttctcatttacagagggggaaacaggcctgaaggggaagccccacagctgggaggtggcagggctgaggctccagctctggaatgactgaccccagcgtcctagctttgagccacctgacctcccaccttgtgaccctcagatgtggtagggggtggtggaaagaggtcagaggatttgagcaaggagttcttgagactcagtgtcctggaatcaggcacctcacccccagggccagccctcccggggctgtgagctgagctcarggcagctctccaagttcatggtccacatcttggacattcctgcccagccagagctctcagccctttgtgccaaggggatctcagctggttcacattctgagactgtgttctggaatgtgctgccctttcagcttagagagaggagtttgggtctttttgggataaagcctgccttgtgggagaagaaagggagagtaacgctttgcatgtggaaaatacttcaacgtggttttgcatctgtgtgtttaaacttcaaacaaccgcgtgagttcggtgcgattattcttacttgatagacgtagaaccacgttcacaggaggcaactcacaggctcaaggacacacaaccgtgggactgggacttgaaccttgggttgtggacccccaaggtgggtttttgttgttgttttgagatggagtttttcgctctctcacccaggctggagtgcagtggcacgatctcggctcactgcaacctctgcctcctgggttcaagcaattctcttgcctcagcctcctgagtagctcagactacaggcacacatgccaccacacctggctaacgtttaaaatatttttagtagagacgggatttcaccgtgttggccaggctggtctcgaactcctgacctcaagtgatttgcccgccttggtctcccaaagtgctgggattacaggtgtgagccaccatgcccagcccaaggtggggttttgaccccccactttctagttgcattggatttcaggctctgggtgcccacctaggaccccctgtcggaggtagaggggctggggtctggtggtggggccgctgctgacctctctgcctctgtcccctgcccttgtgttccagcctgcggtggaagcacacctcctccctgaaggtggccaacgagcccgtcttagccttcacgcagggcagccctgagcgagatgccctgcaaaaggtaatgggagggtgggaggcacccgagaggtgcagggcatggagcagaggccatccccagcagccctgagatagcgcyccgtgcctgcagccatcacccgcttctacccttgctcccagccttgggtggaagcctgggagggctgtgggtctggagtgtgggaacagctgggaggaccaaggtggcagcctggagctactctggggcttctcaggccaggtcagatgtcataaacctagttgttttatagttaaacatgttttccagttaattgccagcattttaaaaatcatgagatttcatataagtttcaggtgcagtttttttatctctgtgtcatgggtagacctcaccttcctgcagggtgacaatggctggagcagagtccggctgtccccgagggcagcacatgttctctgatggccaccgacctggcctggcccccttctcatttctgtattgcctgggcacctccgtctgtggactctgcgttagggttttagatgggaggaagcgaggaagksggtgaccatacccactcttgtccctctccccaggccttgaaggacctgaagggccggatggaagccatcccatgcgtggtgggggatgaggaggtgtggacgtcggacgtgcagtaccaagtgtcggtatgtccagcgggtgggcagrgctcagcccctcccctgaatatgtgacctctttctctgacagctcgtaagcttataatgtgtgggctctgacttcaaggcctttatagtgcccctccccaccccagattttgaattctgtggaccagtaaaactcccaaagcaaaggacggcacccacactgcatccagcccatagcggcatcctgtgtctgggcaagaaaggccatgagggggccacacagcatcttctgttattcctcatagatttcttgccaagggggtttgggagctaatgacaaaaagctgggccccgggccccgagcacctcagatggcattggcctaagaagcccccatgcttggagtttatccatccagaaactggcatgcactttacgtgggccaggaaactcayaggtctgtgatttgagggagartaaaaggtcagcccttttgcaaacagggcaagcacattctggctctgtccggctgaaaccctgggcagacgtgtgcagggggaggggtgactgagggggaggacccaggtcccccactctgaaggttcccaggacagcctggggcaggagttgaccacagcagtgtcctggagctctagttgctgggtcaggactacctggagctgtccaagcatggcctggggtctgcaggcattggccaggtcactctgtctgtcactgggtgtgtgtgcaggtgccagctgacagcagcacctgccacccagctccctggttgtctctgtakctgcctagagcttgccctcacctgtagctccrcaggcgtctgaggctgcatggcagctgggatttttccaggcagcgaggctccggcattctgataagcccctgggtggatactgctgattttcatttcccacattgccttgccgacctggctggagattctggccatgtgctgatcactgtggcacgagacatttggggttctggggcatgtgagggcaggatctatgtttgccgggacatagtgctgacggggttctgcagtccactggggcccaggtcgcagccaccttctctgcccttaagcatcacaggccaatctcaggtgtggcccgaatacagagtgactgtgccaagctttaacatgaaggagaatggtcactttctactcaagcctagaccagcgccggccagtagaatttcctgcagtgaggacagaaatgttccagatctgcattgtccgttccagyggccatgagccgccacgtgtggttgtygagcaygtgaaatgtggctcgtggctactcttttagacaggaaagctccaataacccaccagaagacggataggtagcaaaagtgtcagctattacgmtataaactatcttgccagccctaggaaggaaagaagtgaaatttctccctgcttcattggtcatgctagcgttcaccactgccgggcattaggttttgaagggaagacaggggttaaagaaagacacacacacagagagagggcagctgaaacagcaacaccagtatattgcagaaacctgaggaagtgggggaccagcttaatgccagggcccaccgctgcttacaggctgaggtactcatcggtatgggtgagacgggtctgggcagtatggcttgctgcctggcaggatattgataagatgttgttatgatcaggtggtttggccctctccggtgggatgtcatcgtggtgttccttgtacctttacccagcaagatatgatagggatggtttttttttttctgagacggagtctcgctctgtcgcccaggctggagtgcagtggygcgatctcggctcactgcaagctccgcctcccaggttcatgccattctcctgcctcagcctccccagtagctgggattacaggcatccgccaccacgcccrgctaattttttgtatttttagtagagasagggtttcaycatgttagccaggatggtctcgatctcctgacctyrtgatccgcccgccttggcctcccaaagtgctgggatcacaggtgtgagccacygcgcccggccaacagggaagtttctttaggtgggccttcgtccgccttgcggtcaggcggctgagccggatggttctcatggcctgagctcctgtgaaatgtttcacttggcccgaggtctgcaaaatagcggggagctgacaaaatggtgcgstttggaccaacaccaggttgtgtttataaatgtttgttgaggatcttcctatttagattagtaaatctggggcttaggaaacaattgctctgtccatgatggcttcsgggcagggcggaagtcccaagcatgtcacaacacyggtgcattcttttgggcctcacctggttttgttgcccatagtcgcagcctcatactggaccaaagaattttcatccatgatccccyttggttctcctgtccatgctaagagacagggagggcagtccccatttcctagatgaagagacttagggaaggaagtgagcttacctggggccccacagctagtaggtggcagagccaggattcgaacccatgtctctctgaccacaaaggtccgtgctttcctggaaagaccctggggtctatgcctttctcctggactctgagccttctggagaaggagccatgtcttactcatggtatagcgggtacaccagcacccttaacagggagcaacctgtgggccgggcactggggagggtttcatgggagcgggggaggggggacagcaggcgtgtccaggactttcctggaaaaccggctctgagtccagtcctcttcatccttatcctggcacctccctcccgggcaaggacctcaytcttctctcctttcagccttttaaccatggacataaggtggccaagttctgttatgcagacaaggtgagtgagcctgtgtgcctggtgacccggggttagggttgctgcccctgctctgccctgccagctgctgatatggygggggcagggggcatcagttgctgtgtccttctttggccatggtgggtaggtgggcagggggtggctgacactgagggagtccctgggtgatgtctttgactgggccaggcatacaaaggttaacttgagccaaacacaagctgcctcagccagggctgagacattcccagacatgcccattgtggtggggcagaccttggactggggaggaggtggattctggaaggctgagtcagggcaattggagacaccattgatggaaagctaggccaagaattggcactggaaagggccagcaggaggggctggggtggctgggggtccaggaactggcattgtgtggcgatgagggcagttggggtctgggaggccagcagcagagccgtgtctcaggctccagttgacctcaagtttctggatggtgggttaaggggcaccaggtcccaagaataaggtaaggttttgattagaccatgagagaaagtggagccagtgtaacagctgcgggactcagtgccaaggcctcggagagctgaccaacctggccgggcccttcaggcttcagactggcagccactacaggctctgatgggacgctgttgttggcagctatggtggcagggggctgagggcccagggagacaggcattgtccccggatggaagagagtggcctcccaggtctctcctccctcgctcactccccagggcctttcccgctgcaggtggcagtccccaacctctccctctccctttagagcctgctcaacaaagccattgaggctgccctggctgcccggaaagagtgggacctgaagcctattgcagaccgggcccagatcttcctgaaggcggcagacatgctgagtgggccgcgcagggctgagatcctcgccaagaccatggtgggacaggtgaggtgctggtgggcccgggtgggtggggcggggtggggtgggagtcaggtgtgccctacccatggcagcagacatcagctgaagcgcttctgggtcctaagcccttttggggacccagagatgtcctcaagggacaaggcctaggagctgggatggatgatcacagattattaggcgagacagattgtgcagagcccatgtgtcctgcctcggaaatgtcccctctcctccatccctctgtcctcgctcctaggcctttgtcatgctttgcctggactggtggtggcctgcactgtctccctgcctcctagcttggtcagcccctcgccgccctcagagtggtctttccaacacctccaggatgttactcctggcttatgacccacccagacctctccaccactgagaggcaagtcccaagacctgagccccatacccagggcccttctgcccacctctgtccagctcgcccactgctctgcatttccctgccaagctgtcctgcccatagtgtagccatttggcacttagcaggactccccggccatggcaggcatcctctctgcctctgcccacgtgtcctcctgcctggaatgcctgctgtctcttccgtgctcagtgaactcttacctcctggtccagcccagatgtcacccmctccgtgagacttcctgagccttctccagccgaaaggactattcctgcctctgtttccccagagcatgttgttcctgcatcagttacagctcagattgcactggagtgtattgagttcctaggtactgcccctttacaagctttttggacatagtaaacatgtcttgacattctcggtctttttctgggctttgcatgatacctttcaggaggcatagcaagcccctgatcaatggttttctctgcacagagctggcatgacagctcctcaccctgctaaatgcaagttgagtgaggagtggctctagcaggcagagtgtgcgggggacaggagtcgagggagaaagggttatttcaccacctccaggacctgagccctacgctgccaactaacctgggttcctgaagggtaaattgcaggagccagaacccaggctgctttctggatcaggcatttgccactgcctgctcctcggtccccatggtgagcrccccctctgctgcacagagctggtatgacagcccctcakcctgctaaatgccttcttagattggctcagcagccctctggggtgggcgtcagctctgcgtgttcctggtgagccgcacgttgctgggaagacagtctaggatcagtttaggctttctctgtatttggcctaagactcaggaacttctaggaagcaaggtacacatcttagctcagcttcatgggctgtgtgtctctaataggtcgtgcacctgccagtgaccttgggtgccaagaggaggccacgtcaatctggaaaagccccgttcttggctgtccacagttcttttccctgcagctcacatttgctgttattaagaattgacggtttaagggaatcacagtcactcgcctcttggtttttggcccaaactaaccagcaaggccgaacatcattcctggggaaggagccatccacctcccacacaccgagtctctctcctggttttccagtgaccaatctccagctcatgctaatctgcccttctgtctggaaggctctgatcctgaatttagtctgaggcttgaccatagatcctttgccatgcaccaccattcagagttgctatgaaatgaagacagtgcatggcaagtacctggcctgctacagaggatcactaaaattcttctgatccccgtccagcccagagggccggctacaggaggtgctagctcaggggcttgagaatcctttccccctcagcccctgggatgggacctggtgagccctccaaatgtttcctggtccctcctggggccyggctcagtgctcgctttgggcacagcgtcagatgtgagaagaggatggacaggaggctgttggctgctcctgacccccggccctctgccttgcagggtaagaccgtgatccaagcggagattgacgctgcagcggaactcatcgacttcttccggttcaatgccaagtatgcggtggagctggaggggcagcagcccatcagcgtgcccccgagcaccaacagcacggtgtaccggggtctggaggtacctgcaggagrcagtgggcgagcaggcggggcagcccaatgccatgggcctgatctcaccgctgcctccttccccagggcttcgtggcggccatctcgccctttaacttcactgcaatcggcggcaacctggcgggggcaccggccctgatggtgagatgtgggcacaggtgggacagcggcagctggttgtcctcctggtcccaacagacagacagaggccacccygagccccttgggtctcagcctagtcatggggagaggcacagaaggtggaggcagcttggggctgtgggtaggctttgggaccagagacccagtttgaatcccagcgtcgtgcctctctgcctgggagaccctggcaatccctgaacttctctgaggcacagtttcctcatctgcaaagtggaaataataggaaagcctccatgactgggttgtgaggctcaaatgagacacatccagcagcaggcagggctggcccggagctggctgagtgttggtggctctgttgatgatcattaccgctgaccttcagtgctcaccacgtgcctgctgctgtcaagcacggcatggagatgatctcatttcatcctctcagcagcttcgagagggagttgtgactctgcctctttgccagatgacaaaactgagacacacagccgtgacttacttggcaagactgagtgactagtaaataaatgatggagcagagaaagatttggatgtagtctctctcggggttgatggtattcaagtcactcctctgccattatcggagtgaggttggctattactggatgaagtcccaggcctgtgggggaggcgcagcccagctcccagacagcctgggtgggagaggtccacatagttgtcgggaaccccgagccccagacaggggcactggatgctgatgccggagtgtgtactagggacatggatggggacgtcctcatgcatctgtgcacagacaaacacggtgcatggccaggcgcccacgtgcctggctgctgcacatgcctgacccaggacatgtgctgagagagcccgtgtgtacttgccccgccgcgcccggtgagcactcagtgactctagcagtaagaacagacctgcctaggtgatggcaggaccggttggtgcaggcttctggggaaagggagccttggccagagcgtggggcagattgggctgtgccgtggcctccttggcagggacttttggagatagggccagacgccttggaggagtggggtcgggtaggggatgtcctggttggcacagagtctggtggttccaggtgagggacaaccatgctgtagggtagggtggggtgggggttgggggctggtggcgccatcctcatgcatcactgaaacacctcccgggcagggcaacgtggtcctatggaagcccagtgacactgccatgctggccagctatgctgtctaccgcatycttcgggaggctggcctgccccccaacatcatccagtttgtgccagctgatgggcccctatttggggacactgtcaccagctcagagcacctctgtggcatcaacttcacaggcagtgtgccgtaagtccctggggatggtgtaggctgtggtggctaggggacgttcacaggcaaccctgctcacctgctgtctgcctggggatggggctgtgaacccaggggtcatgcacggactctactcccttacttgctgtgtggctatgagtgagccacttcacctctctgagcttccatttcttcacctgtacagggagtgattatccttaatttgcagagtcattgcaaggattaaacatgttaatgaacaggaaagagcttcgcagactggaagtgcaccctacagctgtgggtaatattgatttcagtgctacctctgctactggaaagggcacaggggagcacagaatgaactggaggagtcaggaagccttcctggaggaggtgacatctaagcagaggagttggccaggcagaggggaagaggcaggagaagaatatatatgttgggagagggaatagcacatacaatgttgccaagccaaaaacttgtgctctggggcatggcaggatcctgtgtggctggagtgtggagtttgggggcgacagggcaagagagtgagggcagggcatggtttgagttgaggtaggggaggcaggccactacctgatctcgaccatccatgcactcactggctgagcaggaaatttggagctcacactaaggctcagtggtgagcacacaccagggacaaggtcccggctctcaggctggaggtggcggcagggagtggttcagtgaccataagatacttaggagtctgcaaaggtgtctggcctttatcctgaaggtgatgggagccatggaaggcttcaagcagggagagtggctgagtcagagttctgtgtcaggcagagattgcaaataatggcccccaaattggatctggcaagaggctctactttctttgactcctaacagtgatggcccaactttgtataattgggacaatttcatagataaatccaaatattggcctgtcttggtcccctggacctggatgctctgatcttgcatttcctggtggtaccactggctggaagtgggtgggtgccctctggctccctgcatacctgatccacgctgtttcctttccctgctggctcctctgggcccctgtgttggcaccctcattctcagtgatctctctgtgacctgatgcaggagactggccagggactgttgacctccagggaggggtggtaggggcttgaaccaggggagagatgggggatgtggagaagggggcaggttcaggtgagaaggatgcagggaggcacagtggccattgcctgtcctggagttggggttggggtgcgtgtggggatgaggggggttgtcagcgagaatgttcaagatgggcacctgggagggcgagcgggctcgggggaagatgaatctcctgttggtcacttcgggtgttatctgggtggagatgcctggaggcagccagacgccgggtctgcagctcagggtccttcttacctcctcttccaggccccaggctctgccacccccttccccgcagctttgctgggggtgggagtgggtggtggcagcgttagaactgctgagaagggcygttttccaaaaggcctgctctgccagccacgggcccctgggctccccgcctatcagcgggcggagcgggcctggaccccattctccacgctctgatgagcagcgggsttaaaggtgggaaggccataaattagtattagctactgtgtcgctggctcccgggtgattagcatttttattgttttgtggtgctgaggttggtcacacttggagcctggggaggaggcgaggccctccagggtggtggcttcgggcggggcctgagctccctctcccaggactctcctyggtttggcctctcaggcctgggcgctgggcttgggggggatccttcgcagaccacagcggggtctgttccctgccaggtrcctgcagtgtgcccagcatgtcttaagcacatrcctcacacttgaactcatcacaaaacaaccctgccaggtcaggattgttctccctgtttcccagatgaggtgcagaattcgaggctcagagaggttaagtaatgaacccaggatcacacagcccttagtgtcctcctggctgcagaacatggacctcctctgcagcatcttgctgcctagccccccgttgcccgctccccrtagtcttggaatgcagcctgttcccagccgccatccccgacttggctcccacctcctgctgggctgcccccggcaatgctcctccctgggcttttccgcccccttcctctggcctggctccctgaaccccaccctttctcctgtggttccagcaccttcaaacacctgtggaagcaggtggcccagaacctggaccggttccacaccttcccacgcctggctggaggtaaggcctgcctcacctcctcctcccgtgtggccccagggacccctcccctggccattatgaaagaggagggaggtagaggggatccagccacaagtcaggtggatgaaccatttcaggcmccagcactgcccagtagaactttttgtsatgagggatgcgtccagtaccttcactctccaatatgcagccaccagccacacatggccatggagcccttgaagggtggcctgtgcgactgaggaactgcattatctagttttctttcattttaattaagttawatcttagtagccagtygtggctggtggctgccgtgtcgggcattgcagctgtaagcggaggcaagtgcaaatgcagagaccagaagtgggaatgaacttgtatttgaagaaacaaagcaaggcccatgagtagggagggaggagggctggtaggagaagacgggctgagacgtaggcagggctggaccttgttggcatattaaagttttcccacaaagaaacagtttcatggtcaaggaaatttggcatgtrtggtgttaaagcaaaatggactcctcccgtgcagaacttctcagagccttgaatgctctaatacgcatggcacatcttcaaggacaaggtctgccatgtagtgtttcccacacgcattgggccatggaaccccrtttctgcaaagacccccatggaccaagtgttttgtggagcacattttgggaatgtgctgaggcctagagggagggagagttgcagccagcacgtgaccagcagagctgggaccggtggtccagcatgtttctctgtggcgtgaattggggcccactggggagtctggaccctgttcctggactggtgggagttcggatgggggtgtcagggaaggtgagcgctcctcagggtcagctgtgtggctttctgctctcagagcctccttccctgcctccctgagggagagaggccgctggttaccactttccaacctggagcaggtgacttcatctctctgtgcctcagttttcttggcttgaaattggggatagtaatgggaggttgttgtgaggctttggtcagacaaagcacagcgtacttcgtccagagttgggcagctgttaagtgctttcagctgctgttagctgctgcttcccayggagggaggaaactgaggccrggagagtgaagtgacctgtctgaagctccctcccactggggaaatgggggagcggtttccagcacgcgtgrggaggaggggcccaaccctggcagccgacatagggtaggctccaatgtccctcgtggacgagggctcaggagaacctcacaaaaagctgtgcccacttctgggaatggctggctctcgggggccttgggttctcatctgtcctctgctgttgtgttgggtagtttcagttttcccatcagtgtaatggggctgttggacctgatcacctctgatgcccttcacccctccctgggcctcagtttcctcatctgtggagtgggagaatgggcctggcccgtgggtctctgggatgttggccagcgctcactctgagcctccgcccgctctgggctgctccgtgctcgtgttggtcccgggccatggatggcgtaggtggtgytttgggcccctgggcaacygggggagccagctcctctggtcatttccccacccccgacccctgtagagtgcggcggaaagaacttccacttcgtgcaccgctcggccgacgtggagagcgtggtgagcgggaccctccgctcagccttcgagtacggtggccagaagtgttccgcstgctygcgtctctacgtgccgcactcgctgtggccrcagatcaaarggcggctgctggaggagcacagtcggatcaaagtgggcgacgtgagtggcaccgtcacccccgccgcggcccagcggggggctgatgggattgggtccctgggaggctcctctgcagccggggctggggtgtgcggggaggggtctcccttggtctcggcctgcagtgactcgtctcttctggcgcctcccttgcctccagcctgcagaggattttgggaccttcttctctgcagtgattgatgccaaggtacggggtgggaagtgggcgttcctgggtgggggcaagccctggagtgggtggaagagggaggaagagatacagggtaccctgacccagggcatgacccagccccactgctttgatcaaggcagctcagcagccacacacgcacctccagcttcagaaagggcagaatcagccgtagccagacaagagctcatcttgcggccaccctggaaccaggctcagcgagctcctaatagcatttgcatgagtgcatgtacacgtgtgtttgtgaatgtgttcatatagggctccgtgtggctccacatgtaggtctttccatataaacaygtacatatccatttgcacataagcacacacacgcatatgtcrataagtccacccacacgcatgtacatggagaaggcatgcagatccctacatgcttagacatgtgaccatgcatatgcctatatatgcattgattgatgtgtgtctrtgtttatatgcgagtgcacctgtagtactaacacacgtacacttgtgtgtgtacacacacacacacacacacacacacacacagtgttcatgtctgtccttgtctctkctgtggctcagccagaccctggcttttgcccttggcgtcccctacccctgcccctgtttcaggagttgggcccttcaggtgcaggtgtttcggggtgagtgtgttgtgggggctgccgcagggatgccttcccagcctcttagacctccctcctccctgcccaccccagtcctttgcccgtatcaagaagtggctggagcacgcrcgctcctcrcccagcctcaccatcctggcygggggcaagtgtgatgactccgtgggctactttgtggagccctgcatcgtggagagcaaggaccctcaggagcccatcatgaaggaggtgactggggtgggcagcctggggtccagaggaggacartcccaccggagcacagcacacacacagttctcctggagacattctcccatttcacagatgaggccctaaagggagaccctaaaagggaatgcctccgaccgggagagagtagagccaggttttgagctcaggctgcctaactccaaatccggggctgtgtccttgaccctggctggggtctgagcatttccagtgccctcagcaaccacgtccactgcagccatcataatggctgacactgatagacttttactgtggggccrgctgtggctgagcacttggctgagatgacgtgggtgttactgttcccattttacagatgagaaactgaggtcaaggcacttgcccaagttggtagtgcagggctggagtgtgcctgagaagatcttccccccagccccttggtggcagagggaaccatgaacccttctggagggaatggtatctctgggcaactctcatgccagctgctgctggaagcctctgggacctggacccttagttctccgggtgtgggtttggcagggagagccagaaaatgtttgcatcttttgccggcttgtggtgggatggacaggacagggagctgggcacgttgctgtcctggagggaacccaggaggaggcgrcacctgacccttcttgcagacactgaagtgtaaactgaggcccagggactggggagagggtgagccagagcaggggcactgggagggctcagggccctggtccctggtcccgtggaggrtctgacgccggggcctctctcctaggagatcttcgggcctgtactgtctgtgtacgtctacccggaygacaagtacaaggagacgctgcagctgrttgacagcrccaccagctatggcctcacgggggcagtgttctcccaggataagtgagtggccaggccgcagccctggtgctgtgctccgggtgtcctgtcygtgtccccatccccacctcctggacgtggttcccagtaataatgctgcccctaccttctctctgtcccctcccctcagcccagacaggcagccagggctcgccacatgggcccacagcagcaggctctttgttgccggtactggtggtgccggtgccagggtgccactggggaccagtggatctgaacctctaggggcagggctaggaattggtgtcttcgactggctctgcgggatctggtgttgccccactgagtgaggtgattgtcccatgctacaaagcagggcaggccaggggctgcagaggcaggattcgaacctgggtcacatgaggctaaacttgaggcttcgcctcttctttcctccgtggcactggttgcccccatgtctgcctctatgagaaagtggaggtgagcttggagagggaggaagggtgtgggcctgggagctggagtttccsctgctcctgagggacaggaacattggaccaggacaggccactcccttcaacttcgcagtagccctgtaaygaggcgtgccaagcccctccccagaggaggaagctgggctcagagactgggtaacctgaccgaaggcccacagccaacagctggccagcatccctcatccctgactcggcctcstgttgaacctggaaagccagtgtgggctggagcagggstgttgaggctggagctggggctggaggggagatgagctggttgctctgtcaccactgctctgctttgtagggacgtcgtgcaggaggccacaaaggtgctgaggaatgctgccggcaacttctacatcaacgacaagtccactggctcgatagtgggycagcagccctttgggggggcccgagcctctggtgagtgggtcccccttcccacaggggagctgagttcctggtgggagascctagatgttacrtctcgaggggcttcagagtaataggaaggataccatttactgagcacttattgtgggccaagcaagtgcactagctcagggtcctttcagcaaactcgtgagcaaagggactattcttcccattttacagaggaggaaactgaggctcaaggccacatgaccctggtgggattgtaattttggctccagcagccgcactttctgcaccatagccagtgtcccttaagtccaacaacctctacttcacaatggggaactgaggctcaggaggagcaatggcttgccaaaggtgactgctcctgagtggcagagccagggctgaacccaggcgtgctggggtttcccacaccgaccagttctccagctcttgatggatgctggctgggtgtcctacagtttaacttgatgctcactgcctggggttagtgcagaccccacaggttaagaactcagtcccgtaagactgaycccccaacttcagatgccaatcacaagtactgggaccccaggttacccacaccttgtctgactttgcgaygcattagaagctcccatgatgccctcttgagttttgatacgttgttagaacagctcacggaaccgaggggaagcgtgcttactattacccatgtattgcagagggtattttaaaggatacagatgaacagccagatgcgcagacacatagggcaaagactggaagggtcccyggcakgggcaccgccgtccccctggagttcgggctgtgccacccccttggcatgtggacgtgttcaccaatctggaagctctcccgaccctgtccttttaggtttttatggaggctgcattacacaggcacgattgattcaatcattggccattggggtcgactcaacctccagcccctctgccctccctggggctgaaggttccaagcctctaatcacagggttggttcctttgccaatcagtgccatcctgcaagagccctcattagcataaactcatgtgtgattagaaggggcttgttatgaataacggaagacactcctttcacccccatcactctggaaattccaagagctttaggaattctggctaggaaccaggggtgaaggctagatatgtacctcttatggcaccccaggaccatgccaagtccctgcctctcagtctagtgttctctccaygccacaccctgcctcttagacatcctcgcatcccagcaaggatgcaaggctgggtgcgactggagagaacaatggaggctccccacagactggagactggaggcagggtctcctgtccatccctctggctcttctgcatgccccaagcttggcagcaggctcgctgctggccgctacactgctggtccgttgattccatcatctcctcccttccccttctgcccaggctgttgcaycttttcagagaaawacagaagtgtcttttccgcaggaaccaatgacaagccagggggcccacactacatcctgcgctggacgtcgccgcaggtcatcaaggagacacataagcccctgggggactggagctacgcgtacatgcagtgagcccctctcgggctccaccgtccagctgtctgtcygtccaggtggccgacctcactgcacagaccccactccagcccctccaccccttcttcatgcacagctgcctttctataatccrggcytgactcccttcttaccactgtattctggcctctcccatgcctcaggctctggtttgagatcgtgctrgggaggaacatggccactaccccttatcccatcggccatgtgggaggtatgaccctggtgcctggcaggttctccctctgccctccactgggcccagtggctcagggacctggggaaaggagatggagcagctcttgggatcctttggggaaaaggaggccattctgggccccttggcaaacctcaccactcacagaggctcctggccttgatccctgcccctccaggtgtccagggtaaagtgtaactcagacygacctgtggggcacagggggcaccagctggccttgccctctctggtctgggctgtctrccttcctcactgtatctttgcccagacccacctgggccagtaggcccctgtccccagccacacaccttagatgctggcatgccttactccaggtgcctgtgtttggccgaggcctgtgtgattcccggtctgcaccacatggcggggttggggggccgctggaggccacctgccaaggcgtgggatgggatggtcctgcyggtttaggcygtgattctggaaaaccttggatgggccttcgtcctatgtcagccttccctytgatcctcaggccctacctgtagagacctccactcctagagccagtctcagggtctgggatttccctgcaggagctcagccaccactgtgccatggtgacacaggccaaggcagacattggccctcccttctcccagcccccagaggcctggccttgrgttygtcagcatgggccgaggacgttgcctgtagaatcctcctctgcctgggagtggctctgtgtggaccagtccctcactggcccattctttttttgacgcagccaatctgtgaccacgattcctcccacagatgcctcctgcttggattctgagtggtcagagatctgtaaagcatgactttcaaggatggttcttaggggactgtgaaartgttgggtcttcctccaggatgcctgcatgggaccccacccggagctggtgtggccattcccsragtgccactggcccatggatgggggtgggtgctggtgccasctgggctgggtgtgggttctgtgtccttccaggatmtgtgtcatttcccatgaggggccggggcaggtggctgggtgggggcacaggctggagtattyttagttctactggttctacactgtgaggtggcaatgggatttgctcagatgccacccaataaaatgcctgttacttaatcacagtggtggatggtctttctggaggggatggtgggggcagccaacatcttttaagtctggtgtcattgccartgtgtcacctggtcatgggcacagtgctctcagtgtgacagaaggaacagtaggtgctgatgtttgaaattgtctgttggaggcggtggggctgggttcacatcctggctcactgcccccccgccagccagatgattgccacaaagttatgcaacctctctgaccttccatctcttcatccataagatggggtaaccgccccctctccccgccrtgggtcatcatgagaattgaatgagttaacacttccacatgcttagaatagtgccagacacatgatgattcaaaaatattacccataaggccgggtgcggtggctcacgcccgtaaccccagcactttgggaggccgagataggcggatcacttgaagcctggagtttgagacctggctggccaacatggtgaaaccccatctctactaaaaataaaaaaattaaccaggcatggcagcatgcacctgtaatcccagctacttggggaggctgagacaggagaatctcttgaacctggaaagcagaggttgcagtgagctgagatcacgccactgtactccagcmtgggtgacaaagtgagactctgcctcaaaaaaaaaaaaaaaaatacccgttrcccattttcgttgtaagaaccactatcctgtgtggtgatggttaattttatgtgtcactttggctgggcatggtgcccaggtatttggtcaaacattctgggtgtttctgtgarggtgtatttggatgagattaacatttaaatcagtggagttttaaaagtaaaaagcaaggcaggtgaccgttcatcctgtgggtgggcgtggtctaatcagctgaaggtcttcataaagtgaagaatgagctctccacgcgggaaggaattctgccagcagattccccttgcactgaatcgctgcagctcttccttgggcctccagcctgctgggctgccatgcagattttggacttagtaagcctccataatcacatgagcaaattcttaaaacctctctcttgctcctgttctgtgtctctggaggaycctgatgaatatgtgtgctgaaggcccagtatgtttccttacaacagcctttggaaggaattctgccaccctcccattttggagagaaggaaatttaggtacagaggtcaggggccttcctgggggtatggtattgctgagacgtaaaccctggtctgttggggaaggattcgttcctggtacagccacaagaaggcacatatgactgctgtcttggaaagacacgctcagctggccaaacgatgactgagaggagccactgcagccagttagcttgagcccaggtctgtgggccctagcccatgcaggccaggtgacttgtggaggggtggaaacatgtgacctggcctgttcccacctgcccatgatgtaaaaggggctgttttgtaaaccacactgacacctccagggacaataggcaatacccagagtgccccaggctggagcacagaagggaagggtggcaactgcatttatagtcgtgggaccagcaggctgtggatgtgtttgaaccattggtgtgacttgcttaagatcacactgagacagagttggctaattactaaatgctttacctacctggtcacttagagccttggcagtgaccttaccaggtaactgtggcaggacccacagaggtcagaggtgggataactagctcaagctcacgcagctggttaggaggaaggctcgggcttgcacccgggtctgcagctgcccacggcccacgctcttcgccacctgctccattgggctcytgacttccaagctcctcctctcctaatattattttatccaaccttcctcaacctgtcacctttgcctccttttggactaggggtgactcaaagctgttgcttaccctgttctctctcctctacctcgtcccctagacttggggctggtggctcttgagggcccagtgcctgctcggggacctgaggcctctttgcatggtcaccacaataagtccctgtgtctgcgktggcccaaggagccccttcatttccctgctgtggccagggccagggcttggagcgtgaaccatttgactgaggccggatgtccctgccaccactgtcccacgggccgccagtggagcatgccctctaaggaaatgaggggccacctgtgctggctgcaggccaccaggctgacccagagctcctggcggggggagtcaggggaagtggcaggaggcagacccaccctctccagagagtcttcattttcactagttcgtccccgacccattcatcgtcttacttcctgggtgttctgtttaggggccagattagtaaataacaagagccaccattgtttgaatgcaggctgtgtgccaggcattgggctaaatgcttcgggcatcatggcctcggatcctcatggaagtctcataaagtaggtgctgttactcccattttacaaaggaggaaactgacaccaatgggttaagtaactaacatgccagtaggaaatgaacaaactgggttttagtcccacacctctgactcccaagcccctggccataacyaccactgcacagtgccctggagctggacaggcgctgggctcagatcccaaccttagcgtcttgttcctgtgccttgacctcccagcttcagactcctccaggagctgaggaccaaatgaaatatttaaaaacaaaacgctgcatcccatggcctgccagggtgaggtgcccaatcaatgtgaacttttaattttcaacctcaacacttcttcatcctagatatgtgtgttccccaggaaagaggagaagccagatttaaatgagcacctatcaataggccaatcrttcctacaaattctcttggaccacaccggcctgtgagatagtattttagcaccatttcacagatgagsactgaggcttaaagaggtgaagagagacctgcttagtaagggacgggggcaagagaagaacttgtttctgatgaacataccagcaaccccttgtcattgtccctcacaggaatccatccttcygggtgttctgtgcatgggtgggaggaggcactgctgctgtcatggctctgaacacaaccagccagccttgtcctgtgtccggggggctgccagcccccctggatgacggagcaggtaccacatgcccctcaggcacccaaggtaaagcagaaggctgttccaggcctctgccatgctttccctcagccctatgtgcccaggcagttgccctcatccccgaagcatctggtccmtagaggttggagggagctgacgttcagttgggcacctgctccaggatgtgcatcggggcaggcgtcrctggagggagagtgagcctcagcgagggaaatgcccggaagaggccacacagcaagtggcagagccagaattggaaccccagtgagtcagattagagtgttagtcgacagccatagagtcacagaccccagccttttactagggctaaaattgagggtcccggccaggcgtgctggctcacgcctgtaaccccagcactttgggaagctgaggcgggaggatcacttgaggtcgagagttcgagaccagcctggccaacacggtgaaaccccgtgtctactaaaaatacaaaaattaaccggatgtggtggtgagcacctgtaatcccagctacacaggaggctgaggcaggagaatctcttgaacccgggagacagaggttgcagtgatctgagrttgtgccattgcactccagcckgggtgacagagtaagactccgtctcaaaaataaaaattaaaaaaaattgagggtcccttgccagtaccatgccaggcacaaagccatcggcactggagggcatcatttattggtgatcatttactaagcaggtgcttgatatattaacctcatttaatcamcatttgrgggtgcctgtggccgttttacaggtggggaagcttcgaggagtcaaagcctgcttgttgtcccctgtcccttgggccaggctggggcctcaggagccccacagaacaggaccactcccttgtcctcatcccagccctttattttccatcaagagctccctgagcctcttccttcccaggctgaacatcttttattccttcagctactctctgtgggatgtagtttctggatctttgtctacctagtgagctgctctggtgatgccagggagtagagtctggaatcatcctgaactgggatccaggctgtgtgacattggctgaatcacatcccctctctgggcctcagtctactctgctgtcaaatggggacataatgttgatagtactcatcccttacaattgttaggaggactgaatggtctgaaatgtgaaaacrgattttgtgctgggcctggtggccaggaacaggtcagtcaacatgagccagtactgttaaggtcatgcacccgtgtgaggtctgatcacaacatcacacggcaggacgatcacctctcttgttctggacaatctgctcctttggctataaccttaaatttcacttggcttacacgaatacagtggaaagattaagaactctggagtgcaatgaaagtggattcaggccgggcgcggtggttcttgccgtaatcccagtgctttgggaggccgaggagggagatcacttgaggacaggaatttcagaccagcctgggcaacgtagtgagacccgacttctaccaaaaaaaaaaaaaaaaaaaaaagagaagtttaaaaattagccaggaatgctggcatgtgactgtgctcccagctacttgagaggctgaggcaagagatctcttgagcccggaaggttgaagctacagtgagccatgatcacgccactgcactccagcttgggcaacagagcaagagagcaagatctttctcttaaaaaaaaaaargtcaattcccagggactttggacaagccacttaacctcctgagccctggtttcttcatctgtacaatggtgatacaaaatccttcacggagttctggagagcagatgcggtgatgtttgaaagcattgcagaggctccataaaagctgcttcctttcctttaggctttagtcaytattacccttttggctcttattgagcttgtggtcatttgagacctccagctctttttctggttgagaggcaaactgctcaccgtcactcagcaaagtttggtgaggaggcttgagtggatccctgggtgcgaaagagtatcccaaccacagcagagtcccttcctgaggtcttagccgatccctggcttcccaactttaggagcccacaccactccactccttggacttcttgtttcagaggggtcggatgaggagtgccgatgaggctgggccctctgagaactggctttgaggccttcccagcaaccctcctccgaggtgcttctgaaccaagtgggttggcttaggaactgcccatctcccagaactttcttggggtggccctgcatgcccaccctctccccatcataagccagactggaggtgggtttctagcggcccagttttgtcctggagtatggagtgctggtgagaaagagggagagagaatggtgggtggggaaggaggagacaggagtgaatggagagatatgcaagtagagagacagagacagatcagagggtggggcaggggcagcagctgatgtatcccccagtccctagggtcaggatcctcttgggggctccccctgtgccccatcctccatccaaccgcagggcagggggaggaaggacgttcagggcagtcccttccagccgacatgcccatttcctttccstgcacctcaggggaagcagatgccaaggcaaatgggcagctcctggctggctgtttccatggctcacccctctctccttcccccgtggactttgcataagtctgtcatggctgttggtcac

SEQ ID NO: 1641 - DNA, 60450 bp, Homo sapiens
tccaatgccctgactttggcaaaatccacgccctttttgaggaaggcaaacccacccagaataattgttgagccaacaagcagcttaagccgctcataagccctgaggtgcctgtgaaggctgaggcccagcaatgagctgycactgccaaaaccagtaagagtcactgtttttgccaagctttttttttttttttttttcttagctgttgtcattgttttttgggaggagagatgggacatctcaggaattcgcctgtgctgctgaattctcacgtgcagcctcatgtggactcacagccactccctatcctctgtaccatcatgttttactgttctctttaattccaccatgaagagacttgataggaatgttctggaaactgcagcctargggtggggacgggggatgcgaggagtggggagcagtttattctccctggcagcaggactgaactttggtgccagagggccactgggtgtgagactgtgggagatgtttgtttttttcctgcctctttatacattttatgggctttccatatttgcttaagcaaaaaagttaaaaaatgacaatgataatagttaacatttattgagcattgctggcatcgattgagcatttatcgaacatactgactttccatgtatgaactcacttaacccttacaaccaccttttttttttttttttttggaggcagtctcactctgtcacccaggctggagtgcagtggcragattatagctcattgcagactctacctcccaggcttacatgatcctcccacctcagcctcccaagtagctaggaccccataggcatgtgccaccatgctcagctaatttttaaaaaattttttttgtagagatggggtctcactacgttgcccaggctggactcgaactcctgggctcaagcgatcctcccacttcggcctcccaaagtcctgggattataggtgtgagccactgcaccaggtcagatattcttttttttakaccaggtctcactctcacccaggctggcctggagtgtagtggtgcaatcttggcctctgggggttcaagtgattcttgtgcctcagcctcctgagtagctgggactacaggcacatgccaccatgcccagctaatttttttgcatttttactagagacggtgttaagcctttggccaggctggtctcaaactcctggtctcaagtgatccactcgcttcggtctcccaaagtgttgggattacaggtgtgagccactgcacctggccccaggtcagatagtcctatagtcttatttccagatgaagaactgagtacagaaaaggaaaaattaaaactattgaaatttaaaaagagatcattwataaagaggaacaaactactgatacatgctaccacatggatgagcctcaaagacattgtgctcaatgaaagtggccagacacaagagatcacatattgtaaaatgtcatttatctgatatatgtagaaaaggcaactccatagagacagatcccagattagcggttgtctggggcagggggtaggagtggggatgatgaaatattctaaaactggtttatagcgttgtttgcacaacttggtaaatttattaaaaaccattgacatgggtgaattacataatatgtaaaatattcctcaataaagtaaaaaaaagaaatgcaattacgttctgcaaatataacatttcctaagcagccatgatccactttacaggaatttctccagtaactaacagctcattcatttgttcacctgaactcatcttygttgagcacctattatgtgccaggtaccatgccaggatatgggttccagggtgaatctgatcaagtgcttctgctctaatagagaatatgggttagcaagtgttagaaggctgggctagaaggggtggagatgcagatgagaaatccagcaatgacaagarcgtatacttggggctgccacagggtgggcagtgctggcagagcctggaggaagcaccctccacccagacctggcaggtacttgagaaggttccgagaagagaagtttccgagaagagaaggttccgtgcttgaggctgggacctgaaggatgaggagttgttagcaggtgaaatggctggggagtggggcaggaagaataaaagtcattttctcattcatttcttaattcttttattcattcattcagcaactgttcattgagagcagttatgcccatttccctgatgaggaaatagagcctcagagaggtaaagtgacttagatacaaaccttagccaatctcttgtcttaaaagcccacctttttccactccccactcttgcctccaaaaacagtctggacaggttagacacaccgctgtgactttgagggtcaaggggaggtaccctgccaaaaaacaaaaacctaattatccttgtttagtgagaggaggctggcgtcccccacagggatgttcctttgtctgttggaactcttccgctgccttgaggacccacctttagccccctttggatcttgaatgggggagccagcctgccagtgtctggggttaaggggaggagaccactgaattcattgtctgggccagggaggacctaccattggaaagggaatgggaccagaattccagaccaggctttgataccaattattcaggagacctgggtcagtccttacctctctgtggtcctcagttttctggtccctgaaacaagaaatctgggctggctgtatcctgaactataggacttctggcctcagatgcctccagattgatatgggctggaagtagggtgacacatttgttctgatttgctcgttctgatttactttccaggttttagcatcaagagaaaccttctcagttcctgataaattgggatggttggtcaccctagctggaggactgttaggttaacctaacctcacattttacccacaaagagcaagacacgcagcacccgcctttattcctatgtggccacgaagctattttcaagccattttgtttgcacatatcatgtttctagggttcagctgaaaaccctctcaggtccagctaccacttccctcaattccttcagatcttctgggctctgcttggccatctccttttcccccctctgcacccmctcccatgcctcaggatggtcttttttggttgtctccatcagctcccctggagcccctttagctccttcctctgcatttaatgcaggatttgtgccgaagcaggtgctccacaagtcatcacggaaagtctgaatatctccagggcccagggcagggctgcccccaccctcaaggagggctgcacaccccaattccagggcaactttgttggaaggacagatccttcctggaagaggttgcagggagccactccccaggtgtgacttcttaaccctttctcttccatgggamcactcaggcattgggtggagcctgtggaccccttctgagaataatttttttaaaaaggcattaggattactatgaaaagtcattttactaaaaatagatatcaaactattaacaatttctcatatagtaacatacgttctcttttactaatacattaaataagatttagtggtcggtctaatatgactttaatttcacagttctcgtagcttagatgatatcttgagatgtttacaataactgtagtgtgttacrtaaatacctgtgatttctrctagtgacaaaatcacagggacatctacttgctgcctacattcataatcaaaggatatgttaaaaaccattggctgggcacggtggcttacgtctgtaatcccagaacttcgggaggtcaaggtgggcggatcacctgaggttgggggttcaagaccagcctgaccaacatagagaaacccccatctctactaagaatacaaaaaaattagccgggtgtggtggcgcatgcctgtaatcccagctacttgggaggctgaggcaggataatckcttgaaccccggaggtggaggttgtgatgagccaagatcgcaccattgcactctagcctgggcaacaagagtgaaactctgtttcaaacaaacaaataaacaaacagacaacaaagcctttagagattagtgaggctaaagrtataacttttgtccacccctgtgtcatggaccccccagaattctatcctcagtcctcttgggggtccatgaacctctgcttcaaggcaaaggggttttgattccttaggttagataaacaagaacatcatcaagagacgagagaacgaagagtaaagggcagtgtccagaytgggttgggttaagcagagaaaggtttctagatgagtgagtttcagagctgggtgtttaaggtgagtccgtgttggcaggaagcaaggaactgtggttgagggaaggaactatggggaaggtttgcttttgtggctaaatcaaaaacacagcagactaacatcacagccacatcactccagggcaagcccgtgtctcctttgtcaccaagaacaccaaggcattgtccrtgtaagacagtgtgcctgtcctcaagcttacatacaaagagacaaaacaaacacaaaagttaataacaagacaaaaattaaactgctagtaaaaaatgcagtcggaagtatctgaaacatgccacatatctggttaagtgcatacaatgcaagccacaggcgttcaaaggtgggggttcaaggtgggggtcacctcccctctgaggtttgcggtgaggaccaaatgcggaaatggacacgaggcccgaggccagcattgtggaaggccggttagagcatgcactttggaccattgtggctacttaacgtctcagtgaccttctctgtaaaatggggataataaataagtatggcgcctgacatatactaatgtttgcaacacggttcaggagacaccagagactggagaacttggcctttaacgtggtaggtgtgaaaacatttgaatgaatgaatgaatgaatgaatgggtcctcgggttgcctcggtctgccccaggcggcccgctaagccccatgtctgtgaaatgaatccccagctctcggggtcagcttcatctcagcgtgtgggtgtgggtggtggggaggtgctgagcagctcagcagaggcgaggcccaggccgagtttgtgggtgtcatcccgggagggtcttgctcggcctccccaacccccatgctgctcggctcctcagtgggcgggggaaccagcgggcttagctgtgcccgggccgatctcgagaggacaaggcccgcagctagcattcgaggagcccacccccgggtccgcagcgtggggcacgggcgccctcttatccccgaaaggtcgatctgggcctccccaggctagagtgggggtggggtgccgatgcaccttcggatactgtggtcccccagcccttccagccgcggtcgcgcacatccgaaggaatttggggccaggggcattgcgggcagagaggacagagaaacggagccctctcggcaggcgacgtgggagaggagcgccctaaaaagtggaaagcgagcgttgccgaggctgctggcccctttaagaggcccggctggctctgcggcggttccagctaacccggtccctggtgcagctctgcggtccgggtcccccagcagagaatcggcacccggcggggaggcagsaccagacgcaggagagggcgtggccccgccggggagctgggcggagtctatgctgcggagaaagcgggagaacccggaggtgggcggagccgagggtctgtgggtggggcccggcgctgcgggcctcgtggggcggagcctcgggctcggggaacgccgcagagggaggaggggtgggcggggccgcggcgggggcggggccagtgtctgcagtgggcggggcccgccgcagaaggggcagtgccggccgagagtcctctgcgtgcggctgccgcggcccctccacagcgtctctgacagcccgggcggtgagacccgcgacccttctggccccgcgcagataccgcggcctccaccgcgtcccgaggagcggccgagtgccctctctcgcctcggcgcccgcatccggggccatccgtcctgccgtckctgcggaggccgcatctggcgcgcatctggaaccgcycggccggccgcgctggagcccgcgcccaccctggcccggccgcgccgggagccctgcccggagctggagccgcacctggagccgcgggcccggggccctgagccgcgcagccggcgcatggtgaactcgctgctgttcggggagatggccttggccttcggctgcccgccgggcggcggcggcgggggctgccctggcgggggcggcggcggcggcggggcagggccgggtccgtcgccggtgacggcggcgctgcgggacgacctgggctccaacatccacctcttgaaggggctcaacgtgcgcttccgctgcttcctggctaaggtgcacgagctggagcggcgcaaccggctgctggagaagcagctggagcagcagcagagcgagcgcgagcggcggctgcgctacaagaccttctcccgcgagcaggccgtgcagaccgggcccgagttgctgcggcccccggcgcccggcggcgggcacggcctcagcagtggcgcggcggccggcgccaacgccaatgccgtggccctgggcggcctgccccccggcggcggctcgcacccgcagcactacggccgcctgcccgggaccatctggagctacacgcaggtgcggcgcacgggcggcggcggcgtggagaccgtgcagggccccggcgtgtcgtgggtgcaccccgacggcgtgggcgtgcagatcgacaccatcacgccggagatccgcgcgctctacaacgtgctggccaaggtgaagcgcgagcgcgacgagtataagcggaggtgagtggccgcccctcccccgccgccctgggacggggcgcccaggtccaggctgccgcggaatgcgtatgcgggacgggggccgggcgggcagctggtactggcaggtgggctggaagctgtgtttgcagagcgtcttacgtacgccaggaaggcccagttatctagatcccaggatgggggcgggcgctggctaccgtgggggccacctcgatgctgtcactggtgaggcacattgttttctaggtgacataataactgtctgtgttttatgcgatctcatttaattctcagcacaatacagcgtattgtgtaaggcagtcttatcctcatctcgcagatgaggaaaccgaggtgcagaaatgctaagtgatttgcctaaggtggcttggcgagtaagtggtgaaaccgggatttcaaccagagattttaaccactcctggctagtctgtctcctagcataagtatttttaccaaggaagtaggaaatatgctcccctccctcaacatatgaaaagaaaaactctaaccaacccactgcctttttatttcttgaattaaatgagatcacgtttttgaaaatggatggatctgcccctaccccctggggccagtgtctgccgtcttgctccagctctgtaaggtccagcttgctgggttggataaccacaactacaacagactgctcacaagcttttataaaatgcctcctttcatccctcttctccccactccctgagtctcatggtttattgagccctaacaaactcagccttaaaagcccccaggagaagataatgttgggctggagactggacattgaatggactgagaccacaatctctggctakaactggggtccagactctgcaagactggccagtgcattcctgcctagcccagattccccagctgggaaactgtcattgcttcctgtctgcagtctggccgacaatactgtctgcttggctttccgataagaggagaggggtctcctatcctcctcctcttcccataagagaagaagggtctgtctttggcatctcaggcctggctggggaaggggccctctggccctggcaatcgctgttccaggcacaggcagccttccattcggagctattggctctgaactccagggcttggaggatgtactgagaaggacccttccttccatctctaaaggtctgtccagggagctgggcataggtctccttccgtattctcccattggacaggctagcaactgggtaggattcaaatgccagccttatacctgctggtgagattatcaaatcacttgaaagcctgtttgctcatcagagaaatgggaataataaaatctgcccacagttgctcgaggagacagcaggatggtgatgctctttgggaggtataaagtaatcatgctggtgttattaaagatgataggcactttgtcaagctagcagggagtagaaatgctgagagtcctcaagctctctcatgtggcgcctagcttcctgggggtaggtcttacactccactgggagacgggcttctctcctgggttacctgtttctctggaggacttgagaatggcccgcctggtgccttgccacagggaggccacctcgccgcccctcatggtcaatgtcattggggcaggctagggaagcaggcacttgctctcaatggtgaaactggggagggatgggccgggccctcctgtctgccactgttgattgtgttgtcatgcctcaggcttgtgttgtgtttgttttattgtgtgtgtgcttyttggacctggctactaaggtgatggaaaaaccgtgcccagtcttggagggagatgggttggcattgagcaacgatctattcaagttgcacccagggcgtggggtgtgatgtcagcttctggcgctggcctggaatgagacggtgctgctgagacaggtggagtgcgggcgtctctcttcccgcccttctgggatgcgtgcacaccttgtcttccatttattttctgaagttaactcaagactcatgttggatttttccaaagcaggtatattcctttcctggggcctcagtttccccgtctgtgaagtgaggttgagggggggctagaattgcggtccttgaaaccccaggctttcttagagatgctttagggtttccttgaatatctaataaaaatgatcatttaaaagaacattaagacgttaatacagtgataaaaatgtgctcacccacctttaagttcttaatattaactcactgggttctactaacatgctaacttgttagtagtatgttttgggtatccctaagaattttctttggggaggagggcagacatttgataaacattttttaaaaagttgaaaaaccactgggctagatgatctcaaagggtcttcccagccttggcaatatataaatctgagtttgagctcccagcccgcttctgatcccctggccataagagaagtcacygtctaagggatgagacccaggtgtctgcctggactgttgtggccatgaagggctttaaatcatcccaggatatctattacagaactccaagcaatgatgcccagaaggagcctaacccagaagggaaaggttccagggtttcccctggtccacctggaggaagctgcagctccagagacccccacttgcttccccaaaggacaacttaggctgcgaggctcagcgatcttcaagccggacgcttgttgagttccacctccatgatttctggccacatccatgtactaccgcctgtgctattacgtacataaaatattttaacaacttcattgaggtacaacttgcatatcacaaaaactgcccattttaagtgtacaagtcaagatgagtaaattcacagagttgtgcagtcattaccacaatcccgttttagggcattgcatcagcccccaaaaagatccttcatgtccatttacagaaaattccaattccaagcccagcccaggtaatcactgacctgctctgtctctagaaactagccttttccggacatttcatagaaatagaawcatacactctgcagtcttttgtgtttggcttttttcacttagagaattttttttgaagttcatccatgtcgtagcatgtatttgtaggctgttcctttttatagctaaaaatattcctctgtagtatagaccatattgtgtttatgaatccacccaggtattcaatgtattttaaatttaaaacgtcaactgtataccaccgagcatcatctcatgtgccatcagtggtccacaaactgtgctttggaaacaccaacccaaaccagagcccctggcctggggtgcctgggtcctggccccagtcaccactgctttggttttcccttggcccaaccaggtctttaccacgtgggaaatgtggtcgctgaagccgcaatgaggacgaggttgtcaagcgttgatttggaaaccaaaacaaacatctctactctgtcaccacccagggccactaaaatatcttgttctgactttgcaagctgggggcttttccctggagtttcccactgagtttatctgaactcaacagtggagagttccctgagttggcatccaggagacctggactttaggtccagctctgccactaggtgctgtgtgacctctggccaaccgctgccctctctgggcctcagctcctccacctttacatgcaggagttcctgtgggtgatctctctcagcttgctctctactttaggtcagtgactccaagaggcccgtgttgtggctgatctttctgcctctggagaccacactgtgttcgctgaagcctttctctgttctgggcttccccttccctctcctatctctgccccagataactagggtccaggctccaggcataggcagcgctggccatcccatccccaggcttaaccggttcaaccgtttcccctgtcttcattggctccaaggaaggatgcaggaaatctttaaggctgtcaagaaaaaggtccctccagcctggcagctgtcacaaagttgccatggactggtaggggaagttgccctgggctggtagaggaagttgcccggcgctagtagtgctggcctagctgcctatcagacagggcgactcttttgggggcctggtgtccctgtccagaagcctgtccagccatcctggccccctcaggcctagtgtgatttgcagctggctggcctggttccctcccgtgcgagtggctgactgtatgcgccccccagttgaagtcagcctggaggctaggtttctttttttcctggtgcctggggtgattggagggtggtttgggagcctggagagaccactgtgatcattcagcctggtggctttcaggtgggctttttagagccctggagtccatagcagggcgccttgggagactcgggggacagtgggaggctgagtacctgagatttgacccatgttgcccaccatagctccatgcctctctgactcccagactgtccaaaaagtattccattttaaaaagggttctgctgttttaaaaagaaagaaaccgctgattcagctgagtactttcattttaaaggtggggaaaccaaggcccagaggggggctggccctcagtgctgagctggacagaccttccatctgccgtgcagagctggcctccccgcctcgacatgatgcccgcatcatccgccagcagtcgaggctttgttatgttctttccacctttttgtgtgtctgttttaaacatttttttaaaaagccactttctgggatgggagggacttttgtcacagctatttctgactgtgagccggaaggggctgggctgtcggccggaatggaggactccaaaaagggatggtgggtgggtcagctggagtgtcccccgcccattcccgtcacaccccaggggggccctcaagcaggtgggtgctggcccctgaatgtcccgaagcccgaaggctgccctggaatagaaagctgagggctttgttccctgccactcccattgacactttcgttatttctgaagctggcaccgatacggattctttatttctgattttccagtgaggcagccttcgatggtggaaaagggtttygcatcctggctctgccactgtctgtgtgaacatgggcaagtggcttggcctctctgagctgcccgtggagctccccgcttcgtcctctgtaaaagagggatcatcttgttgctctcccagggwttgagaaggaacaaatgaggtctggtgttaaggtacctggggcttggcagattttgggcatacctacctccaccccagcccagcccccttcccctggcaaagtctgttcctttaatttacaaggatttctcagcatggccctgactgcctaacaagtccatttcagggcatgtcgccgctctctctgtcccatggaggcgccagagatggtgttgggggtggagggagaacggctgcttctttgtccggcatctaagaaggctgtttgacctactcttagcagttgatttgtgcctccggaaatctctcgccatcccccagccctttctcccaacttcctttaagagaaacacacaaacccctccatctagcgcctcgggtcccttgagaactatattacagaatcccttggctgggttggcattctcactggggacaaatttgggagcgattctcagagcctcaagctagagggaggggaatgaggtcccagaaaagaaaaggaagcagggagacagctgacgctgaagattccttctcagaggaatgcgaggcrgggctttgccttggcaaacgagaccggatgcgggtccctgggtcccccttccccccacgtgtatgcacactcacactcacacacatgtacgtgcacacacacacattcacatacacatgcagatgcacacaccagactctccgttcagtcctgtggcccacgtccccacacatgaccgtgtttgaaggacacagaagggtagacccggaatttgaacacgccctttgctgcaacgagatgcgttgccttccaggagaattgatttaaactgtgccatgtgtcagtgacaccggaggctgtgggctttgcatttgcagtcctggcttttgatcgyattgagaggtgaaggccggctggcattccatttatttcctatgtcgcggatggctgaaggcccgggacgggaaggaggcagccctgtcatgtccctgtgctcaggattagggatgtgttgctttttcctgactttctgctgtcaggcggtcctaagcacccaccacctcccgatcacagccccccacacccggagttgtaactacctggcatgtgtctgcccctgcatcgwctggaagctctgtgggggcctgctccaactctggcttcgtctcccactggcagatcccagccaggacctggccaaggtccatgctgagtaaatactcatgcagcagggaggcctctgtgtctggctgctgtgagctagtaggcctccaggaggatgggacagaagacggacaacacagaccacgtccagggattcggctgtttgtggaggggagggcctgcacttggaatcagaaggcctgggccaaagttcaaagtttgaatgaacccccaagcctggcagtgcrgggtgctggggccccagggcaggagttaaaagccgagtgagcttgggctagtcactgcctctcgagcctcagtttcttcatctgtaaaacagggatgctaagctctgtgtccggaggttgtggaagaagtagacaggctcgcctagctacagcacagggcgtgtaaacagtcaagttcagaatgatttcacagggcagagagtgggtgccctacagaggcrgatctgtgctggccctgtggggtgggcagaggttgagaaccaagctggaaactgggagagggtgtcccgtgccctttgctggcagcatctgtgggttgcacagccctttgagcattgccagactgtgaggtgtttagaaaattccaggccagatgggagactgctgaaggtttgtgatgttgcckccgcctgcccacgaggggagtgtcctcccacccacactgggcacygggtgcttggcttcctgrgcaggatgtggtttctcattctagacctggtacaagagagggtagttttcacccaacagtaaacctggcaaatggcaatgcctggttctctggagggtccgtggagcccaggtcctggtctgggtttgcctgcgatgtggtctgagcttcactgtgcccacctgggaatggggacagtgggaaggtgggcttgcccagcaaccctgtgaagactacgttctctctgtaatgtagcacaactctgtgcatgccatttaatctcttgcacctcagtttgtcgctctgtamaatgggggtgtggtttcttacgagttctgcttcccagggttgaggtaaaagtcaattaaaacagtgcagtaggaaaacattttgcaaaaggrtttgaaaataaatcaatatggcttaatgcttccgtttattgagcacctactttgtgctaggtgcagtgatgacttctttaaatatgtgataattatgggagcagtcccaagcagtgggaagtgattatgctcattttacaaatgagaggttcaragaggtgaagacttctgtcccagatctcgccacgagtccgtctgggtctctggmccccaaggtcagtgctcctcccakgaggtggccttgtcccatgcccctggaggttgccaaaggctggctcagggtgaggaggcaggcaggaggcacggggtctccccagcacctgtcacaatattgccatggcgggtggcagaataggaggcggctgctgcgctgggaagactccctgctgtcactttacagaaattatttcttgagaagcaaatgaatcactggcagtagcaggcagatgaggctcccgggccactgtagcaggcctgtccaggcccctgctctttggagaaggtctcaatgggggctggcagggctggcaggggaggagttggggaacagggaacacatattatgacccgtctggtgatttccacgcggtctcatttaaacccggtggtggcactgcaggatggaaaccgaggctcagagaggagaagtaacttggaagtcaggctccagatccaacctttatcctgtgctgtacccagaaagggccatgcccattgcaagccgctttcctgctgtgagcctcagttttcatttctgtgaaatgttgcctagcaaagctggggcaggctgtggatctcaggctctcaattaatgctccatttatcttgcccggcccctgagtgtcctcagggcacagccagcccgaggttctcatccacggatcaccagcagcagagggcctcgggcattctggtggctgtttgggagctcgcctccgccctgggctggagtatccctagcttttgctttcagtcagtgctgtgaactttgccagggaacagggaagttgttacaatcgtttggtgcctcttgttggggaagatgagactgctgggtgtggatgtctgagaagccaaagtggtggtggtttcagaacagtggctgagtacccaccgtgggccaggcccctgccctcgagaactcagaatctggggacatagacaaatgtgtcatgccatgtggcagcatcatgtgacaacagcatgtgcccagtaccttctccaacagtgcttgcggatagtaggaacacaataaacatgtgttagttaatgaatttcattaaatatttatacaacatttactctttgccaggcttcattcaaagtggtttgcaaacatttaattcatggaagctgtaataaccctgtgagttgggtgctatcattagcccattttagagatgctaaaactgagccacagaggcaggggagggaactgggccaagacaccttgaaagtggcaagcccaggcccggtgcggtagctcatgcctgtaatcccagcactttaggaggccgaggcgggtagatcatgaggtcaggagttcaagaccagcctggccaagatggtgaaaccctgtctctacaaaaaaaatacaaaaaaattagccgggcatggtggcaggcacctgtaatcccagctactcaggaagctgaggcaggagaatggcttgaacttggagggcggaggttgcagtgaaccgagatctcgccactgcactccagcctgggcaacagagtgagcctccatctcaaaaaaaaaaaaaaaaaaaaaaagaaagtggcaagcccagatctgaccgcaggaagtcaggttccagttccaaccttaaacctgtgtagtaccagaaagggccgtgcccattgcaagtagcttccctgcttgagcctcagttttcacttctatgaaatggaagtaataaatctgacctcatgaggctgtttggagggctgtctaaaatgatacccgtggagcactttgtaaactggcaagcggagtgcctgtggggaccaaatccttgggagccctgagctctacccacactgcggtttcttttccaacttcccatgcaggctgaagctccttgaagctccatgcaatgccttgtcctctcttgcctttacattcacacctcccctagatcctgggacgggaggttggacagaaacctgctatgttagacagcttagagcagaacgtttgtgtggaacccaaaagctgggaagagaggaacctgcagggtttatttctgctgcctgtcagctctgagaccttgggagagtcactgtgcctctctgagcctccgtttcttatctggaaatgggaatggtcatgttgcgtggatggcaagtgcgatgatggtgctccgattctggctgctgtggcaaaaatcactaaataaggctgggggttctggggagaggagctgggcaggaatcgaatggcgtttgggccttggccctggcagaagcccctccatgtggctgtgctgggggtggggcctgtctctgagctgtctctgagatgcttgctcagcgccctctggcctgcgtgctccgactctgggatgtgtgttcacacagaccctgctcatctgctgctcgatggagagaggcccctgcagcggagacagcgccttccgccctcttaattggctatctttattacttgagttatttaagacggttcttggctcactgccgcctgtttgctgtcttgggggaggggaagagctactggtctaagtagatcttgtgaagttccccagcagacaggctcctctctgtatagggtcagcccatcttcccagggcccgttggcacccccgttttgctcctggcccactgtggcaataggcagaaggccatcttggggggtggtagtggaagatttagggaaagcttgttgcaaagtcacgaccagagagtctcggaggtctgggtgggacactggtgagaccctagggtgcccaaaacccagggattctggaaggtacccaagccagttcagggccagtcaagaaaggtttcctggaggtgacatcacctaggttgtatctggaaggttcagtaagagtggaagagaaggagagagggtgttccagatagagaggacagcgtgtacaagggcctggagttgagctgctgtgcagaacagtgtggagctgctcctggtgcccgggcttgagcctggcactgccagaacttggcctgtcctgtgcttgcttctgccctgtcttgtcccctcctccctcctcatgctcttcttggctctcattttctgtcttgctctcctttcctctccctctttcctttctttcttgttttgatctctactctttatggctggctgtctcactcccatcctgcttggggcagggctctgagggacatcctgtcccccatccctcagccagatgctgggccctggtgagtggctcttactgctggggccttgtgagcccatgagtgtgcatgtatgtacgtgtgtgtgtgtatacacgcatgtgagcacaggtctggagcctctggatttggagcccttaaggtcattgccctgcctgtggcgggccctgcagaccccttgtactatggggctgggggtagggtcttgacatcatggtggggggcaagggaggctgcctagtgagagagaagctgctggtttggagctcaatgctggccactggagaccctcagcctccccatcccccattatggtccagggcctaggattagacacaggtcaggaattggggctggggggaggcttggctgctccccttacctctccccgccccggcccccgatcgccctggctgtcccttctccctcacacctatgacttcctctcatcccctggatgccccagaggacttgaggtacccttcaagctcatctcatccatcctcctgcttccaggcaaaatcattcsctgacatcccaaccaagttagctatgccttctgtctttcaaagcgaccttcagccattctgtagtggtttctatttctctctcacccctatttgcatattcacgaccattttatagatgagaaaactgaggcccagcgaaggagagcagctaccttgaggtcacgcaacagagcaggggccggaacccaggtattttcaccctgtcccctccacaggactccccttaaacccttgagctcagggctccctctgggggctgctggcactttcaggaggggtttggaaaactcccagaggacagagcacttggagcagagaagcaactgccaaaggcatgactcggagcctgtacagtggggtccgcagagacagggccctgctccttgaccagacatctgggtccctggcgctgtggatgaagctccctccacctacaaaagagacatctgaggttgcccgtggggtttgtctccatgtcgcaaaaggcacttctccagcctctggcctggttttgaggtcttgggatgctgacactgatctgccttcccgatctgccagccctgtgcttggctgcaccatttctctgtgcctcgttttccttttgtatgggatgggatgggatgatgatacccacagggtgttggtgagcctgattcaggaaaggctgccctgtctccttatctctgggttaagccctggagctggaagtcttgagaactttgcctagaatgttggagttgggtgaaccgtagaggctgatctttcattccccataaagaccatgtttccagggctccttgtctgggcatgtggcctgacaaatagtactttgggatttgcacatgtttttatatggaaagacattttttttaagacagggtcttgctctgttgccctgcctggagtgctgttgaatagtcactgcttgctgcatccttcaactccttaggcacaagcaatcctcctgcctcagcctcccgaggagctaggacttcagacacacaccactacacccagctaatttttttttaaaaaaaataatttttgttgagataggggtctcgctatgttgccggggctggtcttgaactcctggcctcaagtgatcctcctgccttggcctcccaaagtactgggcttacagatgtgagccaccatggctggctgagtcttaatattacattgctgttggtttcacacttacctttaaataaaatattagcatttaaaacatcaggacttaaatttgccgggtgtggtggcacgagcctgtaatcccagctacttgggaggcagaggcaggagaatggcttgaacccgcaaggtggaggttgcagtgagccaagatcttgccactgcactccagcctaggcgacagaatgagamtccatctcaaaaaaaaaaaaaaaagaaataatataaaataaaacatcaggacttatctgacttggagactgatggccygaactcagcaagctactgctggcagagccagaattaacctgatgccaagttgagggacctccaacttgtaggttattccttttctgagccctaagacataattcaattgtggggaattaaaaagaaattgcttcatttgctcttgcttcatgtttcctgttggcccgtgatttgggccttctcttgggtrggaactctggctctgaggtgacactgcttggagttgtgttactgctctgagcctcagttctctcatctgtaaaatggggatgacaatcttagctgatgaggttgcgaggatttgatgttgcctgcagagtgctacgtgtgctgctggcccctcagctgttaccgctccctccctcctgccctggcctggctcccaccagcccccaggccccaatttgtacacataaaaatgtgaacaaatgccaaagtactatttgtcaggccacatccccagacaaggagctctggaaacatagtctttgtgggggaatgaaggatcagcctctatggttcacccaactccaacattctaggcaaagttctcaagccttccagctccagggcttaccccggagataaggagacagggcagcctttcctgggtcaggctcaccaacaccctgtggttctcatcatcccatcccatctcatacaaaaggaaaacgcggcacagtgagaactgcctgctccctcccgctttggctgaagactggccttttgtgttctgagcacttcctctccccggtagagccgcctgggcagccaggaggaggtcatgtcccctctcttctcgagcagactgtcagcacagggtgactgggaaggcaagacctggcattcaaggctgtgtccagtgcagggtgtcacctggagcctgtggctcctaggagggcctgatggaatgtggacatgaatgggggaatctttccctgtccccgcctccctggggatcatggactgtctcagcctccccgttgtgtggatttggaagcagcctcagggggtcacattgctggtctgaggtctcactatgaggtagggccaggatcaggattcgaacctgcctcttgcagactgttacccaaagtactctctgccacacatgcaagctcattctggcaggctgagataggggaattggaagacaggggttcaagccctgccctgcacccagcagcagcaaggcagccgttcctccttctgggcccctgtaggcgatgggtagatggtttctgtgttttcatagactgccttgcgaggccttgtgggtgaagggcccaatcccagaccttggcagaggagtgacgttgaaggctggcttggcattgtttttccagagttgacgtcagggcagctggtttagggtttcatctgtgagacaaaggctgctttgtagcttctgcccggtttaagtccaagcacatcaccccscaaggtgggaaacgaggtggaagggattgcagggcccaaacagagaagccttgggaggcttggcttgcgctcagcccctccaagaagggagccaagatctcataattctatcgccatcttgctcacttcccgagagcactctgtatgcccactgcagtgtttgaagccgcacacatgtgttctctggaacatcgcaccactccagcaaggtggctgtgggtatgtccattgtacagatgagaaaactttgagtcgtgccaggtgaaatgacttgttccttgtcaaagctagakagtggcagagtgggcatgtgacctcaggtctctttggcttccaagatcaccactgggttccaccactagagtctcgtgttgcacccagctttggaaagggaattctaaaagccaagataccctggaatcagactggagcagataaacctcatggcttttgggggggacttggagctttctcttgtcaggattcagagttgggtcactgctttgagcacgtgttgcgtatttgtatctgcatgtttaggtatttgcacgtgtacgtacaagttaaagaagggatttggatactggagggtctgtatcactggcaagtgattccagggaggccttgtgggcaggtgtaaagagtcatcccaggggacacctaggaccttctgctcttctttgccaggattaccctacttgatcatttattcttccatccgtctgtccgtccgtctgtccatccatccatccatccatccatccatccatccatccatccatccgtttgtccatcagtctgtccatccatccatccttttctgggccacggtgctcagtccctatgcttgggctttggggatgatgctgcatgaactgggagcttgcagaatctggggagcttgccaaggaactgttaaatcagggctggaagagtccttagagattggttagatattttctctcccttttgtcagagaggggcagtgacttgcccaaagttgcacggggcgagtggcggagctagggctcaaagtcaggtctgtaggtcccagccccaagtttctgcttctctgctgtgtcaacagacagctctcactcctggccggcagctcccttacctagctcttcctcctctgctgttttcatgggttcttggcttttcgggagttgctggcagcctctgttctgagagacttctagaggtgtctactgaaccagcatgcaggccccagactggggccaagcttggctatgctctgccctgagatgacaccctcccgcatctggaacagcaggttggctgagcccctgaggggagagactccaaggccctgtttactttaccctactggacactggcttcttttcctccaagggtctccagaggtcatctgtttcttcctcatcttggggctaggaccactgcaaatcctgcctgaagatcttactgcctaggaagcacattccagaaccctttctgagacgggccgtccagtgtccttgtggccttttccattgggaagtgcttcctggtgtctaaccatgatccctactgcttcatttccccctttgtttagcctttcacagaggaggaaagtggttggatatcaattgcctggtggttctcaaggcagcaccattaccttgctgcgtaccctcttcccacctacaatctcccttttctccacttcctgagagactgtgccttgactcagatacaagttgagacacaatcttcatgcagaaaagatctggctggtccctgtagtatcccacaagtttctgggagggaggcacattccttttctaggagtcagggagccctctgagctagaagtggcctgaatcccagggatcactctggtcccatctttcctgatggggaaactgaggcccagagaggttgagcaacatgtccacagccattcagccagcctgtccgagttgggtgtcctccttcatgtggcaatgctgtttctatggtttgggcagggggcttgataaaggtggccggtggcctctggcctggtggtccctgccgcagacagatgtcctggaagcagaacagccagccccatgtggccccagagggctccctggcctggaatcagtgctcctgcctgctggttccctgggttggcagattcctggcggtcctgggctgccctcagggccaagcagtggcatcttctccgctcccacccaccctgtggcttcctctctcccacagcctcccagcctcccttttggccctagaggtgccagggaggcccctcacctccaaggggagaggacaggaggcctgagtgtacaccagtaattaagttgccagggggacactagctcctgtggctggggcaagaaggggttaagcagtgttgcctgccagggctggactcccagctggtgtcccggcccctggggccaaccaggccatctggcctgacagataccacactgtgtcccatctgtcccaaggcaaaatcaccaggaggagactgcctactgcctttgagggcctgcaggggtgggcgtggcccctgctgtctgtccctgggggggccaggccagttgggaggggctccccactgggcaggctgtcctctggccaccctccctgcagggtctccctaggtgtgaggtgggggagtctcagtccctggtgtggtcggagcttccttgtgcagaaggtctagagaggtgcagggatgggctcaaggccacacagtaagtcagcacaggcagagctgggcttcccccgaggcctgctggtggttacgcccagtggctccagctcacaagctcattcatccagtcagtagcggttgagggcctacggtgtgctgggcacttggtcactctggataccagacagttccccagtcccagcatgggagagggaacccagagacagagcctctaaggggaagcatggtgcagctcagccaagcccggggccctggacgctgtagcagccctcccagtagcctccctcccagcyttcccagcagctggaggtggggcttgctcactaggaggagcaaaataatgttasgcactggtgtttatgatcttatggggtcttcaccatccagggaggtgtaggtactattgttattcccattttacagatgaggaaactgaggctcagagaggtaaagtcgctttagcagatcaccagctgcggagcggctgagttggacgcccatcccagctctgcctgacgtcaaagtgttttgggataagggacagggggtggctgcaagtggcctcccactttgccccaagccggcttcttctcgccatgctggcctggaccatctcctttttggctttttgctgagtccgggctgggaatcctgtggctggaggcccaaatctcagggggaagagagcccccgctgggttggagttgagaagagaggctgtgctggtgccggttcttttgcatagctggggctagtgaccctctgcatcccatgtgtggggtgctcggcagcatctgggcagcgcttgagggattcccctcggaggaccctccatccatctgagagccccaaggctctgccctccagtggcggctgggccaggccgttgggagcctccataatgctgttatgattatgtgaccctggatgagtcactgcaccttggtgagcctcactttccccatcagcagaatgagggtgaggagatgacaagctccaataaagatgccctccgaggggctttgcagtcatggaagggtccctgggaggctttgctccatttcattccccgtctcatcttaaggggactgacttctctctccagccccatgggtagttgggaggaacactcttgtttgtgtgttgtggggttgcctggtgctcagcctccacactccccagtggttcacatcaggtggaatgccagggcccgccatgatgacaggagcctgggattaagtaatgagtccatccccttgagctgtatttagtcactaattcttttggtgcgcgtgtttgcagtctaattacctgcctcagctgcgctggaacctgccccttcccagcyagtgaggaccatgacggctctgcacagacaggtgaccgttgccctgttacccatccttggttgcacaagccccacgtgtcttttgttagctgggtccttgtcactcttccctcctccctcctggagattgctctggaatgttctcctccccttaccagcggcatggcaggcagctcctagtctctggagttgcactgagccagccgctgcctgtgtgggaccttggacatatcacctcccacctctgagcttcagacttctcatttatgaatgacctggacttccccgtctgatgtcctaggatcctgtgttctgtgctttttttttttttttgccccacctgcagccwgtttgtgtttgcacatcctcattgaatccaggtggggtcattctcacccattttacaggtgaggagactgagccctagagaagtgacttggcttaaggccgcagagccttgctttcaacccaggtgtgctgactcttgcctggtgggctctgcctggctgccagcccctcattttttcaggctgcacatgataaggaaaatctgggctcccaggcagctggctccagggcggctgcgggtgagtaagtatgcgggagattaccctgaggtgccctacatttacctccagggcagcacagtcacttggaataaacagtggagagacccaaagtacatattaggtttccaaaatagccttgggagttgctgtttttctcaaagctgtaaacataaccctgggcctgggggcccccacactctcctgggcacagaccccctgggcctcctgcctcttgacctgagtgcccaaagacctgctgcccagaccccctgctggcttccacttaagcaagagccagcagacacgggatggggatggggtggagggtccatgggggcttggccaggcctaggcagaaagacaatgtcccagggatggagagccgtggacaccaactttcccatcatctgctccatgcaaggtaggcccaggcttcaaggtgcagagaagagagtagcagagttggcctggactgtggaggttgtttggggaaactgaggctggcagggaggggctggcagggtggccatatctaaggcgacagggctgcattggcctagattggatctcctagagaaggccctggagatgacacttactgggcctttttaatccagtgaatatttatggggcctcctatgtgccaggctctgtgctgggcactggagttgcagctgtgacccatagatgggcctgatcttgaaagagatgagggccgggcgcagtggctcacacctgtaatgccagcactttgggagtctgaggcgagaggatcgcttcagcccaggagtttgagaccaatctgggcaacatagtgagaccttgtctctacaaaaaaaaaaaaaaaaaaaaaaatagaaaaattagccaggtgtggtggcatgcacctataatcccagctacttgggaggctaaggcaggaggatcccttgagcctaggaggtcgagagagctgttgttgcacccctgtgctccagcctgggcacacagcgagatcttatctcaaaaaaaaaaaaaaagacagaaggagagagagaaaagaaagatgagttaagcagaggagaccagcaggggatcagtaacctcaataccaagtggcccagagcctttgtagtacagaatagtggcacttgaccctgaccaaggagtcgggtcagcctcctggagggggttataagctgggtcctgaagtcacattaggtaagggagagagagaggaaaaggacaaaggggaaggggtgtagaacctgttgggcagagaatgcagcccatgccttggaggtgtgatggagcttggcacaggggggctggaggtgttggggggatgctattcagccttactctaccctagcacgtggccttgttctccagggcttatcacccaccaggtgagacctctgtctacccttttggagaagaagtgtctggcccatttctcagatgagcctgatctcccaacccttgctccttggggaaggtagagggccactggtgaggaagaacagtatttatagcggagtcttcctgcacccaacggaggcaatcttttgactaatgaggaaactaaggcacaaaacattgttgctgcaggarctggagtaagggcccaggaccctgcttttccttggctccctgggcaactgggagcctgtggtagagaatgccagagagcgttctctcyaacacgtcacacatggctctttagaggggcacaaaagccttttctacatctgcacacttgatccagaaacccaatctgggtatcccagagggatacctggacacatatgcaaatgtgagggtacraaggtgttcacagtcttgtttagattgcaaggactctgcgctgacagtggaggacccatcaaaccagtggccctgcagccacctgctgtgtcacctgctcgggaggatgctgccgtatattgttaggtggaaaaaatgcatttgaaaaccacatatggtcgcatccygttgtcgttaaaaaccaatctcataagaagagaaaatctcataagaaaaagttgggaaggatatagagccgatgttaaccgtaattctctcagggagggggattcatttgggtgggttttacattggttttatctggcttacctgtttttttctttttctatttcttgtgtaatcattgtaaacactcatgcaatttaaagcaaggggaaaacgagcaggtatttttgtcttttaaaaatttaagtggttttgatgttttgagcaggtatacatgacatcattcaaaattaaaaagatacagaaggaggggaaattctgacacacactacaacatggatgaaccttgaggatattatgctaaatgaaatcagccaggctgggcgcggtggctcacacctgtcatctcaatactttgggaggccaaggtgggagaattgcttgagcccrggagttcgagacctgctggacagcatggtgaaaccccgtctctacaaaaaataatttttaaaaattaactgggcatggtggctcatgcctatagtcccagctgctccagaggctgaggcagggggattgcttgagcccaggaggtggaggtgcagtgagttgtgtgattgtaccactgcactccagcctgggcaacagagtgagacgctgtctcaaaaaaaaaaaaaaaaaaaaaaaaaaagaaataagagaaataagctattcacagaaggacagatactatctgattctatttatacaaagtacccagaagtcgaatccacagagacagaaagtagaagggtggttgccaggggctgcggggagaggggtacggggtactactgcttaacaggyacagttgcagttttgcaagatgaaagagttctggagatggatggaggtgatggttgcacagcagtgtgaatgcacttaatgccactttaaaaatggttaagatggtaaattctatgttatatggtttatttatttatttatttttgagacagggtcttgctctgtcacccaggctggagtgcagtggcgcgatcttggctcactgcagccttgaggtcctgggctcaagcaatcctcccacctcagcctcctgagtatctgggactataagcggtgccaccacacctggctaaattttttgtagagatggggtttcgccatgttgcccaggctggtctggaactcctgggctcaagtgatccacctgcccaaagtgctgggattacaggcgtgagccaacgtgcctggcctgttatgtgtattaagaaaagatacagaggggacagagtgacagttctaccccataatccccagccacccacgtcgctgctgaagggaaccaatgttttcagtgtgatggtggatgcttggtttcctttctcgtgcccctgggtacaaatgggcagtggcaacttggatggggccccttcactcatggacggaggaagatgccccctgtcccagggtgagcattcccttccatccctgcttgcctggcacaaggcagycagtgcccagaacttcccacacttcttgggttgaagggattgaggatctgaggctggaggagccagaggtcctgccccrgcgagagctccggaactcgcctcccctctctcagcaggaagagaatactcttaatccacttctgtgtccccagcacttggctcctgggtgagcacttgggaaatgtttgttgattctgtcctgggggaagaagatgaaatgtaagccggcagccagcctgagttgggctgtgggagatattctgggctgccgggcctgggtgtctccagaaacmcccaaygctcgctcatgaaggctctcttggtgccaggtcttgtgccaggcactgggatatggtgccgaattggatacaagggagatgggacgtcctcctgtgtgtcttgactgtcggtgtgttgccgagcattggtagcagagggggctggtttggcacccaggtaccctgcctcatccccggggccttggccagtctacacagaggaactgccctccagctgagttacccattttccatggcagggaggacagcagaaaggccgtgttccatgactaatcatagcttccatctattgagcatttactgggagctgggcactgtgctaagtgtgaaacgtgtgttgactcatttactacaacaacctggcaaggcaggttcttccgttagcccctgctcaaagctaggggacctggagcacaggcggtcaagtgcttggctcaaggcacacagctcagaagtgcagatcctctgcccctcctggcatcccagtctgggggggtcaggggtgggatctctgcagtcagtgcctgggggctggatgacaagctgcagcctccccgcaaccccacgatttccatagcgcagtggagccagaaagaaacagaccattttacagaccagagaaacaaggktgctgctctctcagaccctggagccagtgacagggaaggcggagaagggacgagagcctccgtttattcggagcctgtgtataccctccttttcacaaactgtagcagcctccagaggcaggggggatctttatgatgaccaaatggggaggcttagggattggaaatcacttgcccgggagcgtgtggttggtaccactgggatttgagccttgttccgtccagctccagagcttggtgcctttcttgctcaccacgtgccggccccagctcgttgccttggcagtggaggtggtggtgtgccgaggccttcctgcaccctgggttctctggcgctgagaaataagtgcatgggcaaagtggctttgtttccaggtcagtgactgtgaccccatgtgtacacatctgtgcatctgaccgtggcactgtaacccaggggcattttctaagtgatgtgctgggggtgtgggcagggagtggggcttatggagccgacgagacaccatcagaccatagagaggctgcccaggcttgggagccatatggacctggatttgaccttgaacaggtcatttcacctgagtgtgtatagtgggaatgataacatccggctcacagaactgtggtgagaattagagatggtgggtgtcgaatgattagcacctaatcagcattttacaataaatgcaaattcttcccttctcgtagaagagtggagtctgatgagagagacagggaagtgaaaattcacagcccctggatgccagtgctgaaggagtgggttcaggactgggaacatcagwatgggcatagtgacttattctggggaagtcatgaaaagctccctggaggaggtgatgaaggggtacccaagcctggaagaggctggcagtggtactccagaaacttcatggtggcctgcaatttgtgatgcagatttttcctcactgtgagatgctggttgagacaatttcctccttggagtggcctggttttttaggggtagggggagtgcccacgtgggtgtagtttctagacagaagcagtgggaggagggcactgccaagcatgctgcttgggattatgggtgtccacagagctgcagtttctccaaaggtgttttttgtttgtttttgagacagggtcacactctgtcacccaggatggagtgcagtggcccgatcctagctcactgcaaccttgaactactaggctcgagggatcctccaacctcagcctcccaagtagctaggactacaggtgcgtgccaccatgcctggctaatttttaaaattttttgtagggatgggatctcactatgttgttcaggctggtgttgaactcttggcttcaaatgatcctcctgcctcagcctcccaaagtgttgggattacagccgtgagccaccatgttcagcctctccaaagttgtgttcaataagcaataccaagtggcagtgatgctgggaacctgggcaaatatagacaggagrgaattggacaggtggctcagaaaacaactgaaacctcagattggcattggggcaggtgacccgggggttccctgggccccatgttgcccaaaagagccagcagctggcctgggtgaatacccttaaatgccttgtgtgtgttggaaggtgccatgagaccagctgggctctcctgccctggacccacctgctgccacagtggcccttgttaggacagacctcaaagggctgggcatgcccattagttcctggggtatgtctatggggtgtggacggygaaagcagggttttcagtgggttttgctgacgggggttctgtggcattagcatctggcttctttccttctgccaccctgtccccttgtactgccagccacccagccaggtgaaggcggcatctagctcattaccatgactatcaacaacatgactgttatgcagacagtggctctggggtcagatggccttgggttcaagtctgaccccctcacttacgatgtggtccaagagcattctcccagcctctccccacctctctgagcagctgtcattgggaggtcgtgaggatgagaatgacaccaatggcatgctcatggtagaccaggcactattctgggcacttttcatatgctattccatggaatgtgggcaaaacccctcggagctgggaggtattaccaaggcccagagagggtcatagcttgctcaaggtcacagaactgcaagatggatagctgggatttgatcccaggaccctctggctccagagtccctgctcccctctccactacacacactggttggaacgcaaggacagacgtctcagctggcttttgagcatttgtggtttgtcaggcggctttgtggtcagtgtaggatgcttgtccagggatcatggcagttgttttctggcttggctgggtgggcccttagaattcatccagtttgacatcattgcattactgatgggaaagtggtgccagaggaggggaagggacttgcccaagatcacggagccagctggggcagaggcaggactagcttcaggacttccagcacaaggctgctgcctcgttgcctgaaggggtgtgtggctggggggccggagcccagttaggggcttgccgttctttcccactcacctctcaagtcctstyrrstcaccacagagagcccagagaccagctagctgccctgcaaagggccccttggtcaccaggaaacaagtggggggaatgtcaggtgaggggaatgtcaggtgggggaatgtgatgaccccacacagctcatcccccctgcctggcgatgggactcactttcacctccttgctgggaaaactccttagcaactcgatttcagtgctgcctctctcagttgctcctgggtccccagagggccaggacaggttggagaagtgtccttgctgagggggcccagactttcacccacccatttgcccctccctcccccaggtgggtagagccagggtgacaccggtgaagagcatgggcatcatctgtcaagggcatctgtgtgcctcacttgagcctgctctcytgatccatccatgagccctacaaggtgggattgctatccccgttttacagaagtggagactgaggctcctagcttgaggtagrcaggccctcaggggatcacacagaggcagatgactttctcagctcacctgcccttccttctgcagaattgcctacaacctttgactctctaaggcctgcggggctcgtggcaagccctcaggaactgtttatggaatgaatgagtgaggggcaaacgaatgaatgcatgctcccacaccacgctgctgcttcttctgggagagggcacccagcgggtgtctgctgttgagtgcaggctgtcagagccctgatggcacccaggataactccggatggagttggtatccctgaggctgtcaccacttctggactccaaggaagggccctatccagggcgtgcaaataacactgcaaatgtcatgtcccgagggattttgggagatcctattatagatggggagactgaggcccagggcagagaagggacttgctcagggtcatgcagcaaattagcaacgcagccagggcatgaaccaggacctcctgcttcctagcccagtacccgctcttccacagggaacttccctatggatgtcagacccctctgcctctcccctgagcagccttgcgcagacctggcacgctgggatccctggaggaggctgccgtttctggttgaaagcagctctgtgtgtctgtgtgggtggcagtgttctgggggcacacttgattagtggcttctcaaacctggcccccatcctcagtgtacagcctgtgctccgtcctgctcaggccattactgcccgcctgtaatggaatcggctgccctggttaagtgttcacattaaattaatacctcctccgtggagacaatcagttggcatttaatttgtctttccttccgagagctggagagtacagctgggcagccgggctctgatgggcacgtctgcgagacagcctttccttgggatcaggggctccatggagatgggagccgggaggccacaagaggtggtgccaggtgtccccagggggtggggcttggggcaggcaggagggggcctctttcatgcgcaggggctagagcttattggctgtccattttcgggggagaagacgggcttgcagcgtgccatgtgggagagaaagtcaggaggcaaggcatccacacgtgcatcagtgctgagctgcccaggaggtgagccctgtgttagcagtggtggcgggatttccacattgtattcccagccctgccccactcccactcccttatcggattttctttctgccttaaatatgaattgtctgtggtattcgagggggatggtgtgcaaggaggaagttgactcggttgtggttttcaggttctctagaagggctcagaagaagcaagtggaggctgttgggggcacgcagccctgaccccaccggggagcctgctctggtcttcccaatccatcagcttctgcaaaactgcatttgcagaaagggctcccctggtctaccactgtgcctgcagcctcttcttccagctcagatattattttagagaagaacagctgattggggcccccaggcttggccctggctctgctgtgaggatgcctctgtgcatctgcaggtgggcaaacacaggagctagggcagcgcagagctgaggggcattggctgggccaaatctgtggtttgagcagccgggctccagcacagctccctggccacctgcatccagccctgctgcagtggggtgagctccccgaggccagggtggagctgagaaggtgccagccctccacccgccgggaaggaagctgctctctgcccccacctgccctctgccagaggccaggcccacgcttggcccagaatgaagtcttccactgagggctccagcccagcctcacctgagckcatttcccttcacctgagtgagtcggcctaggcgtgccggccgctcgccttcccgcaaggtgkgggccatttccacacctccctcccaactctggaggtgggaggcagccatgcgctgtgccgttgacgtggagctgctgaacacccatggtctgctggatgccagggtgcttttacccacaccatccccttcctgtagttctcacagccaccttcgaaagggggtggctggtttcccaactcacagaggggacaactgaggcccagagagggtaactgacttgctcaagatcacgcaactgggaagtgatggggcaggatttgaacccgtctcttgctgccctggtgtcttgggatgctcactccaggagccccaggttcgtccctggagggcttcattgttttgctgggcctgcacctactttcctcctgagcgggagcctcgagcctctttttctgactgcacaggaagtgaaaaatctgtgagtcagcccctctgctggtgacttcagcttgggtttccgcccctctgtagggcaggcttgtcggtccctttcctgcgggtctgtgtgtcatcttgagctgacgggagagggggaggcactggccctgagtggggtgggggtggggactggcatagaatctgcccaccccttttccccagaggccagcagagacttctcgtccctcacgtggttccagtggtggctcctcaggaatgcggagagaccacatctggctggggtggtgctgccacctctccctcctggccaccagcctcagagagtgcttgttctgctaagatggtggccgaggcccctgatctcagctgctttgtgcttttgtggagtcatttcctctccctgcactctttgttctgacatccctgcctcccctccctggcccagggctgtgggaagtgggaaagggaaggtttctccttctcctgcctgcttcctgccctggccatccctccccctggcctggcctggcctctcccaggagaggctctggagccgaatggatgaagctgagtgcaggggctatgctgggaatttgcctcctgtgagcccctgggctgggatgttcagtctaaggatgctctgggggaaaggagttctgtctggaggcgagggccatcagggcactgaggagtaagtgcagctttggatccatccatccatccatccatccaaccaatccatctatccatccaaccaatccatccatccatccatccatccaaccaatccattcgataaatgtctgactccttagcaagtgcccagccagtttgaggtgcagggaatacagtagcaagcacaggaatgatcatcataaccagctctctgggcctgcagaaggactggacccccgacctgagacccggctcctgtgcctgttttcccacctagaccagggaacttgcytcttgcttcctctttgccccatctctgtgcctgagacctcccgagatgagtgccagcccccggtggcggtggggaaggtggaagtggcggtgaccacacaatggagccatcactggccctggcgtcacgggactggctcctttgggcaagagctgtgtgccgtgggatcccacaaccatgccactggggaagaggagatcctggggcctccactgctttaagctgtggggcaaacaatggaagtggatgtgaggcttggggaagagatgacatttgagacaagcctgggagaatggctagggtttcaggaggctgaggaggagasaggaagaggggaaatgagttacctgacctctgagcctcatctgcaacatggggatgatccccaggggagggctcagcgggattttatagagggaagtatgagtgcctaatgtggtggataccaccgagaaggtaatcaataaatgtcccttctctcatccagcgctagaaaagagaaggatttggaagttttatgagctgttgggtcagggtgggcaggggcggctctcagtgattcaggccgtgtcagccgtggctggagttgtccataggccctgggtcttcattttcccacttgtaaagtggggacagggtagctttccagcccagtgcatgtgcagtatgatggaggggatctatggaaaggccctgcagagagcactgggatgtgtttgtcacctcattttctgccagtggcaggcctgtcaatattctggagtcttcaaaagaccagaaaggacccctccccagccaacagaacagctcctggactgctgagggagactcgaggaaaatggcctttgtgccccaaaagtgatctctttatgttcactccagccttccttcccctttcagccttaaagggcccgggcgtaggattctgtcagacctgggttcgaatccaggcgctgccacttcctaggcagtctttgggcaagtcgtttgctcagccatgggctggggctgggagaggggatggtgcaggctgaaaggaaacgatgtctgcaaaccgctgatccaaagtaggtgcacccgcctcttggtggcagacagcgcctggcctgtcccttcctgctgccctctttgtttctgttggtccctctgcctgaaacaccctccccactgaaaccttactcttgtgggcagacccagggaagagggagggttgtgcttgggaagctggtgttgaaatctctgtgccagcaacttggttcaccagttctcagttaagctgagtgctccctggctctgggtgggtgggcagggaatacaggtgtctggagtgccgtaagaaacacatcgcccacctggcccttcatgccagtcctcagaacgatccaaggacagagcttttctgcattgtcaacactggagctggcggagccaggttttctccaccaccgccgggagggatgtcagggcgggcgacaggctcttcagtcaagccagctgctgtccacatgcggggtctgtcctcaacctcctgggagcaggccagccggctgcctcccccgtctggctttggaaataaaaagcccgtgaaatcatttgtgcaagctcatcctgggggtgtggtatgtgcagtcaggaaacacgattgagatgtggggttgggagggtgcagaactcggggcaggaagggagaggtgaggtggaggggctgggttgtgtggtcttcagagcctggccactcagtgccatctgtagcccagcatcactggggagctgtctgccccmgccctcgcctgcggaaccagcttctgcatgttaataagatgcccaggtgattggtatgcacattctaggctgagacaygctgctttagagactggactagctttgagtcccagctccctgcttgctagctctgtgaccttagacaagttactttacctctttgaacctcagctccctcatctgcaagatgggcttagttagaaattctttccccaagagggttaataattcacattcaagccagtgatgtgtgtgtccaaggcagtgagccgggtgtgtggggcccagaacgtaccccccagttaatggttgctggtgctgttgctgttattgtgtctggaaagccaaagatctgggctcctgctgtcaccttgggtggatttggggcaagtctcattccctctctggtcctcgttttctccgtctgtacaagggttctattggcccctgcctcgccttcctcatgagatggttgctcaaaggagaagtgaggggtgctgggcctcattcccaagggcccctctggggaatggggagtgtcggggaggtgcccctgggtgcctgcgtccaagggaggagccatgccattctttattttttgtgcccttctttgctactcctgctcttgctgcaagatgtgttagcaggttcgctctagactccaggctgcagccagaggcttgccggggctcrcccttgcacctgccctgctcagcggctttggaattgagtcgccttccccrctctgagccgtgtggccaggagagatgattcagctcgggacctgtgctccagcctttaccccccagagaagccccagatgccctgtgctcctgggcagggatggggtggcctgggaactttccccccattgtgattcctgtccccaacatggggcctgctcttctcggtgagaggtggcctgggaccggactcctagccttgctcctgatatactgggtgatstgggcaaatggcttgaccactcggsttcagttgccccatctgtacaatgaggggaggttcagtgagatggtcctggctggattaggcccttaggttccctccctgccccctcttagctttctctgtgccctccagccctggaaggaatcccagccccttgccctccaggtccggrccygggagcccacgcagatctcagcctarcagctaatgctggggctgggaaaggctggagaaaagggggagagggaragagtgtgtgtcctccaggagccctggctgggctgtctcctgtgggagagaggaggaattttcctctgtgtgtgcaaacagtatccgttttctcttgtttccaaaagccggtgacgtaaccggctctccacccctccctcccctctggcctatttttagctggcccygacagcatcctaaaagggttccagactgccctgctccgaggccatgtagggagggwagcagtggggtgaggaaggaragaaactcctctgtctgtcccaggatggacagacatccgaggagggaaagaacctgcccccagcttcctccagggagggaggaactctgttggaggagctgggttagggcctttaggctttgacagttcctgggtctatgaggagctccgcaaggggattctgagcaaccagtctggagcgtccccacctgggtttcagtcctagttccacactatctcaccctggccttgggttcagcttgtgcctctgggccttgctttctgcacctggggataatgacggtgcctacgtcataggttgttacgaggattgaattaacttcatgtagaacagtgcctggtacaaagtaagtcccagtgaaggtggttctggaattggtaatatcatccagtcccagggaactgctcccaccccttcctgcagttaagggcgggggtccactgaaccctcctttgccttctcccctcccgcccrcgtttcctattcarcttcgggcagtactcgtgtcaaagtagtggtgtggaagcccttggaacaacagggcttggcacatagtaaacgctaaatcagtgggaactgtatttattgagttttgtttcaatgtaataaaacagccccacctgctgactcgctgtgtgtctttgggttagatgtttatttaacctctccgagcctcagtttccacttctgtaaaatggaatgataacacctacgtaggagagatctgtgttggtttgggtaggctgtcgggcatcgcaatgcttagcacaataaaagtttgtttcttgtgggtgcaaagaacagcctgagagtggagctggctgcagcctggctcctaaggactggctttgctactgcatcttgcagcaacaacaggagcagcagtgcttgcacagcactttacagtttgcatgcaggcagggtggtggtccctcccacctctgtcttcacgaagtgctgggctcataccttaacgtggcacttgtcaccaccacctgatactctggttatatgtcagcctggctgtcytctcacaccacctcccctaggctgggagctcccagagggcaggcagggatggatgccccaatgcaccttccttgcccagctcaagatagtccctgggtgggtgttggggttgtgtctgagggctggactggcacagggaactcaccttctgaccacctgttcctcttggcttttgcaggtgggaggaggagctcgccaagcgcatgaaccttcagaccatggtggacacgctgcaggaggtaagagccctccgatatcccgaccaggagaggcacgccagagagycatgtggccaaggggcacagtcttcatgcggcaaagccaggaaattcttgcacagcccctactctgttacctcctaccacctcagtctctcctttatggagccaagagatcccttccacttcctctgcttggaagctaggaatggaccagcacagtgttgcacaagagctctgatgcaggggttgagaagcctgggtccaggtcccggggtgcaagtcccagctgctgtatgacctgggaccagcgacccttctcacccgtcactgtctccccacctgaggcttggactaggtggtttgtaagcccccaagcaagaagggtgccctcggttggggctgaaggccttggagagggcaggtgggcacgtcgcaggtgggctcccagcctgagcaggctctctgtggtgggcatttgggaacattccccttgctgctctagctggaatctctgcattctgggctctgcaactcccccacctgcggtgtaacctgggcagcaaacttcatcttctcagcctctattttcctctctgacaagtgggagcaagagtagcaaccccatgagaaggcatgaaaagttcttccaaaaatgtctagaaattgcgttctgatactgaaagcatttgtcgtctaagacagttagagacagattaagataattgtcaatgcgtagaaggaaaaggttgaatatctccctttcttttataatgaaagggcttttttctttataaatttaacgggttcatcgtcaaatatgtggaaactatagaaaagcccaaaaataaaaattatttccagttcctccttccacagttgaaaaactggcgtgtgaccttccgatcttgtctgtgtggacacacacccacgctcttcagacgcatgttaggtcgacacacatgacattgtcatttttgaaagcagagatggcccaatactggcagtttcacacggattgatctcatatttttaacgtaataggattgcttgttaattaacctgctcttttaataccttccatggattttcccacgtaatagataacgctttgaaaagtgttttaagcagtcaacagtgttcagtgggaagtcaggctgggatgaggtccttggtgccccttccctggctgcaggtgcccagctggggtggacatcgggtgcctagggctctggactcaggtgtccagaccctcctatccccagaggacccggcccctctgaagcctccccatctccgtccccgcaggcagcacaggaggctgatgccatccaggaggagatgaatgagaagatcgagcggctcaaggccgagctggtggtgtttaaggggcttatgagtgacgtaagtgccgcccgccgcccctgggtgtcatgacctcccccacacccatcatgcaaaatgcttcattccctccgaggctccggggctcggcttctagttagaatcctggctggctgtgtttgaccatgaggatgacggatgcattggatgcatcggagaccaggcaccctcctccygccccctccccacttctgcttccctcggtctgagtagagatgcattaatctgccgcttaacctatcccgccctcccccgggctcccctgatggtctgtgtgtgtttgctcccactccttcccagctcrccttgatgaggrcaggcctcggtgtctgggcgtagcagggcgtctgkcaggttggsccaggtsccgtctggtctgtgcgggcctgagagactcgcaggcccagcggcctttggcagggttgctccatgaggtcaggaaaggccagtgcgcgtgtctttttgacaatctggggcccctctaagtatctgtgggtggggggagctgttggcagcaaagggctccttgctgctggggacccaggtctcctccccttcaaacagtgggcagtacagggggagaccccaccagaaggcagaaggggccagaacgtgggtgactgagcctggcatggctcctggtgtggagggacgtgaagctgggtgtggttggtagaagcctcccaggaccctagttggaggccactgggctccctctcacttgtgtccaaggggatcaaccctgtggtcctcagtgactcccactgccggccttgggaggcatccaggagagagagctgcctgtgtgggggacaggtggggtgtgccggtgggaaaagaagggctgtctttctccagcgggagttgtcttttttcttcgctctaacaaagtgaacacggaccctgtgtctgctgggaggatgccttccagcccttagggagagcagcacacacggcgtcacactggcccctgactcccaaggccccaaccccatcccaccctgaccagtgccgccgcagccctccactccacggaaaagcccaaggcaccctcggactctggaggcctccccgcaccacccctgctgacacctaggggtctccccacctctctgccaagccccccaggcttgctccatccctcgctcatgtaaaccctgctgtcctccctgcagcccatgacagacctggacacaaagatccaagaaaaggccatgaaggtggacatggacatctgccgccgaatcgatatcacggccaagctgtgcgatgtcgcacagcagcggaactcagaagacgtgtccaagatcttccaggtgactagggctgccctgctcaccagccaaccccccactctcccagagcagccctggcctccacccctgcccggccaacccgtttgcctccacatcccactcactccctccccttccccgagaggtagcactacctgaccctgtggcctccccaggaaaacgtagaatcaggcacccrtggactcataggctcgtctgactgcttcatcctatggctggggagaccgaggcccagagggtgatgtgctgtgctcacggaaggaagtggcagaaatcagtctcctgcccctccagggcttggttcaccagcccacactgtacccattgtcccgcttcctgccccttcctctgggtgccagaactgggcatcatcccyacggttggggaaccctggccaggttatggggagaagtgggggagctggcctgagctctggtagaggggcctcagagttcagaagaggagctgttggcctttgactatttttcattccaccccaaagaggctctcgatacccccccgacctaacgtgcaagtgtgggtgcccccragagacggcgatcaggttagcgccagtgaggctgtcttccagagagggcttggggggccagtccagccgaatgaggcacatgtcattctccgaaggctgcttcttgagtttcgggttgtggtttggcttttgcttgagcccagggcaatacggtgtgttgtcgctctgtgtgtgtgactttgacgtcgctgggccagatctgggcctccctggggccctctctccacctccatgccttcttgctgtccctctgccgggaagcaggggaggccaacgcagccttcgtttgctcgtggcttgtctgcttggagtggaagctttcggtgaaccttgggccgtctgtcctttgcctttgcatgtgagcaggagggctctggtcagcatggggccgtatagcctttgtcaggggttctccatctctctggctggctctgagatatcccaggcaactctgtgtcccggtctggcctgctcctctccccaaactgtggggctgcttctgtggtaaaagggcgagccgagccggcgcacccaccaggccgcccagggcagggaagagtccaggccgtctgtgtccccctgcatgtctcccacctcgcgcttcctgctaacgccgcctgcttcttagaggacctgcacctttcctggcactggccggccccagtcacgctcatcatcctgtgagatgccggctcccttcccarttcacccctaccytccatcctagccgagccccccagttaccttgattgcttcctttccggttcaggtggtccccaaaaagaaagagcgtaaggtggcttccgatgatgacatctctgagcaggacggggaggtgaaccggttctcggacgatgagrtcggctccatgaacatcaccgatgagatgaagcgcatgtttaaccagctgtgagtatcccsgtggcccgcacactctccgtttccccggattgcttgcacaggggcggtgaatgggaggcttgggctgagagtagcctgcagcactggaagaatttgaattcatttcctttttttttttgagacagggtctcactttgtcacccaggctggaggctggagtgcggcggcatggtcacagctcactgcagcctcaacctcttgggtttagggatcctttcatctcagcctcccaagtagttgggagcacaggcatgtgccaccatgcccagctaatttttaaatttttttgtagagacagggtctcactgtgttgcccaggctggtctcaaattcctgagctcaagcgatgcttctgccttggcctcccaaagtgctgggattacaggcgtgaaccactgcacacagccaagactcattttcaacatttgtaatttgggaaatttcatatgttcagcctctcttggaagctcgaggaggtcaggcattgctgagcctggggcacagttgacagggctggatggcagctgctgaatctggacaggcgcatactcttccattcgccagcatcctttatgttccctgtctgccattctcctgcctttccttcgaaagcttcctccaaaaaagcggtgggagaaggggtgttcttgcccatgagatacaggggctgggctgtcctctctctggacatgtctgtgtctgaggatgtcatgaacccagaaggggcaatggcagatgtggtcttatttgtaggctatttttttttttgagacagtctcactctgtcacccagactggagtatagcggccagatctcggctcactgcaacctctgcctcccgggttccagtgtttctcctgcctcagcctcccaagtagctggaatcacaggcatgcamcatgatgccyggctaatttttgcatgtttagtagaggcagggttttaccacgttggccaggctggtctcgaactcctgacctccagtgatctgcctacctctgcctcccaaagtgctgggattactggcatgagctacmattcctagcctgtgggccgttcttgagcagaccttaaccagacccacctgcactagtttcccttggtgggctggctgtgttgaccgcacggcttgcagaaatggctcctgatgttcgcttggagggggcttcacaaatgtcactttgctcactccagacgcccatcctaggagatggggtatcactccccttttgtagacagggaaactgagactctgagaggagaagggacttgggtaacaccactcagctagtatgtggctgagctgggattcagagccaggctgcctcccacgctagtacgctgtcagtaggaaacactgcttggggtggtggcagggtctgggctgggtatgatcagtggtgggcgagcctgctggygccagctcttagaagctgctatacccactccaggctcagtgatgtcatattagtaccttaaaatttgccattgcaggaaatcagcaaatgctaccaatcagagctctgggaggctctgccayctcccggaasccccccagagagggcatgctccttctagcagatgcctttgacatcatttgtttcaaaagcccagggcacgggctctcctaacctccctgcagagctctgaggctggctcagaattccatagtccagagctcactctgccyagccacttcattgtacaaatgagagaatggactcagaggggcacacagagccaggcccccaactcttggtccagtgctttgtcccccacgccatgcctggaagagaattctctcttctgtccctmttctaggctgacttttaaggtagacaggaggcagaggcagggttggaactgggtggggacaggaactcttttgcctgatacttcctggacctgccattcccttgaaacagaactgggatcggagctgtattttgggggtttgctatttaagggtgataaggagacccctagattcttgattcctcttttgataccccccatctcatattctcatcttttgctgcctgccaagaggggcttttttttttttttttttgagatggagccttgttctgttgcccaggctggagtgtggtggtgcgatctcagctcactgcagcttccacctcctgggttcargcaattctcctgcctcagtctccgaagtagctgagactacaggcacacaccaccacacccagctaatttttttttgtatttttttagtagagactgggttttaccgtgttgcccaggctagtctcaaactcctgtcctaaagtgatccgcccaccttggcctcccgaagtcctggaattacaggcatgagccactgcacctggccaataggggcttttggaaagaagcagtggttgggtctaggttttctgaacgttgccctgggcacttctgagccctaagacaggattgtatgtcccggagatcccaggctgggtccatgtggttaaattaaaggacttatctgaagaaattgttgtccctgcttttataaagtccccagggcattgttaagctgaccagcaatggagtgagctaaaaaggagacagatcagagtggaagccagggggccccatgggcaaaggctccagtgtgtagaaagagcattcagatccaagtcaggcgagactggctgcaggagtgggcgcctctgtgttgatagagctaaaktgggwtcagtatggaattcgatttagctggttgtaaagttacctaagttaaaacaaacaggcygggygcggtggctcacgcctgtaatcccagcactttgggaggccgaggcaggcggatcacgaggtcaggagatcgagaccrtcctggctaacacrgtgaaacgctgtctctactaaaaatacaaaaaattagcygggcgtggtggcgggcgcctgtagtcccagctacgcaggaggctgaggcaggagaatggcgtgaaccccagggggcggagcctgcagtgagccgagatcgcaccactgcactccagcctgggcgacagcgagactccgtctcaaacaaacaaacaaacaaacaaaamaacaacaacaacaacaaacaacgaaacctctgatcactttgatcaccccccacccccattctgcagttctgtgtgggccgccctgaccccaccccaggcggggccctgggcctttcccatggacrtctccaccagctgtgggcaggaccctagccaggctgcccctggccagatctgatgaagtgtttgaataatgcagccgtgttacagttgtgttttgttttgatccaagtcggttgtttgggcttcagaccaaggagaagagggggaacgtgtgggtctcccccgctggggccaaggctcctcctcagccccactccgcagatttgtgaagtggaggcctcttccgagtcccttctcttgcccgtctttctgtcctttccagcttcctgtccctcggctggggtttccttcagatcccagaygctgggaaggaagtgaagtcaggaattgagtgtgtgatgcagtgaccactggaccctggcggctccgggccacacggccctctccagcacccaccccctaccagctcaggaccctggactcggggagccacctatgggctcctgtgggaatggcttttggaggggagccggcccggcctgactccagggggcgctcgaggcagctttttaccagacggccttcttgggaccggcccagtccccaacccagtccattgggaacactcattgttgctctggaggatccaggaaggagttgagggagggcaggcaatggggagagccctgggatggcagcctggagacagggtccacattgtcctgtgctaccgatgcactgrgtcaagtgatttcactcctacagactcagccttccccttggaaataggggtatgttggatgagctgatctttaggtctcctccagttggggtaaccaakgcatcttgggaaccccttagtcccaggcaaacctgcctggttggtcaacctacttctagttctagccaatagggaggtcttgacatctcccaggctttgaattcaaatctcatttccagcatgtattggtctagaaggccactgaatccctctgagcctctgtttcctcacctgcaaawtgggaacgatagttatgcttacctcataggattgttttgagggtggaattgttttgagggcgttgcattttgctgcatgcttagtggctggtccagtgcccagcacctaatgggtgcttggggagtgtcttgatggggaggaaaaarctgtaggaaacagaaacattcggcattctagcctatttctgctacatgctagctgtgtggctttagacagttgagttatcctttctgagccaccatttcttcatctgtaaaataggtataataccaacctttccaaattgcagagaaratgatattatattgaacatctcactcaaactagaggctcaagaaatagctgttaaatgaatgaggaaaattgcaagattggacttggaggaaaatatctttagtcccaattaattaaagcctgacattamaaaaaaaatacacatttttaattgtacaagcaatacataaatacattctgcattttaaaagagttaaactccttttggataaggcgaatgtcccctttggcttactacccctgtctttcctgaggacagccttgaagctgtgtacctgctgggcagctgcccctttctgtcccctgtatgggtccctggagcctgccttctgttcagtcatgccctctggtgtcacccccacaggcgggagacstttgactttgacgacgactgtgacagcctgacgtgggargagaatgaagacacgctgctgctctgggaggatttcaccaactgcaatccgaccatcgacctgcagggcgaggtaagcccagcgcctggcttcccaaaggccaggactaggggtctgggggacaccgcctttcaatggtccctcatccctgttatttttctacagcccccaccacacagctaaactgtcccctttgggccaggcgcagtggctcatgcctgtaatcccagcactttgggaggcygaggtgggcggatcacctgaggttgggagttcgagaccagcctggccaatatggcgaaatctcatctctactaaaaatataaaaattagccaggcctggtggtgggcacctgtaatcccagctattcgggaggctgaggcaggagaatcgcttgaattcaggaggcagaggttgtagtgagccgagatcatacctctgcactccagcctgggtgacagagcgagactccgtctcaagaataaataaataaataaataaataaataaataaataaataaawaaaataaactgtcccgtttgttctatttccccagcaagaggaaaacttgggcaacttgatccatgagaccgaatccttcttcaagacgagagacaaggagtaccaggaaacgataggtcagatcgaggtgagggctcgggacgtggagcccactcgtgaggctctcctgaggtccacatggttgagatcctggygatcaaacacccatgtgtcatgggcaggggctggtagagtggggcaggcgcaggatcgggagtcaggaggcctcggggcgagtaatgtctttcttagggcctcagtttcctaatctgtcaaatgggggtggtgatccttgcctgcctcagagaattagaaagaatatatgtagctgagatgatcccataataaccacagagctgacattcgagtgatagtgagtgacacaaggtgctgagtatgcccggtatccttacctgtgccctatgcagtaggcaccgtgcaccccttttacagaggaggagatgaggctggaaaggaccaagtgacttgcccaaggccttgcggccaggaagcagcattgaagtataattctctctggctccagaggctgtgcatgtgatcacttctataaacgatagtyattgctattatgcaggagaaagggaagcccagctccttccctagaggaagtatcacttgatagaggacaagagtcagaaacatgaaaaagccttcaggatttttrtaatcrggtctggataaaggaacccaaagatgttgagttctcagaaccgggtggggtgcatcagagccaggctgctgctggggttgctaagcaaccattcccctttggccagaaggagttctaggggaagtggacccatgtgcagagagcagagggtgagggaggttgatgtcyggaggcagggtcctgatggcatggtgtccaatggtggccttgatggcaccatccctgaggaatccaggaggagaggttgccgaggcttctgycacgaggatgacttgccctcacccttattcctcattggttcctcccagctcgagctggccacagccaaaagtgacatgaaccgacacctgcacgagtacatggagatgtgcagcatgaagcgaggcctggacgtgcagatggagacctgccgccggctcatcaaaggctcygcagacaggtacccrcccatcctcccaggggattcagctatggcatccttggaggggaattcccaaggctgcaactcggccatgtgtcatgctcccaacctgtctctctgtccgtccatctgtccgtccgtccgtccatccatccatccatccatccatccagtgactattagcacacctatgtgccagatgccttacatatctaacctcatgcaagtcccaccaccaccctgccctttgttgattcaatagatacttgscaaaggcctgctctgtgcaagacggtggggccagtaagtatagcccctgccctcaaggagcttaagccccattttctgctgaaatggggagcagaggtggacagggcatgctcccatttgctcacaggaagtgatttcccttcctttcccatctgttagtctgttctcatggtgctataaagaattgcctgaggctgggcgtggtggctcacacctgtaatcccagcactttgggaggctgaggtgggaggattgcttgagcccaggagttcacagctagcttgggcaacatagcaagaccccgtctcaaaaaaaaagaaatgcctgagactgggtaatttataaaggaaagaggtttcgttgactcaccgttccacatggctgaggaggcctcaggaaacttatagtcatggcagaaggcacctcttcacagggcggcaggggagagaatgagtgcctagcaaaggggaaacccccccttataaaaccatcagatctcgtgagaactaactccctatcacaagaacaggatgggggaaaccgcccccacgattcaattatctctaactggtccctctcatgacacgtggggattatgggagctacaattccagatgcaatttgggtgggaacacagccaaaccatagcatcctcttccaacccagggcctgtccccaggagactgacaagtgtcaggcatggcacataaagcagagcccctgccttcaaagacacacagccttatcgggggacagccacgctgagaatgagctaatatgaggagaatgcctgccacacagcacaaatacgttgtcactgttttcctcgttttgctgcattactgtacgagagggagggacagctctgtgggggccagatctgtgtgcagggccgtagccttgcctttcagacctttaactcctcaaacccccagaacccagtgtggttatctccattatccagacagaagagcagaygctcaggcaggttaaacggtttgcccaagttcccccacccccagctcatccgagatagaatcagaactgcaccccagtgatgttaaccrtatcccgcatggcctccttttgagctctgagtcattcaggttttacttagcacctactatatgcccagacatgggttaggtgcttggagagtaacagccaaacttgatccacggtccagctcccaaggggctttcttcctagagaagccaacacagccagaccaagtaggggctggtgcagggggttacctcgtgagcttaaaggatcttaaggatagctgagtgaggcaggagctcaggaccaggcccctctgagagtagatcttatagaagtggcagctcagccttcccactccttgacccttcagaggcccagggctgctctctgaatttccccactctcttgtgcttctcaggaattcaccgtcccccagctccrtggccagcagcgactcaggaagtacagatgagatccaggatgagttcgagcgcgaggcggatgtggagcccatggtcagctgatgactgaggccctgcgagcctggtggtcttggtgatggggccctgccacctctcctcatggggccaggaaggcccctcggagtggggttcgaagccacaccacacagactttctctgccctcccttctctggaggcccygagggactgctgcttccttccttccttccacaccaccaacgggtgccccgtctccatcccccacccacccaaggaatggtgctgtcaatttctattgttctccacattacaaatgcagacttctgtgcggactttgcagtgttaactgtgccttctcccttaagctgagccactttgagctccaaagaattattcctagcaggtgtttttatacagaactctaagctgagggccgggccaaccggccgtggtgtaatgtggtttctgccgtccgtcccacctgctcctctgattggccatgggctatgccctcccttcctcctgagccagcccagactcggcctggagcttggggtgctctgccaacccccaggaaggagccgcttgcctctgtgagctttctaggcctgggtagggaccaccccaattttctcactccctgaaggagagaaaggtggaaggaagggaaggaggacacattttaattttttggggggatcgagtggcaaagttgaagggacaaggcactgtgaggggaaggcagagsctcactgtgtttaaactactatgcaaaaaacaaaacaaacaacaaaagcagcttgccttatatcattgtggaaggcaggacctctcctgggctcctggcttccccctggagctgggagagaggccggggttagggtgatctgtgtggcagcactgactgggtagtgtgggtttggccgaggttggtcatgaggcyggggttcccgcaaggcactggcctccctgaccgcttgctyccttccggacctctgggttcagggcgggggyggagggatccttgatttccctgataacttgatgttcttccctccctcgccagccaacaatagaggcttagagatctgtaatttctctgtgagaaagtctgaaggggccaggcctggtctctgctcccttctacccgccttgggttaggactgtccggcagttgcctgcttttggctgctggcaggagagaagcagggtgggctgctggcagtgcaggagctggagtgagggccatcctctttctgctcctcgacacacgcaagccgctctcagcagttccctcgactggccagtcggggtattgatctgagccagcatcccccaagacttgaatggcttgagtgggactgcrttgaagggcactgtgtggcccccttccaaatctcagcttggagccagctgagcaggctttgctttattattattttttaagcctactgcagtgggtctgttgccaattttaattttttattgtcccaggagctccctctagtggtcaaggtagcaaaatgtgcccaaggactagaacttgggtccctctgccttgcctggaggcagaaggagggggctctgggtttgactgggattgtggtccccaggggtccgtggcctttaaggctcttctctcttttctgtttccsccacctgtgttacagtcttaaaaatactgtacataaaagatatatgtagagagagagagagagcgtgagaatgtgttagtgactatgtgtgatgtaatttatcacgatttggtggccttcgtcatgagttttttcctttgttttcttttgctgggggcacctcccacgggtcccctgtggcagtctggctgtgacacttccatagtcagcatctcttgttagccaaacagttccctttgacaggtacttggagggacaatggttttggaagagagacggcccttctctctcctcactcacccttgttctaaaggttacagggttcaaacatacctgattcttgttgttattgttgttgaatttttattttaaccaaaggttatcagagccagttgggcttggacctcagctgctaaaaagattttccgtttcctcgagggcaggaaaacatccaccctcgtgggtctcctccgtccagggccgagggaggcattggayaatgtggtatgggagtttcgtgggcagcgtggaagccggccctgggttgttccccaaggtggtgggagggtgacagatatatctttagacttaagactgtaaggcagcagtgttagcatgggagtaactaaggttactgtggttatcggtgtccggcggtattatttttactttcctccttgtatacataggtcatttgtctttgaggactagggtactctagggagtttgaaaactgcaggagccagaaagagatcctggcctgagagtcccytcyggctggcttttaatatctgctctcctcttgggagtgaggacttggggcaggtgggtaggagagggaaagccagagtgtgatgggcctgcctcctgggctggttcctgggtccggcctgcctgcctgcctgcctgcctctccaccacatgcttttttcagttaatgtcagtgggccctgcttgtcccctcaccatgagcccacagcttgccaagaaagaccccaacgctcgctggggcagcaccagtcctagctgggacgaattggtccatcctytgtaaagctgtaaatrcttaattttgactttctatttctaagcccagtgtcatattgacactggtattttagaattttctcagatgggctctcctgcgctgccctctgtctcctgtttttgggggttttatacaaacagaggattggggagggataggaagactagcatccttttggctccctggttggttgtgaaatacacacacacacacacacacacacacacacactcgcactcctctgagactccgaacagagaaaaaaattattggcaaatcaacacatttttctttctcgtcttgagaaaatgtcttgaggtccctgaagggccaaatccatcgtggactaactctgtgggtagagctcagatgacctagggagaattaaaccacttamgcttggagtgggaggagagggggtggggtgggggagaatataagatgtaacttaagctaaatgtaatctatttataaagcaagagactctcatctatttttatgaaaggaagggttttttaatctagggtaggcagttgtggtagcccagcattttcctgtggacgagacatggtgcatgttgttgctggattgaatggaacccattcctgtccccyggcctcgtcttctgtcctcacttttggtcatccacacccatgagcagcttcagcagagtgtaggtcccacttcaccccattctcctctcctctgacccctcagctccttggaagtcttggggtggggatctgagggggtgggtgggctgcaggaaattcagaaatgtggtgggtgggggaagggacaaggcgcattagggagggaacaagctgggctctggggataggctctgattaattagttactctgactctggtctgccgagatccatttccaacccagttgcgttgggagagggttgggaggcagcagagcatgggtracagtgggagcacacgacttccttggagcctgggcctttgcgggtcccaggtggtcaggcagctggagcaraagtggaaatggcttaagatgctcatagcccagccccggctgtgtctactccaggccaagcctgggctgcagtccttgctatgttccccccagggccctgrggggagggatcagggtgctgggggtttcctaggacaggggtcttcccccttgagacaccaagctctggctctagaagagctctctcctggagtggggagtctggaggggactgggtgggtgcaggtaaagccagattctctctggaagggaattttctakgaatggatgatttccaggctcagggtgggctgtgtgttagttctgagcaaatccctcaccaagacccttccctcccaagccctcaaagaaatgaggcaaagcccttccctgcaagaccccttgtggaygtttttgcatctacctgatttttagccccacccagggagactttataccccatgatcctgccccaccgttgctgttgtctgccagctgggtctagcatcacagggaagggggggatttatactcayggaaagactactgatcctaccggaaaccaacctgtttactgtactgttgtaaatatcatgccctttatatcctgtatattggcttcttttaaataaagtgaaatgtcttagaactgatggtgcttttttttgtttttgtttttaaacagaagatgaatctggtgttgggggaggggtaggaggacggaaggccacagaaaccctcaaactcattagttaattagccataaaataggggatttcatatcacctgttacatttgtagctcacaataaaagctttggaagatgacaaagcaggaatcattacacacattttactgaaggggaagagaggacatgagacatcacaggctcagtaactggcttggcctggtttggaactgatgtccttttaaccacaaagcccccatttttccaggctctccaacgtgcccacaggaggtcaccttcccaggctctggatttgacagtaaccaatgttctagtttttcttgtcaatgggcatgttcagggcaacattgcccaaatgtgaactgagcccacctgtctagggttttctccaaaggtgaagacaaatagccgccaccaattccaatttgctttttgccattcctaatacttggcayttaggtaatctccctctcctactcttcatttaaatgtttacattctcccaaagtacctcaaatggtgtaatctggagaaaaataagtggcttaagatcacgggggctttgtgagttgggtactattacttccgttttacagatgaggaaactgaggcccggaaaggatatgtagtctgcctagtgccctgcttgaggaaccaaaatcagcatgggaactgactcctaagcaggtgcgcggttcatgctgctggaagaaatataaacaaattagaacagagagtaaggaaacgtaacattactttaggaatagattgggtccctgagacctcgtcatcagagaagacttcagaatccaagttttaaatagcattctagtgtttaccaagcacacaacattttgcaaagaaagctraawtttttacttgggggtaaaaggctcaggaacaactggttttgcggccaaaggctttaaatgaaaagctaagcgttggccagctcaggttttatcttgcattgatcgtaatctgcaaggaagctaagaagctggccggccccgcgcctggagggtaggtggagagcggctgggtcctggccaagaagctggaaggcaggctcattccaggggccgcagcccccgggaagaagcagggggctggccgcgctgtggccctgcggggtcgaggagtctggtagcggacaggtttccagccttgtacaagccaccggcagcccgagagaagtcagtcggactcccaycgaacccggggcscacgccagagggccggrcgcagcgagtccttctgccccgcttcagcacgtgtcccatttcggttatctcattggctctattcagcccctctctgctccgctttggaaggctgccgcaggaccgccccgctgattggttcagaagctttggtgtgtcactctgactggtcgacagagttcacgccctctctcccgggtcataccataaagagaggaggggaaaacgcatgcatttcaggacttcgctttcgggttcccttgtcctgtgttgtgtaatgcccccgttatggcactagaaatattttttattagccgaagctaaatatagtgggactttggctgatcccgagctcggaggacagccggggtgatccgtttccccccgaggatcgaggtggtgcgctctggacggggttgtgcattctcgccgcgcccgggcggacgatccagcgaacagccccgcttctarccmgagatgctgctgccggcgcccgcgctccgccgcgccctgctgtcccgcccctggaccggggccgggtgagtgagcacggggcccggggcggcccgagcgcgcgcctggggcccgggagcctgagagtcactgggcgtcccccgcgccgcactccctccctgccggacccccaagctgcctcggtcaacgccgggttcctcaggggctcccctccgwcccccacccaggcctttctcccactgagatcccttagcctcctccctcaggtagtcaccttcctttagcgaggggacccctcttcccgaatcctgcgaccgagtagggtgcctcggtggccctgccggttcccacgctcggaaagtagcctctgtagtcactcacctcactcctaatactggatcttcgcaatttgctggcttcccctgaggggcccttctatttttagcacaccacacatctcacttccccaccctcgtctcacgttcagtgtccccatcccgccccggattccccgagtcctctccttctaccaggatttctacctctctcttttccgctccccacacaccccgccgcccgtttttttttttttttttcaagttaaatgttggacagaaaaaaggattcctttcttcttgtaggtggaataatcatatttatagagtgcttataatgaaccaaatgctggccgggca

SEQ ID NO: 1642 - DNA, 45938 bp, Homo sapiens
  misc_feature (1)...(45938): n = A,T,C or G, or insertion/deletion polymorphism (see Tables 1-2)
tggcgcaatctcggctcaccgcaacctccaccgccccccacccacccagttcaagtgattctcctgcctcagcctctcaagtagctgggattacaggtgccgccaccacgcccggstaatttttgtatttttagtggagacggggtttcaccatgttggccaggctggtctcgaactcctgacctcaggtgatccacccgccacggcctcccaaagtgctgggattacaggtgtgagtcactgagcccagcctctttttttttttttttttttttttgagatggattctcgctctgttgcccaggctagagtgcagtggcgtgatctcggctcactgcaacctccacctcctgggttcaagcgattctcgtgcctcagcctcctgagtaactgggactacaggcacgtgccaccacgtccagctaattttttgtgtttttagtagagacaggtttcaccgtgttagccaggatggtctcgatctcctgaccttgtgatcctcccaccttggcctccaaaagtgctgggataacaggcgtaagccactacggccagcccgttatttcttgattatatgctaaacaaggggtggataattcatgagttttctaggaaaggggtgggaaattcctggaaatgagagttcttcccctttatagaccatatagggtaacatcctgacattgctatggcatttgtaaactgtcatagtgctggtaggagtgtcttttagcctgctaatgaattataatcagagtataatgagcagtgaagacgacctttcatcgccgtcttggttttggtgggttttggctggattctttactgcaacctgttttatcagcaaggtttttatgacctgtatcttgttccaacctcctgcctcatcctgtgactaagaatgcctaacctcctgggaatgcagcccagtaggtctcagctttattttagccggcccctattcaagatggagtcactctggttcaaacacctctgacactgactctttaaaaaaaaaaaaaagtgaagggtacagtactggagtcagaatgctttgctcaaattcttctgatggcacttattagctatgtgagcatgggaaaataattttatgtctctaagccttgcttttctcatctataaaatgcgaataataaaaatacttcccttagaagaatgaaatgagataatctactgtgtcatgcacagagtaaccacataccgcctcaatcttttttttttttttttttttttttttgccctgagacttagcagttgaagatagaagtgaaagattttctctgtaggtctgaatataaattcctattccttccatatccagttataaagggttgcagctacagccctcccacgacatttctattagaaataaatcagattaaggcctggctcagtggctcacgcctataatcccagcactttgggaggccgagatgtgcagattggttttgtttgtttgtttgtttgtttgtttttaattttgagatggagtctcgctccatcacccaggctagagtgcagtggcgagatctcagctcactgcaagctccgcctcccgggttcacgccattttcctgcctcagcctcccgagtagctgggactacaggcgcccaccactgcgcccggctaattttttgtacttttagtagagacggggtttcaccgtgttagccaggatggtctcaatctcctgacctcgtgatccgcccgcctcggcctcccaaagtgctgggattacaggcgtgagccaccgcacccggcccgagatgggcagattacttaaggtcaggagtttgagaccagcctggccaacatggtgaaactccgtctctaccaaaaatacaaaaattatctggtcatggtggcatgcacctgtaatcccagctacttgggaggctgaggcaggagaatcacttgagcccaggaggtggaggttgcagttagctgagatcacaccactgcactccagcctgggtgacagagcaagactccatctcaataaataaataaataactacataaatacataaatcagactagcctgggcatggtggtttatgcctataatcccagcactttgggaggctgaggcaggaggatcacttgagcccaagagttcgagaccagcctgggcaacacagtgagaccccatctctacttaaaaaaaaaaaaaaaaaacaggtgcagtggctcatacctgtaataccagccagcactttgggatgccaaggcgggcggatcacctgaggtcaggagttcaagaccagcctggccaacatggtgaaaccctgtctctactaaaaatacaaaaattagcctggcgtggtggtgggcacctgtaatcccagttacttgggaggctgaggcaggagaattgcttgaacccaggaggcagaggatgcagtgagctgagatcatgccactgcactccagcctgggcaacagagggagactccgtgaaagaaaaasagacagagagagggagagagagagaaaaatcagactaactgttttattttgtgctattgaatttaggtgctgaaaatatcaacaaaataacctgttgataaaacaaagtctagtttatccttactgcagtgagaagagcactactttgacagarttgtggaggctcaaagtagggagcacatagtggtatatactgagtctttgaaatttggtttaartgtaggctctttcaatgcgggttgggggttgattaggatggggtaaggatcatgatacaatcatttaggactggtagacacaacagagtattttgaggccagcggttgtataaacacccaacgagttcttgtccactgctcagagagagccaatttatcaagacggggaattgtaatagggaaagagtttaatacccatagagccagctaaatgagagagcagaattttattattattcaaatcagtctttctgaaaatttggaggctgggttttttaaagatagtttggcaggcagggggctagggaatggatgctgctaattggttggggatgcaatcacaggggtatggaaaatatttcttgtgtgctaagtctgtttctgggtggggagtcacaggaccagttaagagtcctgggttctggtggagccatctgattgtcagaaatgccaaagtctgaaaggatctrtcaagaggccaatcttaggttctacaatagtgatgttatttatgggagtaattgggaaagttgtaaatcttgtgacctccagaataatggctggtaatcatttaactatgccaacacgttagcagaattcaggcccctctcataattctaaatctgtggccttttattagttttataaaggcaagtttggtttttttttatttttttctttctgagacaaggtctcgctctgttgccaaggctcgagtgcagtgtgcaatcactgctcattgcaaactcaaactcctgggctcaagtgatcctcctgcctcatcctcctgagtggatgggactacaggctggagtgcaaaggtgcaatctcggttcactgcaacctccgcaatcttggttcactgcaacctctgcctcctgggttcaagcgattctcttgcctcaccctcccaagtagctgggattataggcgcctgccaccatgcccagctaacttttgcatttttagtagagattgggtttcaccatgttggccaggctggtctcaaactcctgacctcatgatccgcccgcctcggcctcccaaagtgctgggattacaggcgtgagccgccatgcccggccagccttcatttttaatttactgaaatagttatcatgttaatgtagacaataagctgtgtgggtgcagatggttttcattctcagtgcttttagaaaatctaataagtaaaattaagggaaatgtatccaggatactgagggcacttgtccctgcagaccgagtttaaaatggaagatattattttggtaactcagaaggtgatttgaactttagacggatgacccacttcctggcttactcatcatttcccaccatcygttcatctcagttgaatgccaccagtcttgtgaggaagcagattaggaatgctcattcccgctgggtgtggtggctcatgcctgtaatcccagcactttggaaggctgaggctggtggatcacaaggtcaggaattcaagaccagcctggccaatatggtgaaaccccgtctttactgaaaatacaaaaattagccgggcgtggtggcgggcgcctgtagtcccagctactcaggaggctgaggcaggagaatcatttgaacccgggaggtggaggttgcagtgagcccagatcatgccactgcactccagcctaggcgacagggcaagactctgtctcgacaaaaaaaaaaaaaaaaaaggaatgctcattcccctgcctgagatggcacagaaaaatttctttccacatttaaacagtggaagaaggggcacttccaaatttaatctttcatagacagcatatacagcatttaacatcttctggatgttaaagaaaaaaatattctgaaacttgttaaaatggcaaggaagaatttattcaggaccaaaggggagattatgctgcactctgaatacaataatgacaagtgggatttatagccaacaagcagagtgaggggtcactgcatggaaaattactaaaaggagattcttgttaaaccaacttaacaggactcttgttgaaggcaggccagggttattagatattaaggatgggggattttctttaaattgacttagcagaattcttttcttactgagtttattctttttttttttttttttttttttttttgagacagggtctcgctctgtctcccagactggagtgcagtggtgtgatcatggcttatggcagcctccacctcccaggctcaagtgatcctaccacctcagcctcctgagtagctgggactacaggggcccaccgccacacccggctaatttttttattttttgtggagacagggtctccctatcttgtccaggatgatctgaaatttctgggctcaagagatctcccacctcggccacccaaaatgttgggattacaggcgtgagctactgtgcctggccatgagtttattctcttttttctttttgagacggagttcaaggccagcctggccaacatggtgaaaccccgtctctactaaaaatacaaaaaaatgagccgggcatggtggcgggtgcctgtaatcccagctactggggaggctgaggcacgagaatagcttgaactcaggaggcagaggttgcactgagccgagatcgccccgctgcacaccagcctgggcaacagagtgagaccttgtctcaaaaaaaataaagactcttcgtgaagtagtgttaagtggacccaggagaaaaatgaagatgacctcttaatggcccttcaaatgtataaagctttctcattcagggaagaaagacataaagatgtagcccaggcgcgatgactcaggtctgtaatcccaacaytttgggaggccgaggcagctggacctcttgagcccaggagttcaagaccagcctaggcaacatggcaaaaccccatctctactaaaaatacaaaaattagcctggcgtggtggcgggcgccgtatgggcaccrtggttgtcccagctactcaggaggctgaagtgggaggatcacctgagcccgggaggtcggggctgcagtaagccgtgttcgcaccatggcactctagcctggacgacagaaaaagaaaaaagaaataaaggtataaaagaaaaaaaagaaaagtaaacagcttcttccaggggatgaagtaggtttatttcggtgagattgctgctcagracttaggagagccatcaaaggcagaagaccgctcctggggcccggtcacctgaacactacaagtcccagcaagcgccgcgcgggggcggggcttgctgaccgttgtgacgtgtgggcggggcaggcgggwcgggctctcccttgggtgcttagccccgcccccgtcccactctgccctgttgctgtcgcgccgctgctggttgctgtccctggtgagtgcctcaagtggaaaggggcagttaggccctcggggtgcccacattcagacttgcagtcctgagaaggggccacgggggtagaggtgtggcaagtttcggttctcaccgcagttcaccctctggggtgatagtgggagtggtgttctgaaggccctggagcccctcccgcggcccgggagggttgcggggcagttttgtcttgcggagggcagcgctgcagtgctgtgtggcagggtgggaggctcctcgggaagaagtgacacccctggcggcggcgagggtcttgaggcggcrgctgccgccccacgggtcgtggcgtcccgtcccctcccgcgggcccaggctgtggtggttccgtaatccctcgcctggatgtcatcgccgttggcttcgaggcggaggtggagccttgttgcgtcaccctgagcaagttactttctttttgggcctcagtgtccccctttacgagtaggtttgatccctgaagcgccttgccttttgcatgctgcagctgtcggagaagacgttctaggcaggaggaaagacggtgtcgtgacctgcctctacagttaatccattgcccctccaccactgacccagcttagtttgggagctaatgttcccactcgtatattatttcaaccccactggacgtgttaactcttttctatcacttggattcttgcttcacatgcaagccaacaagtgaccatggttggagctgagtaaaatatggataatataacttattctattattggaaacaccattgcaagtaaaggactttatgtggtaggtctttgtagcttgtggagaatacatgattaaggaatatccagatggctcagtttcccaggtattttcaagggacctggaaactctatcctttggcagacatgacagctgtggaatggaaagggccttgaaaaaggtagtcgataatcctgagttacctggcactaacaggtcatattgtctttcgagtcagatagtacatctgtggctctttaaaaatttaatttggctgactaggcgcggtggctcacgcctgtaatctcagcactttgggaggcccaggcgggcagaatcacctgaggtcaggagttcaagaccagcttggcaaacatagcaaaacgctgtctttactaaaaatacaaaaattagtggagcgtggtggcgggcgcctgtaatcccagctacttgggaggctgaggcaggagaatcgcttggacccagacagcggagggtgcggtgagccgagatggcgccactgcactccagcctgggcaacagagtgagactccgtctcaaaaaacaaacaaacaaaaatttaatttggcagtatgtattgatagaatgtcatgtatccttaattatttttagatgaaaagagagttaaatgaactctttcacttcttttttccttcacttaggatcatcattatatcaggcaaggtccttgaagattttctagccttagccatgcattttgctgatgaggaaacaggccagaaaagggtactgtgacttggccaagctctcagagtggcagaactaagataggaacccagctcccttggctgttagcctagtcccctttccaccacacttcaaacactgtcactgcccatgtcacagggacatggcatgttagaatcacccctgtcaagggaaaagtggatggtctcagtaaaatggagattagtacacagctttgagcctttcagagtttccagttgcccgcacctgatgtcccagaactattttttccatcttcccctagaactggcgccagcactatggtggtgtggatgtgagatgagggcctgtttagaaaaagctggacagcaaattcaaacaattgttaatgagtagtaataaaggcctcctggggtgtaaaatttttgtaagacactctgaaacattttcatattttaggtaagggtctagaattaacttggaaattttgggctagagcaaatggctcgataatttgaagaccagtgattgtgtctttgcttttgctacctgtttcagggccatctacacacacccatagtatccactgctggtattctttaaggctggttatgtgtaagcatttctgccatrgccagggagaaacgggattcaaatcaattcatccatttttgctaattgctaatcgtttagaaagaaaagtaagcagaaggccgggcacagtggctcacgcctgtaatcccagcactttgggaggccaaggtgggtggatcacgaggtcaggagttagagaccaacttggccaacatagtgaaaccccgtctctactaaaaatacaaaaattaaccggacatggtggcacatgcatgtagtcttgggaggctgaggcaggagaatcacttgaacccaggagacagaggttgtggtgagctgagatcacaccactgcactccaccctgggcaacagagagagactctgtctcaaaaaaaaaaaaaagaaagaaaaaaagtaagcagaaagataaaggaatccaattaaattgggtttgacttttatctttgtttttactgttctcaaatgaagaattgatttgcatgtctttcttgcctgtagaagcatttgatttccttctgtgaactaatctgtagtcttcatttctcttgaaatatatgcccactggtataaaaaaggctaatgtaaacatgttggccatttaaaaaattttctgctaaaaaacctatcagtgtagtttgcagatgcagttagaaagagcagaagtaggctgggcacggtagctcatgcatgtaatcccagcactttgggaggccgaggcagatggatcgcctgagtccaggagttcaagaccagcctgggcaacatggtgaaaccctgtctctacaaaaatacaaaaattagccaggcacwtgcctagggtcccagctactccaactgaggtgagaggattgcttgagccagggatgtcaaggctgcagtgagccrcattcatgccattgcactccagcctgcaagaccctatgtcaaaaaaaaaaaaaaaaaaaaaaaaagcaagagcagaagtagaacaggctgctgttccttttcttcaggaagacataagaggatctatgtcctcatggaacagccctgggagtagtatattaggcttgaaaagctcattagatgaagatgtgtcaggttttcttggaagctaggagacagttcaggggactcatttaaaaatactttcccattattgcctgctcctctgagggccctaatccttttggaaactgagctgaaaaaaggtaatgactatgtcagaggccaaataaagttgcctctgacagtttgtggaatttgtgcattattttacccatgcttgatagttttgtttttgaaaatccctatttgttttctctgttcattccttatgtggccaatctttgatttgagggttggaataaggaattaggtaaaataccactttataatttctaggggacctagctcgtcccactaatttttcataactcagcagttctctgggcttctaaatttaacttttgctcttatatttcttctcttttctttacctctatgaattgctgccaagttagaaatggatggtagacaggttctatagtgggaaaggtggttaaaggaggggaagttgatgcttaagtcattttaattttcatgggccaggtgtagtgactcacgcctgtaatcccagcactttgggaggccaatgcgggaggattgcttgagtccaggaattcaagaccagcctgggcaacatagggagaccctatccctacaaaaatacaaacattaggtgggcatggtggcgcatacctatagttccagctacttgggaggttgaggtggagggtcacttgagcctgggaggttgaggctgcagtgagccatggctgtgccactgtactccagcctgggtgacagagtragaccctgccccccccgcaaaaaaaataattctctttacatrtcttccctcccctgtccacaaatactcatttctagactactttgtcagaaaggtaatttcccaagccattgttggagcccatttctcccaggaattttatcactgggaggaaggraagactaaagattactgacctkaaaactcagtagatgccctccctccaggaaaagctggaatacttcctcactgaccaagttcgggttggcatggttatgttctagtttactcatggccctttgtgtccacagcttggtaaaaaggagagaagagaagccactgctgttctcatctacttgcctcctcaaacccttccccagccttggcagaggagaattttaaccttatttcaagaatgattgagttctcaatacctcacatgccattggatgccctctgagtcccttctgggaaggtgatgagatttctgaaatgggaaactccatggggtcttttgcatttttgataagcaaggaaccaaagctgttcacttttccagacagattattaggttttcaggtgaatgaaaatagctagaatttcctttgactatacactcaagcctcagaacatgagctctttcgtgttgtctatatatgtgctgtcctttcttaagcgttctgcttatgagctaacttagattggttgtttttcttttcttttcttttyttttytttttttttgagacagagttttttgctcttgttgcccaggctggagtgcaatggcataatctcggctcactgcaacctccgcctcctgggttcaagcgattctcttgcctcagcctcctgagtagcttggattacaggcgcctaccaccacgcccggctaattttttgtatttttagtagagacagggtttcaccatgttggctaggctggcctcgaactccttacctcaagtgatccacccacctcagcctcccaaagttctgggattacaggtgtgagccacggcacacggccagattggttgtttttctggtaatgaaagagaaactataccaagctaccccatgcccttagctggtcttgcctttcagagtagcatccattttcacaacagcttgccagagtttgagtgtgtgtaaggtaggtaatggagtgtgaatttgatgggttcttaaggaaatcaaatctgttccttttggttttttggcaccatgccacttgaaccagccatgccagctgaaccagccataccaagaagtgacttagcacttggagattatcatctcctcaccctattttagaaaagagaaagctgagaaacagcagtttctccaagggtcaacaacaaattaagagggcttaaaaaaataaaacatacacactcttagccccagagtcacccttaccattgtttacctacaaagccccttccttttttactttttgatgaatgatgtgcatatcttgttagttcatttatccaacaaatacttaatcagtgattactacaccttaggcattgtgttatgtatacaatggtgatagtgttgtgaaggaaaagaaatggggataaggtacttggtacctgtgtacaatgagggtttctcttggatgctatgggagaatgggcagggaggtttctcagcttgcagaccctttatttccaagtggtctactgacatatggaggccagcgtatgaggggcagtcccggaagtcactcttttttttttttttttttttggagatagagttttgctcttattgcccaagctggagtgcagtggtgcgatctcagctcactgcaacctccgcctcccaggttcaagctattctgcctcagccttctgagtagctggaattacagatgcatgccaccacacccagctaattttttgtatttttagtagaaatggggtttcaccatgttagccagcctgctcttgaactcctgacctcaggtgatctgcctgccttggcctcccagtgctgggattacaggcatgagctaccacacgcagcactcagaagaacactcagaacactcttatctgagtgttcttcatgatccgcaaaggacaagttaagtaattttacacgcacagataaattggtgctccaggcttaggacagagggatatgctggcctccatatgacggtagaccacttggaaataaagggtctgcaagctgagaaacctccctgcccactctctcatagcatccaagagaaaccctcattgtacacaggtaacagtttattatagggaaaaatcttgacctagactggaatgtgaacattcccccaccgttgaaaaactcttttgagccgggcatggtggctcatgcctgtaatcccagcactttgggaggctgaggtgggtggatcacctgaggtcaggagttcaagaccagcctggccaacatggtgaaaccccctctgtwctaaaaatacaaaaaattagctgggcatggtggcgtgcacctgtagtcccagttactcaggaggctgaagcaggagaattgcttgaaccccagaggcggaggttgcagtgagctgagataccgccactgcactccagcctggggaacagagcgaaactctgtctaaaaaaaaaaaatggaaagaaaaacttttgaggtttgaggttgaggatgtggctaaactgtgtcacaaaccagaaagtcaatgcattttttagttccttaactcaatttcaagaatagacagtttagtgctccaaagtcctgttgccttctttatgaaaaaactgacttctggggagttggaagagcaggcctggttgcttagacttcaaagtaaaaccagtaaatagataggatggggctagaataagtattatggttgtttgggaggtcttgtttttttggttattgtacttayttatttttaaaaattatatgtgtgccagccgggcgcggtggcttacattgaagcaggaagagccacagacaaaactcctcagacaccgagttaacgaaggatggggtttattaggccgggggcatcagcaagactcctgtctcaagagctgagctccccgagtgagcaattcctgtcccttttaagggctaacaactctaagggggtaygcgtgagagggtcgtgatcaattgagcaagcagggggtacatgactgggggctgcatgtgtcggtaattagatcgtcacaaaacaggatagggattttcacagtgcttttctatacaatgtctgtaatctatagataacataaccaattaggtcaggggtcgatctttaactaccaggcccagggtgtggcgccgggctgtctgcttgtggatttcatttctgccttttagtttttactttttttttctttggagacagaaattgggcataagacaacatgaggggtggtctcctcccttaatgtctgtaatcctagcactttgggaggccgaggtgggctcatcacgaggttaggagatcgagaccatcctttctaacacggtgaaaccctgtgtctactaaaaattcaaaaaactggccgggcatggtggcaggcgtctgtagtgccagctactcgggaggccgaggcaggagaatggcatgaacctgggaggcagaggttgcagtgagccgagatcgcgccactgcactccagcctgggggacaaagcgagactctgtcttaaaaaatatatatatatataacaattacatgtgtgcctgtatgtgtacacaatcttccagcatataccaatagctgaatttgtaagatattatatagtatttgcatgtgtatagctctttcttcatcttctgtgtacaactgaaatatttttttcatgtcctagtaaaaccctaaattgagaattacggactcactaaatgttagaccagctagtcatttagaaaacagtgcatgtgatttgtttaaggggcaggaagtattaggtgtcaacaattaaaatcactttgtttcttttttttttttgagacggagtctcactctgtgtcccaggctggagtgcagtggcgcaatctggcaatcttggctcactgcaaactcggcctcccgggttcctgccattctcctgcctcagcctcctgagtagctgggactacaggcacccgccaccacgcccggctaattttttgtgtttttagtagagacggggtttcaccatgttagccaggatggtctcaatctcctgacatcatgatccacccacctctgcctcccaaagtgctgggattacaggcatgagccactgtgcccggcccactttgtttcctttatgtactgtttttgactccaaaatggtttctctttttttttttttttttgacagtctcactctgtcccccaggctggagtgcagtggcatgatcttggctcactgcaacctctgcctcctgggttcaagcggttctcctgcctcagcctcctgagtagctgggattacaggtgcctgccatcgtgcccgggtaattttcgtatttttagtagagacagggtttcacaatgttggccagattggtctcgaactcctgacctcaggtgatccacctgcctcagcctcccaaagtgttgagattacaggtgtaagccacagtgccyggccttttttctttgctttgctttgcttttttttttttttttttttttttaracggagtttcactcttcttgcccaggctagagtgcagtggcatgatcttggctcactgaracctccgctcccaggttcaagcaattttcctgcctcagcctcccaagtagctgggattgcaggcatgtgccaccaygcccagctaattttgtatttttagtaragatggggtttctccatcttggtcaagctggtctcgaattcctaamctcaggtgatccacctgcctcagcttcccaaagtgctgggattacaggtgtgagccaccatgcctggctttttttgcttgtttgttttaatagagacagtctcactatattgcccaggctggacttgaactcctggctcaagcaatcctctcacctcagcctcctgaacagctaggactacaggcatgcactaccctagtttcctatttcgttgttgttgttgttgtcattgttattgttttgaggcaggggcttgctctgttgcccaggctggggtgcagtggcacaatcttggctcgctgcagcctagacctcccaggctcaagccatcttcccatctcagcttcccgagtagctgggactgcaggtgagcaccaccacgcccagctaatttttgtagttttctgtagagatggggttttgccatgttgcccaggttggtcatgaactcctggactcaaaagatccacccgcctctgccttccaaagtgctgggattacaggtgtgagccactgygcccagccacaactttcctattcttgatcacattttatctgtactataacctagaaaggtgaaacacagtgtattatccccatttatagctagggatccaaacttgtttgctgtcttccaaatgtgggttgcatttttctgtttctttgttgttactcatgctgtttcsttcacctagaatgccctcaytcaaaaactcacttgtcgaaatcctaatcctctttgagggctaatctaagattcttctcattccttgaagttttctttattttcctaaccagttgcatctctccctgttttgaacccgagagcattttgcacttcttattcgattcatttggcagtcatttgtatactcctctatcctctctattggattgggaccctttttaaggttgtaccaggaaaaaaaaacccacractacaacagtaataactatataactaactataactaacgtctcttaaaccctttatgcagactctgtgctaagtactttgtcattcaacatgcatcaactttgtgtgaagtgcctacaatggcagacactgatttaagggctggacatcttacattatttcacttatgcctcacaaaaaactaaatggggtagatgttatttttagccccaatttacagataaggaaacaggcacagagccagcagattatataaattgcccaatgccacaaatttaataggtggtgaagctggaatttgaacgccaccattctaatttagaacccatgcttgtcactactgcatgtcaaataattttctctcattcccatccccaggtcctagcagagtatcttatgtatggaaggtcctgataattataggataaatgggattgaatatagaagatgaaatccagagagatggactttcctaaagtcatagggcttgttgggatgaaaaatctagaatttaacrgttcccagctcaggctattttatctaggctgccttgcttatttaagtcatttrgagaaaggggaactaaagtagctataagcctctgttcatgtgagggttgtggtgcctgtggtgaagaagttaaagatattgtcagaaaattctcgtagcataggaagttgtgactgagatggctcgaagtgaaacagaaagcaagttgtgtaatctcagtatttgtcaggattttgcttttcctgacttgctttgcacagaatrttccctggatgaaagcccagaaatcaccaacatttcagacaatgctttctgagccttactctgttccacatttcataacaggacccctaccatggaggagaccatcaaagatccccccacatcagctgtcttgctggatcactgtcatttctctcaggtcatctttaacagtgtggagaagttctacatccctggaggggacgtcacatgtcattataccttcacccagcatttcatccctcgtcgaaaggattggattggcatctttagagtaagtggttaattcagtaccaagtgatcaggaactagaggtgattcttagttacctaactgtgtgactctctgtgtattataagcattttgtataatatgtgttggcagtttttaaattctagccaagctccacagcacttctctcttcacacattaatgtgtgctgtgggactcaaattttcatttcagtgtcaagctaaaataagatggcaaatcatataatcctcaaattttgttatgcttttttttttgcttttttcttttcttttttttttttgaaatagagtcttgctctgtcacctaggctggagtgcaatggcacgatttgtctcactgctacctccacctcccgggttcaagcagttctcctgcctcagcatcccgagtagctgagattacaggtagctgccaccacatctggctaatttttgtatttttagtaaagacgaggtttcaccatgttggccaggctggtctcaaactcctgatctcaggtgatctgcctgcctcagcctcccaaagtgctggaattacaggcgtgacccaccacgcctgtccttattatgctgtcaaaaaccaaatataaatacttgcttcttgttgttgagatagagtcttgctctgtctctcagagtggagtgtagttcactgcagcctcaacctcctcccaggctcagtgatcctcccacctcagccttttcagtagctgggactacaggtatgcagaacaatgcctaacaatgcctaactgatttctttctttttttttttttctttgagacggagtctcattgcccaggctgaagtacagtggtgcaatctcggctcactgcaacccccacctcccaggttcaagcgattctcctgcctcagcctccagagtagctgggattataggcgaatgccaccacaccctgctaatttttgtatttttagaagaaaccaggtttcaccatgttggtcaggctggtcttgaattcctgaccttgtgatctgcccgcctcagcctcccaaattaaatgctttttacatgatcctattttgaaatatttatgtatgacttgactgagatggctgacctcatatgtcatttctgagactaaacattacttccttacttggtatgatgtttagtttgttttgatacaaatacctcaaatctggaaaggatattgaggatattgacatcctgtatccaaaaagtttattcctgaataagtgcgtctgactactttataatgatttccaaggacygaaagtttatgagctctcttagtgacctcttccagtgtctgatcaccccgtcagttcaagtacagaatggtatttttaaattttaattagcttactctctatgtcccctttgccctcccatccgtgtctttccctcttatacatctcacatacaccataatgacaaatcttcttatttccagagacaagaaataaaggtcaaatttaattaatttacactgccaactcccaacgtcagtgacctttggtttgacacctcagtatgtcatgtgcctatttgccagtgctattcatcctgaaatcagacaccattctcaactgcactgtgaaggagctgttgcttatttatatccttcattgaattccttttccataattgtttggaacatcaagcttattgatgagcaacggaagctggaggtaacaagactggtgtttggagatagggattgtggccaaccagcaggacactggcaagtatcatgacagctgttgagactgcaaggtgttgaatcatcagactaaaaggcgtgccaacccaccagagtgttttctgtcttagaaagaagatggtagttgtttttcttcctcatatgtagcaaagcgtataggtcacattgcctggtaagagttttctgcaatggagctgtagcttcactgtctagtacagctgctactagccacrtgtggctgttaagcacttgaaatgtggttagtgtgactaagtaactggatttaatttaatttaatttatttatttagagacagagtttcgttctgttgcccaggctggagtgcaatggcgcaatctcggctcaccgcaacctccgcctcccaggttcaagcgattctcctgcctcagcctcccgagtagctgggattacaggcatgtgccaccacgcctggctaattttgtatttttagtagagatagggtttctccatgctggtcaggctggtctcgaactccccacctcaggtaatccgcctgcctcggcctcccaaagtgctgggattacaggtgtgagccaccgcacccggcctgagtaactggattttaaattttacttaatgttaattaaagtttaaatagcttcatgtggctagtggctatcattggttaatgcaggtacagatcatgaaaaagagaatgattcaaaaattacttaccagactttaaaacgtagtttataacgtcttttttttttctttttggaacatcgttatatttctattttgcttagactggttgtattcccccaagcgcttagcaaccaccagtaaagacttcaccatatatcatatgaaaatcttgggcgtttttctttttttaagatggagttttgctcttgtcacccaggctggagtgcaatggcgcgatcttggctcactgcaacctctgcctccctggttcaagcgattctcctgcctcagcctcccaggtagctgagattacaggcaccccgcctccccagttcaagcgatttcctgtctcagcctcccgagtagctgggatgacagggacccaccaccatgcgcagctaatttttgtatttttagtagagacagggtttcatcacgttggccaggctggtctggaacttctgacctcagatgatgcacccacctcagcctcccaaagtgctgggattacaggcgtgagctaccgcgcccggccaatctggggccttttaaaaacaagtgtttaaaaatattttgtccaggtgcggtggctcacgcctgtaatcccaggagggaggccaaggcagatggatcacttaaggtcaggagttcaagaccagcctggcgaacatggtgaaaccccatctctactaaaaatacaaaaattagccaggcgtggtggcacccacctgtagtcccagctactcaggaggctgaggcaggagaattgcttgaacccaagaggcagaggttgcagtgagccaagattatgccactgcactccagcctgggcaacagagcaagactccatctcaaaaaaaaaattttttttaaagatgtatctatatttggaatgcttcatacatttcagaggtattaccataccccaataaagaaataatcgttaatctgaagaagggcttctaatgtcccttgtccataaagctattgacttgaatacctaccctgaggacacactatgctaggcctatgttgagggtgtgtgtgtgtgtgtgtgtgtgtgtgtgtattgcctaattaaatcctcactgtgtgtgtgtgtgtgtgtgtgtgtgtgtgtgtgtgtgtgtgtgtattgcctaattaaatcctcacagtgggccaggtgctgtggctcatgcctgtaatcccagcactttargaggccgaggcaggtggatcacctgagctagggagttcaagaccagccggaccaacatggagaaaccctgtctctactaaaaatacaaaattagccaggcgtggtggcacatgcctgtaatcccagctacttgggaggctgaggcaagagaatcccttgaacccaggaggcggaggttgcagtgagccaagatcatgccattgcactccagcctgggcaacagagcgagactccatctcaaaaaaaaaaaaaaaagaaaagaaaagaaagaaaaattctcacagtgcagtagccccctgaggtgggtagtagtatctcttgggcataagtaagtaacatgaatatccctgagagatggtgactttcccaaggcctcacagtgaataagccgtgaagcaggtttggctcccaaacctctggtttttcctcctctactctgctgaattcctttgagcaacagatagtaaattagagaatgaagagttggctgtaaagtttcgtcctttgcagctcacctcaaatgctctccccartgttctttcagtgtagtcttaatcagactattcaactcctcatcaccccagacactggtagtatctggcaccaggtaggtactcagtaactctttttattttttatttattttttaaaatttattttattttgagacagagtcttgctctgtcacccaggctggagtgcagaggtgcaatctgggctcactgcaacctctgcctcctgggttccagtgattctcgtgtctcagccactgagtaactgggattataggcatgcaccactgtgcccagtcagtaaatatttttaatacatacaaatatgttacatcttctctatagtgaaagccaccaccaatgatggagcctaaagcaggaagcagtctgctttccttccctcagtgtataatcctatgcttcatactctccttgacttaggcatttaaatgtttccaagacaaattgraacaagaactactcaaatggaggagccaaggacagaaattgcaggtggctagaagttgtttccctgttccaaggcagcaataattcttaggccttcccaatgatattttggtcacagtgcattaagaaactccaggatgtgaatgaggactccataaaattcctgcttcctgtaccaccgcaggctgcagtggctctgagatgcttacagcaatggggtgtgtattaatgagactctaaaacatgccctagratgttctgatgagtttttggtatagacttttcaaccctgctttgattccttaatatataaaaatggaatttatttttagttctcttcttactgagctcagacagggtcaaaatatggcaataaatgtaattttgcttctcatttgctgagtgttgtccccttgaagacacaatagcttcctttctattctctggtgtgcttttattttctagataagatttgagcaatcttttacccccttcacatttgtgagaatattttccacttagccagctttctgctctgaggcgtgttttgctgcatccttatgtcttatgatttattgtattcaatacctagaagaggcctttacgactaccagattgttgttaatatctttattaccaaaaagccatcattaagcatgcatgaagaaaaaaaattatatagacctggaatctcttatctggtgcctcataatctaagaaccctgttctccctctgcccccaacacagacattatgaaaaataatgggtttttttttaatgcagtagtatatccaggttggtatatgacaaggcttaattggacacaatagaggacacaccaatagagagggcaggtcagaagtgatttctgatttagaagtccaaagaatgccattgtaagaggatcagggttcatattcccgcaactttccccttaaatcagtctcagctctatctctgacttgtagatagaatttttggagcttttttcctgggtggtgaggagctagttttcaaatccttctaagacttgtattttgagctgtgtatgtgcaccccaatttttggttgtatcagacattttcccatatgtatttgtcataagtgaaaaataaaataaaaaattaaaaaaggtttgagccctggcktgagaatcttgtcataatgaactcattctattatattttcttttttctttttttggagacrgagtctcactctgtcacccaggctggagtgcagtggtgcaatctcggctcactgcaacctccgcctcctgggttcaagcaattctcctgcctcaacctcctgagtagctgggattacaggcgcacaccaccgtgccaacttattttttgtattttaatggagacgggttttcaccatgttgcccaggctggtctsaaactactgagctcaggcaatccacccaccttggcctcccaaagtgctaggattacaggcatgagccactgcacccggcctatattttcaatatatacaaataaaaagtgattttaagaagatgtagcccaattaggattttccccagtcccctttcaggtactaaataagaacttcttgtcattgcaggtggggtggaagacaacccgtgagtattacaccttcatgtgggttactttgcccattgacctaaacaacaaatcagctaaacagcaggaagtccaattcaaaggtgagaaaaatactggatcaaaggtgttgaagacagtagccaagactaattaattcccttcagcttgagctttctggggcagataaaaagatttccagaattttacttttctgaatagatcttattttggatgaaaaattatgttgtgttttcagcttactacctgcccaaggatgatgagtattaccagttctgctatgtggatgaggatggtgtggtccggggagcaagtattcctttccaattccgtccagaaaatgaggaagacatcctggttgttaccactcaggtttgtaaaacttctcacctcaatcccttactgccattacgrgtagcaatataggataggatggaatttgagttaataaggctttattgaatatctaacgggtatcattggaaaaaatgtatgtagtactcacacagactcactcaggaatgacttcggaatgttaacaagactcataacaataagtggtttcttcttttctaaaacttctttaactcagctggcattcagttattcttttaactttccaattgcttaatttttgtcatctacacatcttatcacaatggtaaatgtaaaagctcctttgaggagagaagcaccaaatattcttatctctttcagttctggcctacagcctgtctgtcatacgtgagtattagattcattttcttacttcatcatttaacaggacacctacttttcatccagcactatggtaggcactgggaacacaatgaagaatcagttaaaacactgtccttggcctcaaggagctaagtccattgggagagacaaacaatactaagcgtctgcaagaagaagctacattcttatatcattgttccttttaattttaatggatataatttttgcttgcctttcttggtattgctgcaattataaagacatacctctgttatacccttacctaggtattaaggagcagcccccatctgggatacataggtgtcactgcagtgaatgggaatcagccagtccctcaccatcctaacctatgggaattttctgctagagggacttggaatatagtttatggaatgttcttttgtaggragaggtggaagagattgagcagcacaacaaggagctttgcaaagaaaaccaggagctgaaggacagctgtatcagcctccagaagcagaactcagacatgcaggctgagctccaaaagaagcaggtatggctgctggttataggtgaccttggagcrtggagatcagaattggatggtgcctcttatccagcaccatattctgttttgcctgtgatctcaccttcttataccagtatctttgaacaggcattagttttgtttgtttgtttgaaatggagtctcactgtgtcacccaggctggagtgcaagggtgckatcctggctcactgcaacccccatctcccaggttcaagcgattctcctgcctcagcctcccgagtagctgggattacaggtgatcaccaccacacccagccaatttttatattttttagagacagggttttaccatgttggccaggctggtctcgcactcctggcctcaggtgatccactcgcctgagcttcccaaagtgctgggattataggcatgagccaccgtccctgtctgaatatctccttttaattgttcatatgttgaaatgatattttaggtacattcggttaaatatactatcatttggccaggtgcagtggctcacacctgtaataccagcactttgggaggccaagatgggtggatcacttgaggtcaggagttcgagaccagcctggccaatatgacaaaaccccgtctctactaaaaatacaaaaattagccaggagaccgggcgtggtggctcatgcctgtaatctcagcactttgggaggccgaggcaggtggatcacaaggtcaggagtttgagaccagcctggccaagatggtgaaaccccgtctctactaaaaatacaaaaattagccaagcatggtggtaggcacctgtaatccaagctactcaggaggctgaggcaggagaattgcttgaacctgggaggcagaggttgcagtgagccaagatcacacccctgcactctagcctgggcaacagagcaagactctgtctcaaaaaaaaattagccaggcatggtggcatgcgcctgtaatcccggctactcaggaggctgaggcaagataattgcttgaacccgggaggcagagattgcagtgagccaagatcacgccactgcactccagcctgagcaacagagcaagactttatctcaaaaaaaattaaaaacaaaaaatatatatatatgcatacacatagtattattaaaattagtctgtttctttttacctttttaaaaatgtgcctcctaagattttaaaattatatgtagctctcacttattgaacagcgctgttctaggaaaagggcagttctgtctattttgtccactgttgtgtctgcaatgcaagaacagtgtctagtgtggaataggctctcagtaaatatttgtttaatgaacaaattataagctccagtggaatgagaaattaaggtgatgcatttttaatataaaaagagcattttgtgaccaggcgcagtggctcatgcctgtaatcccagcactttgggaggctgaggcacaacaattgcgtgaacccgggcgacagaggttgcagtgagccaagactgcgccactgcactccagcctgggcaatagagtgagacactgtcttaaaaaaaaaaaaaagaacattttccttttatttgagtatttcatttactgctgtgtcatgctatgcctgacatatagtaagtgctcaataaatatttgttgcctgcctaagatactcattcaaaagtcatagaactagtctgtccctttgatgttgtttcaatctataggaggagctagaaaccctacagagcatcaataagaagttggaactgaaagtgaaagaacagaaggactattgggagacagagctgcttcagtgagtgcatcccataattctgggaggggaagagctgctgtaccatcagtacccttaagtacagtcagattagatttctggaatttgtgagaaaacactgttatgacattgatgatgtgattctccaccctttgaatcatgaattagaaaattggtatcagaatagtcaggaaaaatgatctgatttcaaatattaactttagggattgaatacttgcagttttttggagtcaggaagccaaaacaggactgcaatggagactagtagatttttaaataattctgcaggcttagggccaagccagccttaaatcacttaaggccaggggtagctgacctggaatcagtgaatttttcacatagttatctccacctctacagactgaaagaacaaaaccagaagatgtcctcagaaaatgagaagatgrgaatcagagtggatcagcttcaggtaggtaatgccatatgtttgtcaaaggatattttcttagccttaccactgctccaatttggtggcctagaaagatgtatttcattgcagtgagtgcctaatggcatacttttcaaagtatcacactaaagtttcaggttatgtattttccattcttggaccaggtaagcctccaccctacccatgcccctgcttttaaaaaaaaaaaaatcatgattcacagccgggcgcagtggctcatgtctgtaatcccagcactttgggaggccaaggcaggtggatcacctgaggtcaggagttcgagatcagcctggccaatatggcaaaaccccgtctctactaaaaatacaaaaattagctgggcgtgctaatttacaggcgcacgtgtaattccagctactcgggaggctgaggcagaagaatcacttgagccccggaggcaaaggttgcagtgaatagagattgcaccactgcactccagcctgggtgacagagcaagactctgtctcaagagaaaaaaaaaaaaaaatcatgattcacaaggaacttagtgatttgttcatgtattactaaggtagtttaccatgagctcttaatatagatgacaatcatctatatcaataatcaaactttaatcttttcaagcaaaatcgtactcaaaagtctggaatatagagcagatagcagaactgctctcatttttaggaagctatgccttaaagaggtgctttaaagagtgatttgtctaattttactcagttggcagttgggagttgctagggaaacacatctctttgttattgtacgttaaaaagcattgttcctgttttgttttccttcttttatatcttggttatgttcactatttttgttttaggcccagctgtcaactcaagagaaagaaatggagaagcttgytcagggagatcaagataagacagagcagttagagcagctgaaaaaggaaaatgaccacctctttctcagtttaactgaacaggtagagtcatgagagaaaacaacacttttaggcatttgcaagaaaatatacgttgttctttgtataaagaacattttaatgttctttaatatacctggatgtcactggctttaggaaagggctcagaggaagctatctgaaatgagatagctcatggctttcttcagaaactgacgagagaagacttgcctctccctatgcatcctgcttgctcattagcttagcaggcccttccatggtgtgtgtgtgcatgtgtgtgtyttcccagcaatggtactgaaatctctttttgtgcagaggaaggaccagaagaagctcgagcagacagtggagcaaatgaagcagaatgaaactactgcaatgaagaaacaacaggaattaatggcatgtctgtctttggatggttatgtgggagggagcctatagggatgtagaagaaaaggatatgggcctattttccggttgatggacaggataaataagagagtgttcacctctagatgttttgctttctagccaaaaggacagagaatctgccatttataaaatgtttagaagtgggcatttctaatatgtgataagtaataaaggaatattgcaagttaaacttcatgacaagatgtagttaactagatccttggactagggctcacacagaataacccctaccctcttcttacagagttacaataggggcagacaaatgaatggttataaagggctctacgacaggaaaatataccacccaaagcaaatcttgttataattaatatattagcaattatcatcattatcaattatgtaggaatgaaaggctaattgactaataatttcctgtaatatattgttgaaaaagagtccccakggcgttgacaggtgcctggaagccccgtttacttagttgatccaaggacatragtaatcctgatgtctgagggatatccagtcatctgattataattcacatcatatatgcatcatccagtcaaccattgagtacctactgtatctaagatactgtatgctttagcatgatataggaaagagtagaacaaagtttgcaaatcagcagatcataggtcaaggtcagaccacagaaatgttttagaaagtagttaccaacatttaaaaataggaatatttcccataaaaatttgtatttccaacttcctttgggaaatgaarggacctagcaacattgagcccacattcctgtgcagcagcaatagctagagctgagtagctgctgtccctatagattctccatctagctgcagtctgcactgttttattgcattcarttccttcgtttgattacatttcttgcctgctctctataggcacattccagtttgtgacctctgatgtagcaaataaattactgttttaaatgatctatagtcccggctgggtgcggtggctcgcgcctgtaatcccagcactttgggaggcggaggcaggtggatcacctgaggtcaggagttcgagaccagcctgaccaaaatggagaaaccccgtctccactaaaaatacaaaaattagccgggcgtggtggcggcacctgtaatcccagctactccggaggctgagacaggataattgcttgaacctgggaggtggaggttgcaggagccgagatcacaccattgcactccagcctgggcaacagaataagactgtctcaaaaaaaaaaaaaattagcccgttacaatggtgcatgcctataatcccagctactcaggaggctgaggtaggagcattgcctgggccccagaagttgaggctgcagtgagcggtgattatgacactgaactccagcctagtgacagagtgagatcctgttgttactggaaaggagtcctgatccagaccccaatggagggttcttagatttccagcaagaaagaattcgaggtgaatccatagagtgagagcaagtttataagnnnnnnnnnnnnnnnnnnnnttttttttttctgagacagtcttgctctgtcacccaggttggagtgcgctgacctgatctcagctcactgcgacctccacctcccgggctcaagctattctcctgcctcagcctcctgagtagctgggattacaggcacccgccacgatgcccggctaatttttgtatttttagtagagacggggttttgccatgttggctaggctggtctcaaactcctgacctctggtgatccacccacctcggcctcccaaagtgctgggattacaggtgtgagccactgcacccggccaattttcttagttttcatggaatatttttcaagacctaggggctccccacctggctgatagcaatcctaattcctcatacatcctaaaaggccgctaaatatgagtactgtgtatcttatgcttcaggagcctaggaacaagaaagcggcactaactgtggaggagcagttagcacaagaggtggaacgccttaaggcaaaggtagaggccaggaaagcctatttcttagrgaagtacaaagagtgtcaatgacttcacaaacagatcagccaactcggggcggctgcactggtaggtgacagagataagggggcccaggaaagcaagaggtgcaaaggttagtggttcttagaccaagtccagaaaatggtacacccttgttaaggtgagaaagttatctttgcactaaaaagagggatgtagtgtatggccagaaactagcatgggggtccctggaaatactggccccaacttagccacaggtctcagggaaggtttttgtaactatcaagcaggtttctgtgcagactcagagagccctttcttatttctgccttttgaggaagtgaagcaggactagaagagccatcaggagccaacggggatgggaagcaaggagcctgcagtcagcattgtcactgggtagccccctctggcattactacctcagggtcggctagacatgcacagcagtttgggcaccagcattcaaataaaaaatcttggatgaaaaaccacaactagtaggcttagcttaagtgtgtttgtgaggtatgcacatgtgtatgtatgcaggtagaagatgggaagctctgaagcatgaaaccagttaggtcaacccatcacactgggttgcttatggccccagtctgagctccttgtatccttggacaaatgccttcctgtgttccctcttccttcatgtaacttgagccgagatgcctattctcacactgtaggaaggaatcacacyaacccaaacctaagtgcttcaggcttcgctgagtgagacgtttattcaaaacaaagattattgttttcatggttaggtgggattcaacaaggtttcatttatccctaattctgataagtcagtcttgagattttccccaaggttgctttttccctccttggtcacttataccctcagctaaaccaaaaaaaaaaaaaaaaaaattggcatcttgatgccagctcaggccttcaggtgtctttttaagtcactttaatttagcaccctgcccatagtaccatttcttcctcccagttgcgttctcctccatctcagtctccccgctttgcaatgccagattctctacaatttctcaccttgtacccagactgcaatatgtgatcctaatcctaattttttttattgttgacaggatgaaaactttgacctgtcaaaaagactgagtgagaacgaaattatatgtaatgctctgcagagacagaaagagagattggaaggagaaaatgatgtaagtgtgtgaaagagggtataaaaccccaaggttttaaggggaaggatcagggtggcccagagatgtagtgaaaaaaataaaaagttaagggccctttctgggacagtgggtgaaacagttgttcctaaacgaagagtaaatttaatctaatttcctaatctaccacaaaaccctgtctttattctacaactgaaatttgtttggcatggcaatagtcaccttgaaagaagccacactgatgaagacctaacttatttttgcttttaacttcacagctaatatatgttgccttgggggataggggaataacgtcctacataactttatgctagtggggaactccttttcttcagcacaactttttcctttttctctgctgccaaaccaggagcagaagtggtggtctgtaccagtgctggacccatggtaggcccctaataaatgctgtgcattcmttcattcattcattcattcattcattggttcattcattcatccaaccaacatttattattgattgaagatgatatggcaaaaaataaagtggttgtacttgaagtcaaggtcattctcatgttctttcttttcttttttttttttttctttttttgttgttgttgtttttgagacaaggtctcactctgtcacccaggcttggagtgcagtggcacaagcttggctcactgcagccttgatctcctgggctcaagtgatcgtcctgccacagcctcccaagtagctgggactataggcatatgccaccatgcccggctaattttttttttatttttagtagagacaaggtcttgctgtgttgcccaagctgctctcaaactcctgggctcaagcaatcctcctgcctcggcctcccaaagtgctgggattacagacatgacccaccacgcccggcccattctcatgttcttgctcagcatcaaataataggtgtccatgcattctggctgctactcctgtatctatacttccatcaattcttcatctttaccctttttttttttttttgagacggagtttcactcttcttgcctaggctggagtgcgatggcacgatctcagctcaccgcaacctccaccttccgggttcaagcgattcccctgcctcagcctcctgagtagctgggattacaggcaattgccaccacgcctggctagttttgtatttttagtagagacggggtttctccatgttggtcaggctggtctcgaactcctgacctgaggtgatccacccgccttggcctcccaaagtgctgggattacaggcgtgagccactgcacccggccctttttttttttttttttttttttgagacggagtctcactctgttgcccagcctggagtgcagtggcatgatcgtgactcactacaacctccacctcctgatctttaccctctataatccttctggcctatgcctcctagtgatcatttttactatttttttctttttaaaattgcggttaaaacacataaaatttggctgggcgcggtggctcacgcctgtaatcctagcactttgggaggccaaggcaggtggatcacaaggtcaggagatcgagaccatcctggctaacacagtgaaaccccgtctctactaaaaatacaaaaaaaaaattagcgagcttggtggcaggcgcctatagtcccagctactcaggaggctgaggcaggaaaatggcgtgaacccaggaggtggagcttgcagtgagccaagatcgtgccactgcactccagcctgggctgacagagcaagactacatcaatwgaatagaatagaatagaatagaatagaatagaatagaatagaatagaatagaatagaatagaatagaaaatagaatagaatagaatagaatagaattttaccatcttaataatgtaaaagtgtacagttcagtagagttaagtgcatcacagtgctatgcaacagatctccagaacttttccatcttgcaacattaaaacttcatacctactaaaacattaattctccctcactttctacttttgattatatcatttatgccaatgtgtttcataattgcagaaggctttttgggttctctttctagtcttgttattcccattctctcttttttgttttgttttgcttttgttttgtttgtttgtttgttttttagagtcttgctctgttatccaggctggagtgcagtggcaccatcttggctcactgcaacctccacctcccagattcaagtgattcttgtgcttcagcctcctgagtagctaggattgcaggtgcgcaccaccacacccagctaatttttgtgtttttagtagagagggggtttcaccatgttgcccaagctggtgttgaactcctgggctcaagcaatccgcccacctcagcctcccaaagtgatgggattacaggcataagccactgtgtccggcctattcccattctcttaatttataccttgagtttgaaatccctgttttcctgagttagtttgattgtgggggggggcaggtgcacacacagtttgcaaaacaaagggaaagatttggtatttggaagctttgttaagaactgtaggccgggtgctgtggctcaygcctgtaatcccagcactttgggaggccgaggcgggtggatcacgaggtcaggagttcaagaccagcctggtgaaacctcatctctactaaaaatacaaaaaagtagccaggtgtggtggtgcatgcctgtaatcccagctactcaggaggctgaggcaggagaatcgcttgaacccgggaagtggaaggttgcagtgagctgagatcgcaccactacactccagcctgggygacagagcaagactctgtctcaaaaaaaaaaaaaaaaaaaaaaaaaaaagaactgtagtaaagccctcttaaratgataagggaattttgcttattttctttytcctaaraacttgaaatgctgtctgtgccacttttagtaatttttttctctttttcattacctccctcccaccctgtcttcttactcattctctgtgttgatatatccatttgaatgggataagacmtgaagaaggaaaaattattttaggtgaatatttgcattgtgtaagaaattattctaggaaagaaactgaaaaaatattctgctctcaataatatacaacactgggaggccaaggcaggaaggtcacttgaagccaggagtttgaaaccagcctgggcaacaaagcaagagcctttcatctctacaaaaaatttaaaaatcagccaggcacggtgtygtgtgcctgtagtcccagctactaaggaggctgaggtgggagggttgcttgagcccatgagttcaaggctgcagtaagctatgatctcaccccgcactccagcctgggtgaccaagcaagaccctgtctctaaaaaaaacaaatttaacaacaacaataataatatacaatagtttcaacgttaatatacctatcagaatagttgcagtgttaatatagctcctgccactttcatatatctacatatttgttcctccctgtagttggcatgtatttagagatttaaaacttttttgtattaatataaacaaaatgtagtaaatatatttaaattcaggtataggctgggcacagtggctcacacctgtaatctcgacactttgggaggccaaggcgggcggatcacttgtggtcaggagttcgagaccagcccggccaacatggtgaaacccgtctctactaaaaatacagaaattagctaggcgtggtrgtgggtgcctgtaatcccagctacttgggaggctgaggcacaagaatcacttgaacctgggagacggaggttgcagtgagccgagatggtgccactgcactctggcctgggtgacagagcaagactctgactcaaaataaataaataaataaattcaggtataaagaacttagatctttggaatattgaaactgctgccttctcttctgaagaattatggattatcaattattgagtttctccagtgccacattgctaattgagaactacctgggaggggcatctcctagccagttcctggtggccattcttggtattgtctttcaacatgtctataaatcctctatccttagcttttgaagagggagaacagcagattgctcagttacatgggtctggattttaattctttgccgtatcaagtacctacttcagatgaaggaggcgcaagacaaaatccaggacttgcctatggaaacccatattctggtaagacaactttcccattccaactggaaggaccctgcctgcatccctttcccctactaaatttttgtttctgaggtgctaattaagaccagtctcattgttaagacttgctgggcagaagctgaggacccagtagaaagattgccaggcgagaagtgttaattgagaaataaatctgaatccagaagacacaaatcagatcattcgcctagaggcagcagacacaaattgagtcccgtggctatattccaaatgtgtaaatcagagaaatgtctttatgtagaagatatacacatacaaagctgaggaagctaattaaggttttgaaatggtagcaagagaggcaagttatgccgcccaggaactagcagttacagcagycaccctgatggctaaccaaggatgacagaaacgtgctccacagagactcctcgatggtaggacaggaaatgggggtgaaaaggacttggggtaacatgtccttgccaaacagggagcttttctcatttgtctccaaaagcaatatgagatctcatttactttttgggacagttaaagcagcagtattatctttagagttacaaccagatgtttataacaggcaacaagtttatttttcctttaaaataagtttgtggccgtgcgcggtggctcacacctgtaatcccagcactgtgggaggccgaggcgggcagatcacctgaggtcaggagttcgagacaagcgtggctaacgtggtgaaaccctgtctctactaaaaatacaaaaattagctgggcatagtagtggacttggctcactgcaacctccgtctcctgggctcaacygatcctctcacctcagtgcaacctccgcctcctgggctcacctgatcctctcacctcagcctaccaagtagcagagactaaggcgccagccaccacacccagmtaatttttgtattttatgtagagatggggttttgccatgttgcccaggccggtttcgaactcctgagcttaagcagtccacccacctcagcctcccaaagtgctgggatatgtgagccatcgtacctgactgtggatacagtcttaaaacctattctcagatagtcattaaattgttactgtttttattaaaatctcattttccccamtctgaaaatagctttgttgtttttttctgactgtataacatatatatatatgtatatatatatatgtgtgtgtrtatatatatatatwtataaagcctgtgtgtgtgtgtgtgtgtgtgtgaaatgaaaatacaattttcatttgtaattttattttgaaataatgaaaatacaatttcaggctgggtgtcgtggctcactcctgtaatcccagcactttgagaggccgaggcaggcggatcacttgaggtcaggagtttgagaccagcctggccaacatggagaaaccctgtctctactaaaactaccaaaaattagccaggcatggtggtaggcacctgtaatcccagctactcaggaggctgaggcaggagaattgcttgaacccaggagacagaggctgcagtgagctgagatcacactagtgcactccagcctaggcgacaaagcgagactctgtctcaaaaaaaaaaaaaaatacgatttcattatttatgttttcttttcaccttatcattgacctagatcccctctatcagaagtaacrgtatatatatgagagagaaagaatcagaggcattgaggagaaagggaacaatgaaagttacaggaaatatctgccagaacacagttggagaagctagggatggtattttctcattgaatgagatcttttttattcttttcaggtatccaagaaagttcttccsccagcccggtaagtatttgattcatgagaatattcccacaaagcacttgaaaatttcccttcctgctccagttcatgggagaaccatagggagacaggttcattttgataactccagaagtcagctggatcagtttgttttgggcccaaggctgagccagcctgttgtggaagggagatgaaagcacagttcatccatcagcattttgcttaggatctatacctttgaattatttggtagcataagtagggaggagatctgaaccaggcagctagccaaacaagttctgtccaatgccccttcaaggctagaagctatgttggctatttcagcaatattaggccatttcaattctggggttagacgaagcctggtaagcatcttcaaatgtgcattctcttcattcattcactatttcttgagtgcmtaaccatgtgccagtcattatgctaggcactgaggatacagtggaagacaggatggccacatctgtgccacatatagcttacatttgtactgacctctttgctcttcctcccagctctccatcaagaaatgccctatctgcaaagcagatgatatttgtgatcacaccttggagcaacagcagatgcagcccctttgyttcaattgtccaatttgtgacaagatcttcccagctacagagaagcagatctttgaagaccacgtgttctgccactctctctgagtatcccaacctcttggatgtatacagagattttatagaatagaacctrtagcttctaccatgagttatatgagtcaagatcctgcctaacctgaaattattagggatttactcagccctgctgccgctaacagtggagttatgtcactgatctgaaggtcactgttaagggcttctgctgccatccttgtgggttgctacctttaagtcgcataactctagctgtatcatcctctcacctgtcattcttctgagggtctcagtacaagggccctgggatggagccaacctgggtattcacaacaggcctgacttgatactaagtgattagttttccaagttgtcccactgccattcaaagtcagcccttgagtgtatttgttctcagtcctaaccctggggccagagattggtccgaggttgagaattccttcctcctcatccttggtgttgctttctccaaatgattgttttagactagccaaaaatgccgtggcaaagagctcagaaatccaatttggataccaaaggtttctcatgttaatttctcagcccccaaagaagcatcttactcctgaaccttagacaggaagtattgtttcagtcacagaaagcttttctgggtacctctggttagcactttctactctctgatatttcctatgtacatagcttttattgttgtaaatcctttcttaatggttaaataggattgttagcaactatgggtttgcagttttctgagtaggtgagttttgaatatgggtaaatcagaataatgagacaacttgttaatctctttaatactaaaaataaattactcttctatttcagggacttaggtaatttaaaataaaccttcaatttatggtcttctrttttgaagctcatgggaaaattgtgatcaaaagggctatgggaagggcagaccccgccaatgatttctcttcacctgtcttaagattaaataaaaaagagtgtcctggcagttatcttgaggtggggaaggaggtgatgaaacattagtttgtgaaatccaaggccctggcttkctttctttcttttttttttttttttttttgaaacagtctctctctgtcacccaggctggcgtgcaatggcgcagttgactcactacagcctctgcctcccaggttcaagcgattctcatgccttagcctcccaagtagctgggattacaggtgtgtgccrcaatgcccagctaatttttgtgtttttagtagagacagggtttcactatgttggccaggctggtctcgaactcctggcctcacgtgatctgtccacttcagccstccaaagtgctgggattacaagcgtgagccactgtgctgggcccgaggccctgacttcttgctgtaactttccatgcattttttttaaaaggagcagtgtggattttcgcaccctttgtgaactaagttcaatgygctctatccaaatttgcctaattgaactataagaaagtaataattccattttctatcccctcagggactgaacaaatggaaataactcccaggcagtatcaggtggtcactacagagacttccacaaaaacttttgaatgatgtgaaacacgatgtcatgaataagggttgagccaactatagctctgtgttcctactgggctttccctaatgtggttgggagttatgccctagactaactgtattgtcctagtcacagctccttgctttgatttcatccttgataaaatgaagatgaaacttacactacttctccaagccttttgctgtcttaagaataagacctgagattaacactaaccctagaatagaaatgtaatagggagatggtaataaaggagtttttctggcacataccctccctacagaatttctgttgctccccagatccagtgaagaattgcagtttcatttattttgtaccagtcagctcttaattaagtacatgaatggagaggaacagtggtgcacataatccaaatcagtgaataccattttctggtgaattacccacccctttgcccctgctaccccgagggttaccatgattgtcaacagcagcaggagcccttccacagggcttggtaaaaaaaccagttgaggtgttaatgaccctttttgctgggtgtaaaacaaagcatctttaaccactgttcattatccccagctgctcttaccaaggctttgaagggggaaattatgctctaggcagccactagtagtaaacaatagttcttttttttgagacagagtttcactctgtcacccaggctagagtgcagtaggcgctcactgcaagctccgcctcccgagttcacaccattgtcctgcctcagcctcccgagtagctgggactacaggcgcccgccaccgctcccggctaattttttgtacttttagtagagacggggtttcaccgcgttagccaggatggtctcgatctcctgacctcatgatccaccggcctcggcctcccaaagtgctgggattacaggcatgagccactgcgcccagccaacaatagttcttatataacccactgcccaccctggccttcctccatccccctcgcacccacacattatatagctgtaaaatacctgcaaaaaataggaagttatgagagcaaatagttatctgagttgaatttttgaatctttgtacttgttatggcaacaggttttccttcctaatttcttttctcttggtctaatattaaaatgtttttgcattaccttagcatgcttactggatgggcagtgaagggagaataaagtcaccctggcacatgtgagtgtgaaagaaagctaacttaaaaaaaggaggccgggcacggtggctcatgcctgtaatcccagcactttgtgaggccgaggcgggtggatcacgaggtcaggagttcaagaccagcctggccaacatggtgaaaccccatctctactaaaactacaaaaaattagccaggtgtggcggcaggcacctgtaatcccagctactcgggaggctgaggcagagaatttgaacccgggaggcggaggttgcagtgagctaagatcgcaccactttactccagcctgagcgacagagcaagactctgtctcaaaaaaaaaaaaaaaagagagagagagttggcaagatatttggtaaacctaggccttaacacctatagcttcagctcttttccctggtcttgctaaaaattgggatgaaatgtgactgccttgatgttcaaatatcattctcctgtgatttgattttctacggtggcagtggcttacactgaggtaagcatactctaacctggtctcctaggaacaaatgtggatgaaatgtggatgcagtccattacctgggaaaaaagcaaaatggactctacatagagacaagatccaaagagatattcatctgattgccctgagttaaccaacaataggccataagctcagtgaagttacactggccccagtgctttccttagctgctctcatataaatattcaaaagtcttagtcggtgctcacgcctgtaatcccagcactttgggaggccgaggtgggcagatcacgaggtcaggagatcgagaccatcctggctaacatggtgaaaccccatctctactaaaaatgcaaaaaattagcggggcttggtggcaggcacctgtagtcccagctactcgggaggctgaggcaggagaatggcgtgaacccgggaggtggagcttgcagtgagccaagatcgcaccactgcactccagcctgggagacaaggtgagactctgtctcaaaaaaaaaaaaaaaaaaaaaaaaaaaagtcttggccgagtgcagtggctcatgcccataatcccagcactttgggaggctgaggcaggtgtatcacgagatcaggagttcgagaccagcctggccaacgtggtgaaaccccatctctactaaaaattcaaaaactagccaggcatggtggcgggctcctgtaatcccagctactcgggaggctgaggcaggagaatcgcttgaacccaggaagtggaggttacagtgagccgagatcgcaccactgcactccagcctgggtgaaagagcaagactccatctcaaaaaaaaaaaaaaaaaaagtttttagggccagtcatggtggctcacatctgtaatcccatcactttaggaggccgaggtgggcagatcacctgaggtcaggagttcaagaccagcctggccaacatgttgaaaccccatctctactaaaaatatgaaaaattagccaggagtgctggctcacgcctgtaatcccaactcttcgggaggccgaggcgggtggatcataaggtcaggagtttcggtccagcctggccaatatggtgaaaccccgtctctactaaaaaaaaaaaaatacaaaaattagccaggcgtggtggtgggtgcctgtagtctgggctactcaggaggctgaggcaggagaatcacttgaacccaggaggcagaggttgcagtgagccgagatcgtgccactgcaatccagcctgggcgacagagcgagactgtctcaaaaaaaaaaaaatagctgggtgtagtggggcatgcttgtaatcccaggtacttgggaggctgaggttgagggtgcagtgagctgagatcgtgccacagtactccagcctggatgataaagtgagactccatctcaaaaaaaaagtctttaggccagtgtgatggctcacacctataataccccgtgctggtattgtttgaggccaggagttggagaccagcctggtcaacatagcaagacctcgtctctccaaaataaataaataaataaataaataagctaggtatggtggcatgcacctgtagcctcagctacaggggaggctgaggcaagaggatcccttgagcccaggaggttgaggctgcagtgagccatgattgcaccattgcactccagcttgggccagagagttgagaccctatctctaaaaaaaattaaagtaataaaatatcattacattcttgtaccgctttatagtttagaatgtatttcacatattccctgtgtgcctctcataatcctccaagacaaggcagctattaactcatttttatggatgaataagctgaaacatgcagaaataacttgctaaaggtggaaacaatccaaatgtctatcagctgatgaatggataaataaaatatggtgtatccatacaatgggatattatttgtcaataaacaggaagtagtcatatatgttgcaatatggatgagccttgaaattatgccaggtgaaaaaagccagtcaaaaagaccacattattgtatgattccatttatttgaaatgtccagaataggcaaatttgtagtaacaaaatagattggtttcctagggctaggggttggggggaaatggagagtgactgccaataggtatggagtttcttttgggaggataaagaaaatgttctaaacttcattgtggagatggttacacgaccaaatatactaaaaaccatcaagttacatactgttttttttgaaacaaagtctcactctgttacccagactagagtgtggtgcgatctgggctcactgcaacctccacctcccgggttcaagtgattcttctgcctcagcctcccgagtagctgggattataggcgtgtgccaccacaaccagctagtttttgtattatagtagagacgggtttcaccatgttggccaggctggtcttgaactcctgacctcaagtgatcccccctgcctcagcctcccaaagtgctgggattacagtcctgagccaccgcacccggccgagttacatactttaaatggatgcatcttatgcattgtgaattcgatctcaaattatcatttgggacatgaaggatgtctcaaatacaaacacagagcaagttaaacactgttgaacttggatagattacggtgatgtcagtacaatcactgccacaactgtgctgtgttctccccctatcttggactggaggcagcagcttcagtgcgatagaatcaagattaatagggtcaagggaattagtgatagcccaccatttggccaacagcattagtggtctctggtaatatctattctgtggagatggatgtacccaataaagttgggggacagagtcactggcccacaaatcccaggtaatcacattaagagatccagcctgctctgcctaatgttattactttctccctgtggaaaggagaaatatgacactccaggggactacattcattgtttactcagtcaatcaacatttattgagcacccacagtgtgcagagctagtatcagaccaggatttgaaaagtaaaaagttcttcccctgagggatctgcaagattaatgaagtctctgccctcagggagctgggaaactgctgggggaaaaagtcttcggtttcagggctctcccagtcagatggggaaaggagaaaaccacccagaaaagcaatgtaaagatactcacagcactacactctgaccaactgagctaaccggcagccctaaggactcttaaaagataagggaagtcatcctgcaaattaaggacttggcagctgtgggacctcagtgttaattaaaggtgttttgaaagcccaagttaaggatgttagagaagtgtgctttggaagaggcagagagacagagatggcagacagacacggggaatgtattctgaggttctctgcaaaggcagaaggagaagcagtaccagaatgcaaaggactggtaagcaaaaatactagaacataaaaagaaatcagtttctgtcctgaaagacaccacaacctagttgagccacattaacaagcttatttgcgctaacaaggggtagggtaagggtggggaaggattgtgttatgaggatataggagtggctcagaatcccaggttgcaagtctcccagcactgtactcggccatagttcttaaaccgcatgtgaatctataattatctcaaagagcatgttgagatgagggaattgcaaccatgtgtgaggtgagggtatagtgttctagtgtgtcatagtgagagacaaggctccatcccgaggctgtaggggacagtccattctttcagtggttgttggtgtcccttgacttgtggcatcactccaaaacctgcttccatggccacagtgcctccttcctatgccgccgcctctcctcagtgtgtgtgctctgtgtgccctcttataaggacatatgtcattggatttagggcccagttggctaatccaggataagtcttttcttcaagatccttaatcaccttttgtcatataaggcattacttgttcagtatgtaaagggtatgagaagcctgtgcaatgtggcaagactcctatctacaaaaaaagaaaaagccaggcttggtggcatgtgtggacatctctttttgggtgggagggcaccattcaacccactacagaaaggtaggggcagataaatgattactaggattctgacccagccaatcaagatagaacacacagaagaaacagcagccttcagggcttgaacttcagggagggaagttcaagttttaactgaatttgagggtcttgtgaggatactcagtaggcaatgggataaatgtttcagcaaagagctgggttggagctgcaggttattcctgacatgagtggcatagctgaaaccaagggagtggacgagcaaatctggagagaaaagatagggcaggctgaggacagaccctg

SEQ ID NO: 1643 - DNA, 111010 bp, Homo sapiens
  misc_feature (1)...(111010): n = A,T,C or G, or insertion/deletion polymorphism (see Tables 1-2)
tgggctgtgtgcatggaagcatctccctttctacagaactccttggcccccaggaatcccattggctaccctgggcttccagcagcaggcttaacatcatcagagaatagacaagcaggggcatgtggctgttttcttcccctctaactactttaagatgagcttggtattgtgtggacataagcagagagcacaggaacccccaaacccccatttttcaattaatctctgaccccgtcttcataacttaaataactcatctctcttctgccgaaaagcagacacatagtacttccttcgagtatagaagtaaagatgtccattatgtaacctcccaaacaaatctactacatggcatgattaccttgcccagtttgcaaaagagaacactggaattgagaatgaccacagacttgactagctgtcagtgagctgcctttagcctactgtcccttcctttcaatgtctctgatgggaaggtctcacccatgagtctcagctctgctaccccttggcactgtggccttaagcagcctcagattctccatttctggatgtgaatataaaatgcctctacttccgggtggttgggacaataatcaagaatgaggagggccaggtgcagtggctcatgcctgtaatcccagcactttgggaggctgaggcagatggatcccttgaggtcaggagtttgagaccagcctggccaacatggtgaaaccttgtctctactaaaaatacaaacattaggcgggcatggtggtgcatgcccgtaatcccagctactactcaggaggctcaggcaagagaatcgctcgaccccaggaggcagaggttgtagtgagccgagatcatgccactgaactccagcctgggtgacaaagtgagactctgtctcaaaaaaaaagaagaagaggaagaagaatgaggaatgaggtcaggcactgtggctcatgcctgtaatcccactgctttaggaagccaaggtgggatgattgcttgagcccaggagttcgagaccatcctgggcaacatagtgaaaccctcatctccacaaagaaaatgtttaaaattagccagacatggtggtgagcacctgtagtcctagctactcaagaggctgaggtgagaggattgcttgagcccaggagtttgagattacagtgagttgtgatcgtgccactgcattccagcctgggtgacaaagcaaggccctgtctcaaaaaaaaaaaaattatataaaactatgactgtgccaatctggggtcagcacaaagtagaagctaaggaattgttagtttcctttcctccatcttcaaagggccattgagaaagttgaagttctatgtatatgcaatctcaatctctaaacagtaacacactgtgcaagcattaggaatgaaaatgatagttgtgggacttatttttatctcaggagcccccaccccccaccattcctggagatccaggtttgaaacatgcatctttcttaattcataattaattcttacagaccaatccaactaagtgcaattctagactctcagcaacccggcaaatgcagccctgccatccacagtgggcctgtcagcacttaccaggaaagcagagaaatgcctggcagaatagcaggtctgaagaagcagtgagctcaacctgacagtctggacttaaataaattatattttctggctgggggcgataaggcataaatttgaagcgtgtgttcttacacgtcatggtgccccaaaatgcagaaagagctgcatcttgttccaagtttgtagcaaaattgcgctgtgtgtaaatagctctctggcttttgatgtttagcagagaggaaaataatcctctgaaaaaagccaggcaggagcgggaggctcagcagcccaggcggagagaccagcaaaggcatgcagccagggagcgggcgtttcgctttccgtgagcctctccgccagcacctaggaaggtaaactgtccccagtcatcttagttcctaaaaggattatttcctctaatgccttcatggagatgcaagcaaaaacgcttaggtccaattaggtgggaagtgagaaggctccagcagagaatgggagggaaggggagctgggcaagatgtcagcatgagctccagccagaacgaagtgaggccagccaacacagaaagggcatttcctggaggtgcacaaggaaatgtgtggcagcagcaccttgactctcattcattcattcattcactcattcattcaataaaacagacacagttcctgccctctcgaaggtgacagtctggtagaaaacacatccaacaaataatcatgtaaataaccatccagttacacactttgatagacactataatggaaaaatataagggatgtgaggttgtaaaacaagaagtcccgatatgaatgaaggctgagagcctggagaagccaagcacctctctgagaaagtggctttcaagctgaggcctgatcaggaggagctggccaggcaaagcgcgccagaacattctaggcagagaacactctaggcatgcggaaatgcctggcggggaagagcttgctgcacatcctggggactgaagaggccagtatgtttgaagcctgtgagagcagggagaaagtgtgtcaggggctcaaccatacagggccccagtggggactgggggcttcatcctaaatgcaacaggaagtcacacaaggattttaggcctctgctggtggtcttgacttgataaaaaatttagctgtcatagattgtcacttggccacctctctgatttggcttcagtctccctctggctccccacccctgctactctggtgaccgccacccttgaccaagctctaagctatgtcagctcacacctggcacgtttgtgaacttgccccagcacactgcccccagaagaaggagcaggaaagattacattgacaccaagggcagctgcaggagctgctacctgggctaggatgggtaccagccctagcaaggaggcagtcaaggatggggaacaagtctctactcactcccactataaagacctctctgctccctctttgacagggaaagccttcaattcatgaggcttccattcccactgtatctgctcaaagcagacactcagtcaatgatcaattgaagttcagagatggggggatcttagcaccccgctagaccctccacctctttttgtaagtggaaaaactgagagaggctggtataaaggaaggaaagggtcccagttggacactttcttgctgtgtaacctttagcaagtcatttcctctctcctgggactctgtttcctaatatgtaaagtaaggtggattaacaagatgatctctaagacccttttcaattcttacaccttgtcatcatcttcagttgcttagggagggtcaacaccttcaccaatggcactgggcatgctttggcagggccaagatcacagctgatttcaggagtccacactactctctaaccccagcccagtattctgaagttcagggactaaaaggtgaaggagttggaatttgcaataatctgatgctaagctgaaatttacttttgcttgcaaatcccttcatacagataggcaaattaatattttaagcaattttgaagagacagagaggatatttagagtgtctacaaagaaaagctctattggagcaccccagaattcactccaggtgtgttcaatgccttgcaatggatgtgcttatgaaatgctcttatctgttcattacagtgatccccaagaacacgtctccatgggataagttcatttgccaagttcaattgctatatgcaatagttatgaaaaaacttggttctttgaaaaagcatatttgctttggactttgcattaattccagctgttctcctctgccatgaagctgaaagaataggaattggctgtcctgaaatagtgcagctggccagggactcagagctgtttcgtatagtgaggaaaaacatagatgtttcactaccccttcctacaggtcttcaaggcgagcagtagagcttgtacttttttgcagtccccataatccttgcacatagtaggaatatatgcatatgaatattgatggactgatgagaaaagcaaggcagaaaggagcagtatgtggctaggaagtgtcccaatgacgaaaaccctcatgtccctcccaggacagcacagcagaaagggcacatgtgttagaatcagacagatgtagatttgaatctcagtttttctgctactagctgtgtgaccttaggcaagtcacttaacctctctgggccttggtttcctcctccgcacaataggtaaagcaataactgccaacggtcacagttgtaagagttaaatgagataacagataagcatctagcacagttcctggcacagggtagaagcccctcttcctttcttctaactagccgtaaagatttacataagaaaggcagcctgcaacagtcacctctgttatttacttgcctgtgcactgaaagctgggaagccaaagagcctccctgtggcctccatgctgtaggatgggacagtgcagtggagcatgctcaggaaagtggcccagacccaaatctctgtggctgcaggaatccaatacagtcagcctggctctcttccagccaattttgccagatgtaatttggcttcagctcgaggtttgaaagcagttatataatcatcataacccgtagcatttgtagaaagcttttgcagttttaaagcacttttgcatgcattacctcatttgatcctctcaataaccttgagaggtagcaaagccaaagaccagaacccccattttatagatggagacattgaggctgcgaggttttatttggttcacttaaagtcacactactaagaagtggcaatgtcaaaacttggacaaagatctctgcattcctttccctgggctttttctacaccatcacggggcctctttgtaatcatactttcatcaagcaaaagttgactgagccctattgtgtgccagcaatgtactaagcatgagtaagcagacgtagtcactgagcccctggagtctaccttccagtggatgctgctggactcaggcgggaagcagcacagtgaaaggcaggaggaataggtggagggcattgcaaaagactgggtgtggcaggtctgaattctagcctaaagagcgtagggatctctaatgggttttcagcacaggattaatgtgatagggtttgcattccagaatgactcacagttaccttagaggatgggctggagaaggtcatctggaatcctgaagtccagctaggaaaccagagtgatgcagtcaaaaaacgcttgggtcctaaatttcagcagtaaggaagacaaaaggctaaattcaggacagatgtagagaggttattgataggctctgctgcctgattggtcctctgggtcaggagtgggcagcaactctgagggcctgacttgaaccccttggcagatggcgatgctgttccctgggacagaagtgcaagagaattgtccaatggggtggggaagctaaggaagatcagttccctctggacaagctgagtgcccagggtctgcttgaagcacatctcaaaggtatgcttataagacaatgagtgaaactagtgtgtctggaggccagaagagagcccagggctggaggtgtggactgaagggtcaggagtttacagatgacatttaatgcctggaagtgaacaggacctcccagaggtagtgctcagaggaagaagagaccagatcctactgcaacaaaccccaaagggcatccagatttgctctttgatgccaaaatttcacttggtacaagtcaggcccacagccaggatgaaaaaccactggttcctgagagcggtgatggtgatgggctgtggggactctgacctgctgtcagatttctggggtctcgccaatctctggacccccgtctgaagttacccatgtgcttctctctctctctctcttctctccttcaggtgtttacaaaatatgggaagtgttacatgtttaactcaggcgaggatggcaaacctctgctcaccacggtcaagggggggacaggcaacgggctggagatcatgctggacattcagcaggatgagtacctgcccatctggggagagacaggtgagctgggcacagggaccgggcattggrtgatggtggagggttgcaggcctgactctgaaaggctggtgagctgtcttggcccaccctgtgagggactgctctccagcaaggggtttgtgacatgctgctagatcataaagatgtccctggcttgggctgggatgccctgggtttcctcaccttttactatgtgagagagggacagaggatgggaatactggagaggtaaggtaggtagggggaaggaaggcatgggggaaggtttgaagtaacaggtgtggttggtcaggtgagtggcttgatttcaggagaggcgggaaggatggatcagcctctttctctctcagtcatcctgaatatcccgacccaattagaagatctgaaaggaaagcaggctgccgcccactgggggaagctggaggggctgggaagtgttggaataccaaaggatgtgggttcagggacctggcaccktgcctgtgcctatgtaagcccctgggagacccatgtgtatagaccctaaagcttatttcatgcattcatttattcatttatttcttcagcaaactattcgtaaaccatgtatactatctcaggctttgcacccaagtaaggacattatggtgaaaaagatcaagtccttgatcacggcccagaggaagagacacaatcacagggaacagggtcagggaaagcaccaagggtatttgagcagggtcttgagatggtcttggatcatccagatgggcctgatgtaatcacagaagtcttcataagaggggctcaggaaggtcagacagaagagaaggcagtgtgatgacggaggcaaagactggagtgatacagccacaagccaaggagtgatggtagcctctagaatttcaccaggaagagaaggtaaagaggtgcccaagactgggaaccatggatttaagggggacccaaagtaagattaatgctgcgttcagggcataacaggaaggactgcagaggtgggtcaagagaggagcgtggggagcagcctgcaggggagtgggaggggagggaagattccagcaggagggaggccctgggccctcaggttggggctgaggaaagggtggagccccagtagcccagcccctacctgttgccacccctgtgccttgagtccattgactttggactctagagtctggcactcaccatacccaggcttaccaggctgctgagacagygagggcttccaccccaggaggactgactgcaaactccaggatctctcccaccacccctctctcacgaacaccccgttgcagggacgggagtgtggccatttacctcccatcacagccagtcctctgctcctccaactgaaagataaaatggccacacacatgtcactgcgccagtgccatctggaagctcacctcaggygccagggcaccccgagccccatcagccactctctgaggagacactttgttgatcctgtgtacttttctcaactcaatgcccttccagatgcagagggacraaggtttgtgtccgttctgatctctggcatccctgagggctggtggacagggcatcctgaggccaaccaggccctgggaccgtgggggcctgtagacaacccggagtccagggggtggagtcttggtccccaaagagaggcccttcttgcagacaccagaacttatatgattaatctaatctgtgtggtagaagagagaaataaggaaataaaatgagtcatggagaccccacactcaaagcctaaacagaagttagttatgtccctccatgacaatggtagctttcctagcctgttatcttgattcaggagcaaaagcacatgtacacacacacacacacacacacagacacacacatgcactctcagtaccagacccccatcacagacatcctcacacagcacagttccctgtgggatatggccttggtctgagcactggctgcagtctacaaggctacccaaaaagtctgtgttctgcctcaaagccacagatggtcagagcaggaaagaacctctgaggtcatctcttccaggccaaccttctctttcccctgaggcctggcttgaagtaatgatgtctttgaagtcatgcagtgagttcatagctgaaccaagactgttctgacccaagtttttggaccctcagtcaacctgactggatgatgagctataccaattcagagaaaattcataatcttgattaaggacttgtcacatgctaacactgcgcaggtcatcatcaggggtgcaggaggcatgagaaaagaccccatctttcaggatcttattatctcactcggggtgccagatgtgcacacagtttctgcaagagaactccagtctcgttgctgctgagagtttgagtcatccctgggagatggaccagcacactcacttagacgatttcctttgagactggggagttggggaagcaggctgtatgaagaacgggtttaaagcaggggcaggggatggatggggcagaagaaacaggttagagaaaaatctgatcagtgctgtcctatagacccttctgggctgatgaaaatgttgtctgtctgctctgtccaatacattagtcactaaccccttgtggcaatcaagtgtttgcaaggtggctaggagaatgaggaattgaacttttttataatttcaatagattttgggggaacaggtggtgtttgcttacatgaataagttctttagtggtgatttctgagattttattgcacccatcacccaagcagtgtacactgtacccaatgtgtagtcttttatgcctcaccccacacccacccttttccccaaatccccaaagtccattgtatcatccttatgtctttgcagaggaattgaatttttaatacagtttcatttttattcatttaaattagctagctgcagggggctagtggctaccatattggagagcagttagtatatttgaaaacagcttctgacaactctggttgacttcatggattttggcttttgcagccacctcccatattcctcgggtcatactattccatattcctggcaatcccctcaccatgaccttgagtgtcaggcagaactccttgtccccattttccagaaaaggaggctgaggttttgtcacttcccccagacccctcagccagacccttgaattcctgcattagggctccctccatcgtacctttcttcaggctgagaaggccctgagcaatgtgctgcctcttgcagatgctggtcacctcaaagctgcttatttcctaggccagtgggaggtgagtcccatgcgggtgagagagaagccaacacatctgttgaaggatgggaggtgggctctsgcaggtgagagatgcttgtctgtaaagccacctgaggaggcgcagacacacgtggctgcttggtcattgatcccgaggatgatggacacagccaggcctatccctgccacagtcatcaggaggcagccttcctgccctgccaaaccatgcggccccacagatgccatctcccttccttaacattcccacctctcaatccccagaggaaggaggccaggcccaggagtccaggagatatttgggtggtgatggagaggaaaggaattgaaatgtgcccgtggcagtttgatgtgtgcccaggcagtttaatgatggaggcagtgtaggaagacagagaaaatggcatgaccaggtcaagcagacccaagaccccatcccagctcttcctttcctaactgcgtgactcaggccaagtgagtgagcctctgtttcctcgtttgtaaaatagagacaaataaaacccactggctttacaggagggctgaagggctcaaacgagagttctctgcaaactgtaagcaatgagagggtgatcatgcccaccagcaggtgggaagatggtcaaaaaaaacactccagaagcagagattattccaaatatcccacacctaagacagagctctgcagcacctcaacatctggaactcccattctgctcaaagcagagcctctggaacacttttgccttgccttgtggatggctccacttctcaggaatgtcaggaagcagggagggaaccactcttctggggataattctaactaacaggaaggaccttttggggaggtggtgatggtgttgaccaccatcaacacagaggacaccaaggagtaagttaacaaaagacaccctctttgggtagacccagccctatgggctcatggttagtgagtagamaatgactctatgaaaattatcaaaaatgtcccttcctccaggcagacaatgccccacaccaaggtgctccccttggtcacacatcttcatgtggggcaccgtgataatatgccattttaaaggaagaggttcagttgcatgtggtcctagagagtatgccccaaaacgagccctatggaacatcaggagtttgggatataacatgtttatgaacaaaaaggatgcagggcccaaaaagaatttagggaattctggttaaaaaatattaaacacatttattcattgcaggaattctttaatataatacatcatgaatctccaagataggaatagccaaggcagmatttatttcccaaatgcctttgaccacagaaaccttcgttttcatggaaaagctcacagaatatagttttgaaaaagctgtcctagactgtagaagtgcagatttcatggccagggttttccaacggaaattaaattgaaggcagaaagggaggttgttaaaaatgaaattctgtgtagatacctctaagtaacttcaaagataaaaggaataggcrgtgggttatctaggttgcacatgagaaacytgaatcaaacaagcttaggcataaaagaaattatattgttctcagaatccaaggcaagcttcgacaaccagccagcaggaggggcagggatacagcctcaggaatgagtggaacccaaggctcctaaatcctcagatctctcactcctcctccctctgaattcttttcattctgtcactagaaacaggcttatttttcccacacacatattttttcacacatggctcctaacagagcctaagttttatattttacagatcctgcccccagcaaaagactgttttgactctcacagacgtcctgtttaggggaaaaaaaaaatacagggaagggaatcattggctcagctccagtcaggtgcccgcccctggaccaatcagcagtgggcaggggaattagttcacctgagaccctgtaatagtcctaaagaagttgggccgatggtggttgcrgaaggcactcccaagagaactgctagacagacagccctgtggatggccacactgagtgagtgggggtgagggtgagaattgagggtgggttacgtctgaggaaaccggaatccgtgtacagggagttttctaacaaattctaaaagggttcgagtgtcagaaagaccacaaataggcacctccctttcwcatctccttctatccttcatgcactccaatgaaaaacacttttttatcaaatacaatctgccctgatttccccaaatcctagtgttaattagtgttaacatgataatatgtcaagtatgcttttgagcaaaggaatgattttttaaagctatgctgttctcggggtaaagatttggaccccagtatccctccagcttcctcagctcctattgccctcccctcaccttgttaacctggctctagtcacacaggcttccctgctgcttcttgaatattccaggaacaccctcactttggggcatctgcatttgctattaaccrctatgagaattctccttgctcacatatccacatgactcactgcctccctgcatcaactcttcactcagatattaccttctcaatgaggtctcccctgactaccctgtttaaaattgccaccctcacccctactcttcatccctcatctttgaatgctttgctgcttagaaatttcttccaccagatactctaaatcgtctctctcaagttcaaagttccacagatctctagggtggggacaaaataccaccagtctctttgctaaagcctagcaagagtgacctttgctccagctttcaacaagttcctcatctccatctgagaccacctcagcctggacttcattgtccatgtcactgtcagcattttggtcaaagccatttgatgagtctctaggaatttccaaacttcccccatcttcctgtcttctgagcccttcaagtctctagaaagttccatactttcccacattttcgtgtcttcttctgagccctccaaacttgtccaactgctgcctgttacccagttccaaagtgttttccacattttcaagtatcttcatagcaatatcccactttactggtacctatttactgtattagtccattttcatactgctatgaagaaataaccaagactgggtaattcataaataaaaagaaggttaatggactcacagttccacatagctggagaggcctcacaatcatggcagaaggtgaaggaggagcaaaggcacatcttacatggcagcaggcaagagagtgtgtgcaggggaactccccttcatgaaaccgtcagatctcatgagacttattcactatcacaacaacagcacagtaaaacctacccccatgattcagttgcctcccactgggtctcttccttgacacgtggggattatgggagctacagttcaatatgagatttgggtggggacaaagccaaactatatcaccttcatttccttattgttttttattgtctgccccttccactaaacacaagtcccaggaagtcagagaccttggactgtctggctcacagatgtatatcaggacactacatatttgttgagaggaaacacaatgctgaaattgtgtacactgccagggccagggtgagggagaagccygcattagtgagtagctactctgtgccatgaaccttcccaatcacttgctaacaaggtattagaatcctcattgtaggatgaggacacagagcccagagaggttgtaagcttcccaagggtacatacctagttaagcagttgaaccaagcttaaaacccacatccacacccaaaagggatgctccctccactaaattcctttaatgttcacaatgtggtcataaaagccctgccatgaaaatagcacagggaaagaggtttaggcagcatctctgaagagagaatggcatataatgataggtctgctgccatcctccttgtctattttttcctcttttcttcttcaggagcagaatcattatactgaatgaaagctttagcgcagtcccacgtagaaaacagacaaaagcaacatggctctgatcccactggagatggaaacccccgtttgctttctcccttggtccctgtgaccaaccctgaggcaccactgaggatgccctgtttgaaaaccactggatgggaggcagatgtcattgggattaaaagtgctggttggttccatggctgtgtccatcccagagaccaacttgaagcatccctctcccttttcctggggtggtgaaagaagctcatgacctttctgcagcacaccagaactgcagggaagctgacattctaggcttctgattaaacatggtaggttgaacatatgtgtttatgggaggcccccttcctagaccccacctaaatggcaatcgaagggttttttttatatatgtaagtataaacccaaaggacaaagaggatgggagaaaagacaaccgtaaatagatgccagccaatttttggaagatgtaaagtagatggacgagtggcaatcgacttggcagattacacgaggctgagaactgagggcctgcactgaggaagccagcaaaggccaatagacatcatttgagaacccccagacaggatcgggaattagaggcataagatactgctgaagacaggtttgagaggtggaggtaaaaccaggaggaagagttaaaagtctacaaaaggaactattaggccccccacacatcctcccatggccagaagcagccatacaaatatccctcttacaaactcgggacttggagagatcaggcacagctgagggcatgggtgaggtgctatgcagaaaaacagggaggtgagggaaattctacttcctgagtagtgggaccctcagccagactaatttaccccacccacacctgagcagaagtttgaggggatcccttcctggagactacaagctcaagataaaagatccacagataatgacagtcaggaagccttaraaggcctagttaggtcaccctagaatgaagtcccttgaggagtgccccctcaacacaaggaagcctttaaggaccttttacccctgaatgagccaccaaagagccaagcatttgaggggacccactaaaaggcaatgaacacaaatcaaaccaaaaagaaacattgaggaaatagacacattggctaacagcacaagatatagagccaggctgcttgggttcaaatcccagctgtaacaccatctgtgtgacctgtgttacctctaaaatgaaaataataatattatctacatttatagggttgttgggaggattgaagtgcgttaatatttatgaagtgcttagaaaagtgcctggataatattagacaccatatacgccttttgataaataaaaaataaatgaaggaagcaggagaaaacatcaaaacacgttaattaaaattctcaagagagataagagatgatactgcctccataaccacaagcataggatgctattaaaaaggaaatttcagagaagaataaattaaacttaaaatatgtggccgggtgctgtggctcaggcctgtaataccagcactttgggaggccaaggcgggcggatcacgaggtcaggagatcaagaccatcctggcgaacatggtgaaacccygtctctactgaaaatacaaaaaattagccgggcgtggtggtgggcgcctgtagccccagctactcgggaggctgaggcaggagaatggcgtgaacctggaaggcggagcttgcagtgagccgagatcatgccattgcactccagcctgggcgacagagcgagactccatctcaaataaataaataaataaacaaacaaacaaacaaataaatttaaaatrtgattgcaaactttttttaatccatagaaggattggaackgagaacatctcccgaaaaggttaaacaaaaagacaaacaggtagaaagtgagagaaaaataagaaaatcagagggtccatccaggaagctattctagaacatcctattactaggagttttagagtaataaaaccaagaggatggagaagaggacactgtcaaaggactaatataacaaaaatcctcaactgaactacatgattgtccagatggaaaaagctcaccaactcctgtctgcaatagcgtcaaaaacaaaaaaccagaccaagacacatcctggtgaaattcaggctaacagaaataaagaaaaaaatctttaaagtttctggagagaaaaatagtcacatacctgggatccggaatgagaacgacctaggacttctcaacagaagcagccaaagcaaagtgacaatggcaaaatgttttccagtttctggagggggacgctttcttttctgaatagaattctatatccagcaaactacaaatgaagtgtgagagtagaatttggtttcccaaaaaatgtagactttttcaggaagttattggagaatgagaaggtaaatcaaggattgcataagattccagagacaaggatctggcctaagagaatttcctgatgaggatgaagagaagaaccaggacaacagttgcacaggaggcctggagagcattccatccaaactggagcaggaagatgttggatccacaagggatggcccttgtgggtctgtctggctgtcctgagaggcattttacagctctgccatagagtctgggatttctagtgatgggtactagcaagccatacaaaccaacaaggaaaaagcaaggtaaaacaaaacaaaatggaaaaaaaaacaggaaaaacaaaatatttatttcgcaagagagagatcaaaaacattatatactgcaaggctgggctgtgcacaatatttacagagtcatggttatgtaaaagctggatactgatttaaccaaaatatcatatcactatatttggagggtgaaaggaaaggcagcatcgtggaacacatcatctaagaagcctacatcctcatcttctgtgattaggtaggaattgtgcagataatataatatgattgtagatgattcctacatggtagaaattgggtagacaggatctaaaattttttaaaaccaagaaataaatctcaagcagttgacattcatggaaatatgaaagtaaataccagaagaaacagctaaaacagttgaaagttgttgcttctgagaagtaggactcgggggtaggaagaggtggagcaggaaactgctggttttcattagaagccttgcaataccacttgatttttaaattatgtacatatattgctttgataaaaataataattaaatttaaaatcatcataaatttttagcatagctggaaggcctgagcagctatcacgggtagcacgtttcttatccccctttacaaatggggcagaacaagcgtgggtgatgatggttgctatggtttctccgacatctctgctcccaggaaaacctcttgtcatggtgccaggtcctaaggagctccccagaatgagaggagcaggctctggcctgagttcygagtgtccagggcacaggaacctacagcagccagctgggatgttaggctcactctcagagtgggcctctgtgctggacacagggactccacaggtgtccgaggactctaaagaaatgatgccataaatcagaaacaccactggaggcaggtatccatttagcatgagaagcagcctgacttttttcattctggaaagatgtgcgtaatgcacatgctaagtgtgatgcagaaaatacgtgtgttctagttaaaactcccagctggtgcaagggtctgaggagaacagctaggaagcagatgagacagccccaacctcagacctcatgtccccaatttagtgaatctcaactgcatacctactgtgtgccaggcacctcagtgatacagatgaagggcccagtccaggttttcgaagtttataatctagggaatatctgaagggctctttttagatggtagatggaaatgtattcacccaacaactttcatataaagtgtccaaggagtgccaagcatttgcagtctgtttggggaacgtgtcaactattaagtgtcaccaagtgctgtgatagaagatagattgagaatctagaaggagatagtcagttccagaagggaggggacaagcgtatctaaaggaaggctttagagagaagttgacctttggttttagtctcaggcctgtttgccaggttgctgggcagcgtgtgggagttagaggaaaatctgaggacctggaaagctgaggtcctgagcagagggaagggaatgaggaccagaggccaagaacagcccagagtgtgcaagggcatctgtatctaaggatgagacctggggttggaaagataggtagaggccagatcaccaggggcctatgtgttctgcaaaaatgtagatattctcttgggagtcctgctaaagtgtaatcctctgaccagcagtatcagcatcacctgggagctggttagacgcatagagtctctgccttcccccacccccaagtctgtgttgcaacaggatcctccaggagattcgtgtgcacatccaactgtaagaagctctgatccagaccactgttccccaccatttggaagaatggggatgtcttcttaacatcaaaatatttctcagccagtatcccacatgaaagctcttgtgcttttttaattcattgagagaatattgtataacaaaaaattgctatgaatccagtaatgctttggatgattttgaattctataatcacatcacaatctatatacatgagccactcagcagtctggttgtacctaacttccaccatcggtgtgtgtaaacagaatttttacaaatggaatcttaatcatccaccaactttccctataattttagacactttctgatggcatttcaagggtgataatctgaacaccagttacccacccagaatcatcagccttcttatcaagtaatttataatctctgagactgaatgcactaggaaaactcattatttaaagaatgcttgagataaatcttttggtaatgagactacccccaactccacacacggtgctttcacaaatacatattttgcaaatatgctgtttagcaggaatgaaagtgtagccacatttctcagttgcataaccaagacctaacattaactatctccttccccaacatggacgcatcaccccacagtgtataaggtgctttcccacattccagccactgatcctcatacactcctatgatgtagacagggcagttctagtcatttaacagattaactcattttaaaatgyggtaagcggctgggtgcggtggctcatgactataatcccagcactttgggaggctgaggcaggtggatcgcctgaggtcaggagttcgagaccagcctggccaacatggagaaaccccgtctccactaaaaataacaaaaataacaacaacaamaaaaaaaaacctagccgggcatggtggtgcaygcctgtaatcccagctactcgggcagttgatgcaggagagtcgcttgaacctgagaggcagaggttgcagtgagccaagatcacgccattgcactccagcctgggcaacagagtgagactgcatctaaatatatatatattttgtttttatatatatwtwttttgtttwtatatttttgtttatatatatattttgtgtatatatatattttgtgtgtgtrtatatacatatatatatatactgtaagcagagacattgagtgactttcccacagcctcatggctaagaagtagtagaataggatttgaatccacatcttccgatttggtcctccttggttttttccacacagagctagtgttccttaaaaatgaaaaatgaaaaagaaaaaagattgctttgggtaacactcggatcaacaaagtataacatgtttttgctgcaggacgtcatagcgtctttaaaatactagtgtgctccatggctttgcaggaggggctgaagtttgcagccttcgccaaactcttgtggacacttggtagcatctcctggatcaccagccattggtaagaacgctgctgcatcacgctgccacccagaacaggcataattgcagcccatcccgcatggggacacaatgttgattttttttcttcctccagaagcttgcctagcttcaaaatatcacctgtgagcaatcaagcctgagcttgcccrtctttgtgctgatttcggatctccttagctagagatgctgccctacagtgcctatctgtcagggaagggttggagaggaaggacaagatacacactgcccaattttagataggcagcaatttgtggattctttgtgctgtctttagagaaatcagcctcttctgacttgatgtgagctatgaacagccacatctattttttttcatctattttgcaggagattaaaatgagatgcagtgaggtaaagacatttgcacatggccctcagctcatagaattttagagctaaaagtaacctgagagatcagcccctgcttcatttgaacagaggaaactaaagctcagaggggcaatttaacgtgcctgaggtcacccggcaattaggtagtgggactaagagtcaaacgcaggtctcagtagtgggactaagagtcaaaagcaggtctctgtgatttcagagcccgtgttttccttgatgcacttctctgcctctcttccctggccttgggctttccctggatttctctggtgtgagcaggggagcagggtctaaaatgacacctctggttgacttcaaacaccatcagcatgccctttccaccaggatctcaaggctggggctgcgactctggtccgtgttactgtcgctgtcccacactcactgagcttctaagatgaaagaacaaaggctgctgagcctactgcaaataaactcttcttccccatccttccctgtccagcttggaactttatcagcttgtcatctggcaccaatgtggcttctagcccactaacaaaaggcaggggagggtgaggaatctagagacctggatcccagccactgcccacctgccacgtgccatgtggcccttggccactgtcttctctgtgagcttccattttttcatctgaaaggtgaaaagttagctaaatcgtcaaggggtctcctggctccaaaattctacgcagccgtgagtcaatggccccgggtctgttctttactttctgtgagctttggtttcttcatctgaaaaatgagcatgatgtaaaaaaataaaatgaaatgtaatgaaatggagatattgacacctgcctcaggacagctgggaggagccagcaggatcaagtctgtgaaaaccccgaagcttaccgtacatgtgccaagattgtctttcgccatgacccagaggggatgcaaagctcagcagctcagggtcccagcctgcaaagccccaaaggacccaaaccaatgaagaatgtggtcagtgatgctagaaaggcacaaagtatttgagcgaggccacatggcagggggcaaaaagcacaggcctcagagcccagcagacaagggttggattctggatctgctttgtgtggctagggccagctgacctctccgagcctgtttccctgtctgtaaaatgggggcacctacctctaagggtaactgtgaggtgttaacgaaatggttagctggcctctgaccttgtccctgccactctggccttgtccctgccactctggcctccttgctgttcttgaagcgccccagtgtgcacctgtcccagagccttggcacttgctgttccctccacctggaacacttyctcccggatcatcccatggctcattgctcacttcattctggttactacacaaacaccctcaccttgaacaggcctttcctgactcccaaccaagcgagccacacctgctctgcccttcctctgcatcacttctcctagcactttccatcgccagcctgatgttacacgtgtacctgtttgttatcgtccacctcccccatcagaacatgagctccaggaggacagagacttcaccatgctgttggcttcactgtgctggataggggtctccacaggtgtccgaggactctggagaaatgatgccataaatcagaaacacgcttggaggcaggtatccatttagcagccagaagcagcctgacttttttcattctgggaagatgtgcttcatgcacatgctaagtgtgatgcagaaaatagacatgatttagttaaaactccaagccagccaggcaaaggtccaaggccggtggcacatgctcatggtaggcattcgatgcataactccagggagtgagggaaaaaatgtggactgctgtgaggctccagctctgggtcttgtccttaagagggtcagttgttcctttctgcttctatgaactccaaagcagcatctcaggaaatgctttagggaaataagaagaaataagaaaaatgttcctgtatttcagagagagtttctctctttcttgctttctctctctggcacacccgtacactagtacacgtctgcatgcacacccacacaggcacacacacactttatagtctcctagggaatgcagagcagtgccacagcaggtgcttgacagtggtagccagagatgccactgccgggtataagtggcccagctgctgatgggccaagcccctccccatgcctgggtgacacagggacactccaggcccatttgtctgatcataggtagcagtgaggcccaaaggatgggccttaatgaacaggtccccagggattaagccacatgattaaatgagcagcagagaccagaaagatatcagccacccaasacaagaatgccaaccacggcccttcaggggatggtccaggcagactttgctgcccctgcccagcccccatgcacttgtcagcctctggcctgaagtccctacacagctgcccactcactgggctgcagcaggggttctgagctggctcagcaggtttcatgtgaacccagcttggccacaaactccctgtgagatccacacagatccacctgcctttcagcacctcggtggcacatctgtaaaacaaggagggtgggatcctstgtctcagaggtgagttgtgcacatttgttcacttcaccaagcatttttgagttcctactgcatgccaggcactgtgattataaacataaatgaacattgaccctgtccccaagagatctctcagtcttaacagagagggagttgggatcaagtgtgaacatggtaagtactagacattggggcaccgaatggagggaaaatgtcgaggaggtggtgagtgcaaaggtgggcagagggtaaccaaatggaagatgagaggaggggccagtctacatggagggactagcatgagcaaagaggaacataaaacagcaactgatccccttggatcttgtaaaaagccagaaatactgaattcatgrtgatgatggtgatgatgacactgcaaattgttgagttattaagctaaactctgtgctaagaactttccatgcaatggctcatttaagcctcacaacagctctatgaagaacaatccatttttatgttcatacccattttaaaaatgagaaaaattaggctccaagagattaaataacttgctatagttcacagaactgaactagacttcaacttgcctgatcccacagccccaagtatttaatcaatttgtctaggctctctctggttctgatgmtccaggtacaagaggtctgcatttctgcctctctcagaaagtccgactcacttgtctgggaaacaggcactctatctctggggagatccttaaagaggtgtggagtagaaggggcggagctaggactaggggacaaaatctataagcaggcagttttcaaccaaaataagggtgaacttccaaaaccatgggctgcccctgcagggagtgaggtctccatccctatgcacttgctcaaacccaatgtccgtccttccctttgtggtaccacagaggggactcctgctgtctatcagaagttaagtgagagcccatgggagatccaccagtcaggacccaagcagagaaatcaacagcaccctcaaattgaatactaaaaggagaaattaatcaaagactgttaacaaaggcatgggcaaggcttggaaaagcaatacaggagagtgcagcatcctggtacttgtagcagggagagccgttaccaccccctcggaaagaaggaaagaagctggtgtcaaaacccagagagagacactatgaagagctctccctccagcccccaacccggagctgtggccttccaaagtgacatgcagctaacccacagtgacccagcaaatggagttgagagactggacaccccagcttgactctcctctctccctccagtttcctacctggcccaccattaactgatcccaagccagagggcaacagagtccatcaagacagtctctgcaagtcaaacccgtagcacagagrgcagggtggagaagcactgggaagggggtgcaaacagaagctatcccatacccacacaaggcccttgctgcactgtgagatgccccttatatggctggccattgtcccaccctctcctctgaagctatctggggagctagggttcccccactcagccactgttataaagtcatttttgtccaaagcaagattgctttgtatcagcacgttcactctctgagctctgaaaactccccctagctattcagataaacttttcttcctacttctctccagtgtttatttccttggcatgttttccgtaatttgccaagatgaaagattttagcttcttttatcgtgatgcactttccctgccccgttatgcattctgcctattgctcctgcctcctcctacagggctcccatrtcctttctgcatattcagaaaatgcacttccctccctggccaggtagatctcaccttgtgccacctatggccaagctcttggaaaatgctgggagactgtggcttctgcaggctgaactccatcttaccacactcctcttggttcagcattatctttcatgttacgctgtctgcgtttcagcttggtaccaattaacaagaactcccatgtacatactgtctacatagtatgtatgtagtagctttccctttctctctgcactctctctctctctctctctctttctgtccttgaatcctggtgttcatgatgtgtaaacaaatcattcactgtccagagacctacaytctttgaaggagcttagcattgaatcagttgccaataagacaaatatgaggatgtgaacaattctgtccagcaccagtttgagatgctactatcagggcggtcacacagggcccacaatcagaagggccactcacttggtttaatgctcttgagattgctgtcttgaaattcttttattttttaataacaatgcttacttttataaatttttaacaacattttttaacaaggggtcctgcattttcatttggcactgggacccacaaactatgagtgcagtcatattgttactgttattgttgccgtgttgttgttgtgtgtgcagccccacctgcatgccagcaggtgagccctcctgaattatgcggtgctggtgtttaccagtgtcctccagaacctaggcaggctcacagctgaccagatacagcagggaacagcagacataagcaagggatacttcctcactcatttgttccattcaacaaacatttattgagccctgctttgtgccagctactgtgctagggacattaggggtgattacaaagaaaaagatatcccrtgccctcagcccccattcagaactccagagctatgaattaaggcatctgctcacactaaataaaccacactcctggtggagtagaaagagtgccacattagaactcaggagacctggcttctagcccctgctctgctcttgacttrctgtctgaccttgggcaagtcacttcccttccctggactagatcactgcccaaatgtagatgacctcagacctatatcagaatttctggaaatgcagattcctgctctccactccagagtgactgaatcagaatttctgggagtggatcccaggaagcatcacccaagccatctaggagattttaacttgcattctagcttgggaacctccaaagtggatggtgtgaagttgccttggctctaacagtctacatttgttacttcagctctcaagttgggtcttcaactcaatactgtgccatgcccaggaaagggaagagagtgagggcagggactgcagggagctgctcttcactaccaacctggaaagcaatctttaaaaggaagccaagggcaattctggtaagaaatagaaagaaatgcatctgtagatgtacaagtagggctttggggaaagcagggtagaggatctggaactatggtcgtggtttgaccatgaagacacactgatctgctgctcggaaccctgcccaaactacccaggactccagacaagggcatctccagagcacctgcttaggaaggcaagatggcggagttctcrtcaccccctcagctctgggagggctgtagtctgctcatagctggatattctagaactgtgctatccagcaatgtttccactagccacatggggctatttaarcttaagttttaattaattaacattaaataaaatgaaaaattcagttcctcagtcacacaagccacctttcataamtggcacctaccatgttgggcagcacagggaatagcacgttcccatctttgcagaaagttccactggtccgcagtgctctaaagagagcagaaaccttacctatcacctgctcccactcatgtccatccagccactggatgtttttaaaaactgaggctactttaggattttactctcagctgcagctactgctgctttcagaataagctagcacctcttccaaatccgaacccagttcaattagccttgggcggttctcactaagagaggcacaccaggcctgtatgttttgcccattactcatggcatttctgacaggaagccttcatttctcatttctcctgtaaaccacaggtcctctcttttgagcctgtcttactggctgtaagatttcttaagcttggttgtatagcaggcacacacggcttcagctagctctcgaaaacaagttctggcatctctcctgttccctcccacggctcactgaaggagccttcagttcctcccagcaggggcatccctgtcatcccaacagccctccacactcacccttcttccccatctgagtctgtttttcaggctccacactctctcctcaacccccgtcttggacagacttttgaaaacacagccactgaaagatgactattcaaccccctcattccatccagtcctccctttcctgaagtcctcctcccagatctaaaaaccttccttgaggttccacctgagggccaggccctgggttaggtgatggagccctggactgaataaaatatggtctctcttgaggaattcaccatcaataggagagattgacacaaagccacaggcttccaggagcatatggataggagtttggacagggtgatgctgtacagaaaccacagaacaatgactgtactggagggaagtgggatgtgtttgtagattgcctggattctctcccactccatgaaccatatccaaaaggattcctggctgagggtctccttgtctaaatgatgaaagccctgcctacccttccctggggtcctgtctgcctgctagccctttctttccacgtagcccctggccttggaattcttgccctgctccagacccctgcacctacctcagtcaatagcccccacactttccatgggtcatgcctttcccgtggctggacccagcccttccttcccagtgactctcttctgtgccagctttagtttgtccccaaaccctccccaagccacagcctgagtgctgacatgtcctccccctctccatccctgacccccaaccccatcattatcttctctccttcctgcatttatccattctctctccatttttttctttgagaacattccttgatttggcctccaggttggccttgtccattcataaatgattgaggcttgacccataaatctcccatttattcattcattaggcatctcctgagtgcctggtgtatgcctagccatgtgcaggacctttgaggtccagagagacagcccagaacttggcctcaggatactccagcctgctggaggaaacagttaaagcctcatcacgatgtgctatggcaggggctccagcaggcagatgtggaagatacaacagagcaagagaaagagttgctttgggtggggatggagagctgaatcttcagtgacaagtgggaagatggtcaggtrgacaaggtagaaagacattctgggcagaaggagatgcatttgtgcagagtgggtaccagtgatgcccaatccaggcagccccgcatggtgcctcgaggcagaggctactcagaacaaggctagggaaggggtgggtaaggagcctggggtccttggaaacatgggagggagttatacagtttacatttggagagctcattctgtagactgtttggagaagacaagacagagagggggatctggtaaaggcttatacagtcccataagttcattttccactgattgtgagcactaaacatttaggatgatggctctgtaccgcccccaacctcccactgccaagggccatttcttctgccaaaggaaaaaatgagggaagtttctcttctacttggccattgcagccccaaggggcaaacaccttggcatacaagaaagccctgcatttttatttctactgctgcatcatgttttcctcctcctgatatccccaccttcagttcatgacccagaagaaaagttartcaataaaataaaggagtttgacttatgttataatctcattctatagatttggcaactgaggcaaggagttgacctggcaaactgacctgaatttgtttcccattgctgctgcaagagattaccacaaatttagtggctgaaaacaacacaaattcgttatcttaaaattctggaggtcagaagtccaaaatggatttccctaggctcaataaaatcaaggttgttggcagggctgtgttccttttggcagctctaggggaaaattcattcccctgccttttcctgcttctagaagctacctgcatccctgggctcatggctccttcctctgtcttcaaagctagaagcatagcatttttccattctctctctgaccttgatcctcctgcctccctttcataggaacctctgtgattacattgggtcctacttgcataatttagggtagtctctccgtctcaagaactttaactcaatcacacctgcaatgtcccttttgccatgtaaggcaacctagtcacagtttctggaggtggggatgtggacacctttgggggccattattctgcttatcacagggtcttttcagcatccctttgagcttttcaatcccaggactccatgagcatctgttgttactgacccgtggctctgtccatctttgttctttcagaggaaacgacatttgaagcaggagtgaaagttcagatccacagtcagtctgagccacctttcatccaagagctgggctttggggtggctccagggttccagacctttgtggccacacaggagcagagggtaagttccctgggctcccaggattgrtggtcctcagcctcccccgaccccctgcagaggcacaaggaggagaaatggaattcccactcggtcaagggctttactgtgaaactagagaaagatgttggctaaccttcgtcaccagttctcctgtaccacctgttgttccctaaaattgggcatgaaggaaacccagctcatttttcttttcaccaaactggttgggttttttcttttccagaacattctgttacagttgactttttgtacaagttaatttaaaaaaaattttttttttttggccaggggatgctaaggaaaactgctaaccagggcttgatatgtttcatcacttgcgttaatacaattcaaagcagcctacaaaaagaaaagkggtggaggcgtccctctcccatcacagagtttaagtggagcgagcccttgttacatgggatcctgcctgctctctttgatatagcgctggggaggggacctcagctggccagctgggactgctgcatcaattctgtctgtgggtggagggaggacaggcacagcctcaygtctgaagcgagtcttacatctcaaaagggagaccttcgcaaactctcagtaaggaggcagtctcaaagcaggactgcggagagacacggactccgtttctttcttttatctcctgaatacttgttgcctggttttcctagaataaaaactggagagacagtgactgggagggaatcctaaaccagatcatctaagacaagtttctggggaagaccttaggcatagctaagtcagtgagtagtgaaggcacctgctctggggtgtgggaaagggagactcagggagaaccatgacggaggagcaaggaaggatacatgcacgtaatggatgagctcagcttgcttttaaaatttggctcaaatgtcatctttcatctggtactgatcacagctgtttagccattttataaaatgatattctgcattaaaaacttgttgtagggcckggcacggtggttcacgcctgtaatcccagcactttgggaggccaaggcaggagaattccttgagcccagaaattcaagaccagcctgggcaacattatgagaccttatctctaccaaaaaaaaaaaaattaggcatggtagtgcatgcctgtgatcccagctacttgggcggttggaggtgggaggatcacttgagctgactgagctgagattgcaccactgccctcaagcctaggagacagagctagaccctgtctcaaaaaaaaaaaaaaaaaaaaacactggttgtaaatctatacgtgagctatattgttttttactctctgggaaagtgttgatggcataggcctcacaaactgtgccctgtacccaatgcctgggcagttaatgaagtccaaggtcaaccttcactgaagcacatagggaatgggattgcagctttgatgcaggagcaggaggtgctggaaggttagcctggcctctatgggatcccagaaactgagacaagtgatgcaagcagaaaagggaatatccaagggtatgcaaggtagaaaccaaatggtgcaaccaggaaaatatatccttgaggacaaaggagggcatgaggatggcaggggcaaagttcaaggctaaggatttgagagtcaagaagagtgagaacaaggattatccagtaaagacatgcagatggacaggcagcctgggtgagctgagagcctgagctactagcctaggtgagctcctcagtactgtcaaaagtaaacaaagctggacatgggttgacatggtgagggcagattttaatcaattatttacttttgcagtagggaagagggtgcagcatgaactgaactcaaccccaattcatagagagggcctgggtgtttcaaagagagaatgagggagtgggcagaggcaacagcaagggcttgagcagcagagtcagagaagtaaaaaaatcataaaaaacaggaaggggcttgggtgctggtccctgtgaaaagcatctgggtttgctaactggtgcttattgaagttagttaggctcctaccctcccacagagacggggagacaggggccctatattcaggtgttggctggagcaaagagtaaattctcttggcagcctcgagttttctcaggcaggcactttaagaggggatagaggtattctagggatatgaccttgggctgttagaaactatgatagtgtttgttcaagtcttcataggccaactaagggtgaggcttagaagagaagagggctcagaagagcctggctagagtctggtcaaggagagaaaatcggtcagcactcccttctgttgtatgagtaaacccacatcccttcaaagaaccaggaacaggttagactcatcaatatgtgtataaattctgtgactttctaaaagtaaattgttaattagttgtccatggcaaatctgactttgtggcttgttgaatgtacctacccctactatgatgaattacttacttgtrttgacatctctttgctatctacattgttattagcagcagaataagtgaacaacattccttggaatccagtgtgtaacttctccccaccactagtaaggggtggagaggaggaagttctctgtaggctgctatttttcatcagcctgagagatgtgctttttcctcccctagccctggctgatcttccattagtaagatggaagaaatttctgggctgggtgggaagtcggagctatgacttctaggaatccttaagtttctctttcccttcccaatatgaaacagaaggactccctatggtgagtaggatgaggaaatagaacatattcccagcttcggagggcaaatttgctgttagctttgaagtgtattctcagaaaatcagccccattcatgtctgtattttcatgattattataactaataagatatttgttaaacattttacagtcttcaaagcatttccgcatcatctcatttcatcatttcatttatattaatagagaaatacaaaaacacatcccagagctaaatctaataatacattatatttacatgtatataaaagagcatattcataggaaataagacttgaaggaaatcagccaaaatacccacactgggggaattatgaataatttattttcttctgtgggctytccatctctttcatgttgtggctttgttctatttattcatacagcaaatatttgctgaatacctactatgagtgaagtggtagagatacagtggtaaacaaaagagacgcagtctctgccctcacagagcctgtagattagcggtttctttaacaaaggcaaaaataatgttaagccaagtatattttgaggatttagccccagctgtatgctctcattctgtgagtatgcaaatctatccagttgatcctggtcctcaaacacttcatttcattgattgttaagaggcatatttgtgttcacattttaacatttctgaaataaggattcgttttacaatcaattaagtcttaaaattacaataagcagtgtttgttattctttcttggtgatacataaaatcatggtgcatcttatagtatatggtatatccataaaatgtggcagctacgttgctatcaatccaagattctgctgctttggctcaaagtttaaggaaactttgcaggaaggccatggggacaagtcgtaggaagtagaaagccctttcctggaaagttggtgtgaatcatgctaggaaaattgactccagagtaagagccctaagaggaactagtgacttaaagaagtcctaccatgaatctttgtataaatgggaaagtctttctgcatggtgaaaattatctcacccatgcataattacacacacaccacgcctttccaaatgttttaaattttattttattgtcctaaagaatatactcttgggctacaacccagtccaaagattgctttcttaacctgcatttgccctaaaaacaaataagtcaaggtatgccttggctgccttcctagacaaccttaagaagtgccctggttaactcagttgctgtaaaakcctctgcacaatcccaggaccaccagagacaggcagcgggataatatgctggaaggagaaatagaaccctgggaagggtagaagaataacaacagttcctatcaatggagcacatgctacctgccaggcattatgctgtagggacacttgaggcacattatctcatttaatctcccacaacaaccctgcarggggggttctgatatctccactttgcagatgacaaaactgcgtggttgaataacttgttcaaggttgcgtagctaggggagcagcagggttgggcttcaagcccgaatctaccaggttcccgcacccatgctctttctgctctgccacactgcacagttgtaactcaggaagactctctggagagagcgcacagggagctaatccagggagggactggctggcaggctggtcttttcctaccatkagcccaaagaaataaggctactcagtactgtggagaacaaatcagcctaggagtccagaggcctggattctagtcctgctgtgtcatgggactttggataggtcactgccctctctgggcctcagtttttccatctgtaaaatgagaagattccatgagatgacttcaaatgacctctagcattcaccacctgggagtccctgcccctgctcactcaaggacataaggatcaccaggaagtttggctgacagcagttctgcacccactcccggctctgccagctggcatgggatgcttataaggtaaattatgacaaggatgtgagataaaccctctccccagctctgggaggcagaatctgggctcctgctagtgagaagcaggagctggggtggagtagcctaaaactctaggagagaggctctggccaccctccttggtagtaccccttcctcaacccacatcctcagtggtcacagcactacccaacataacacccttacattccagggctttctgtaacttacaaaaatctaaaccccttagaatggctctggagtccctgcctagcctggccacagctcacctctccaacctcctcatctgcctgtggttgactaggatggaccctacatcccaatgatgcagaaccatccaccaaacaccccatgttctttgatggcagcctctgtgcatmtgctccctctgttccatctgcccttccttgtttcatctacytggcaaaggcctattcacacctccagataccacccaaaggtcatggcctttaagaagactttgctgtcttatcctgccaccttcctaggaatagttagctgctccayacaatattttgtacattcatttattccctcagcaaatattccctgagcactgaatgtgctggaaaaattaagataagcragacctggcccctgtcttggagcactcacagaatgaagtgggggatttggcattttttgtcacacttccaaggrtacaayagtcccatgtaggcttacttcatgtggatcactgctcctgacacctacctctccagaactgccttcttttgcctctctcagcccttgtctcttatagtctcrgagccctctgagagcaaggattgtgtcttttggattctgtggccccagtgccttgcttatagataagatccataaatgtgagttgttggaagtacaactggataatcaatccaatgttatactctaatgctccctgctgcctccttaactcacctctgccaactgtcccattaaaaatctgccctgaaagcccgtctccctgaggttatgaagctgggctgtgatggatgatatattcatatcgtttctggcttagacaagctaatcaaagcaaaagctcatgaaaggggtcagggctagggatatagatctggaagccatctgtgtagataagagtggatgaacagataagagagccagcacagaattctggaattcggggaaaattaaatgagtgagtaaatatatgtgaaactgcaaagctgsgatattcatgcggtatggggacagcaccaagctgtcttcaacgttgacatcaccaatcagactctttgctcaaaccatgattatttatttatttatttatttatttatttatttatttatttwtttttggagacagagtctcactctgtcgcccagggtggagtgcagtggtgcaatctctgctcactgcaacctccacctcctgagttcaagcaaatctcgtgcctcagcctctggaatagctggaattacaggcttgtgccaccatgcctggctaatttttgtatttttagtagagacgtggtttcaccactttgaccagactggtctcgaactcctggcctcaagtgatccacccacctctgccttccaaagtgctaggattataggtgtaagccaccatgcctggacttccaagtcatgatttgatatcagaagcctttcatcatctcccaccctctcttcaaagagcctggtggtgattcttgttttctaagtgttgatccatgtattcatcaaatatttattcaaccactttgcttatacttcttggtggtcctgggaatgaatctagagattctgggcaattagttggcccaccaacgttattgttcrggaaatttcctggaaatcttggccctgggtttatatttgwcagcctcagaaacaccttggggagccagggttgaatgtcccttcccagagacttcccactgtcaccaagaacctctttcactaccagctggaaaccatcaggaatgagaagggtttccattccacaacctagactttatatcacttgagctgtatctaaagtgccctgagaatgcctaccatcacacaacaccttgcatctaaccactgcctctctagcctgtttagactacaataaaggcaaataagaatacttaggtcttgccagctctagttaggtctttggcaggaccagttggctcctacagaagcctaagcctctgcctctggtataagttggccacatttccaccatttgaagggaatcccaccatggctcacaagaagaaacagtatccctcaccccacccctaaataaaaaggcccagcagcttggtgggatgcccactgcctgcttttgacaactcctctcaagcttccaattataacttcctaagtgcctttcaaaagggaagactcatttgtcaatctgacagccagatccatggtccttaatatccatgtttcatggaccccattagaaatggaagcttgcccagttggtttttttcaaggcagaagagagaatttattacacatgactttagtgacttccaaatggccaaagatggagccgyataaatatggaagcatctatttccaccccatcaaagcactggagaggtgccacaaggtgagatggcccgctgtgtagacattgccttcaccatcaacagggtacactgtttcccatgaatagcccaagaataagaatcaattaagcatatgctagtttagctacttaatcacttgttgccactcagcatctaaagtagtaatatcttcagatccccagacgattttgccaagagtcaagttttcaccattttttcctgcacaatataagcttgattttctcaaggtggacttgacagcagaggatgagggaggaattagaaggattcttcaaagaattgctgattggctaggatgagctaggtattgtgcttagcactgttggggaatcaaaaactgaatcccataaaaatatactccagtcttaggaggagataaaattattctttattttacctccccactaccttgcagcctcttcctctccttgccttcctgacaaagagtcaccaaaaagttctcggtccctgatrtcagttacacacagtcaactgcagcctgaaaayattaaatggaaaattccagaaataatcagttttcagttgtgcaccattctgaayagcgtgatgaaatctcgcaccatcccacttcatcccacccaggacgtgaatcagccctttgtccagcatatccacgctgcatacatacactgcccgcctgctggtcacttagcagccgtgtctgtgatcagatttaccatcaaggtatggcagtgcttgtgttcaagtcacccttattttacttaatcatggccccaaggagcaagagtcatgatgctggcatattgttataattgttctgttttgttattagttatttttgtttatctcttactgtgcctaatttataaattaaactttatcagaggtatgtatgtatgtatgtatatataggaaaaaaaaacatgatacatatggggtgggtactatctgcagtttcaggcatccactggtggtcttggaacgtatccccgtggataaggggggcctgcagtactcgcttatccctgattcttcatttccctttttcttgccagtccacctccagcacaccactgaaacttttctttgtcaaggttgctcatgagatctctttggctaaacccagcctytgttgacagggacactcctcagtctttatgccacctggtttctgaacagcatgtggactgtggaccacaccctccctgagacactcctcttcactcctgcctggcttcctttcacctccctgcccactctgccttggcccccttcataagcaattcttcccctgccaccccttacctagtggtactccaggttgctgtattgtcctctcccaggttacagcatcctttcccataattcccagactgccaccccagcctggacctctttcctgagctccagacccaacattccaggggctgctgaactcctcgcttagagtcccatggacatcccaaatcaacaggcaaaactaaattcatcttctccctgtccccacacctgcaccccataattgatgctcccctagattcaaaactctgtaaatggccggagtgcaaatccccatttgctagttgtggaaccttgttcctcattctcttcatctgcaaaatggggataatgctggttcctacctcacagggggaccggaaaactaagtgggttcatacatgtaatacccatagaacagttggcataccgtaagtgcccaaatgatgctagctgttattatcccccaccccagacactactttagttcagttccttatgtttttttcacccagataagaacaacaactgcctcactggcctccccagtgctcactctgtccctccccaacccattctctgcaacaacatgaccgttctaaaatacagccctgctcatctccctccctcmtgaaccacaggatgaagtccaagaatctcttcacagacctctccagtctggctcctgcctctctttcagtggcctctcactctactcccccagcctcccacacaacaccccagccacattaaacagagccctcctcccagcatcgcacactctctcctttctccctctgccagcaacacccttcccaccctttcatcacctcacttgtatgtgtccttcctccaagattcagtgcaaacatggccataccagagtattatgtggaaatctccagcataaaatgtacacattataaccgtctgtttacttatctatctcccctgccaaactgggaattctttggggatatgattctatcatacttctattcttcatattttacatggtgccttacatatacaagatgttcaataaattgcattggatgaaatgaacgaataaataaatgtgagagagaggactttatcatgtcacagcctgcttgagacccattaatgtctttcccaacccataaaataaagcccaaattctacctccgggctcccaccatcacttttcccagtgattatatctcactgccctccagcacacagccccctctcatctacacactgccccacttaggccttgagccttcttcctgtcctactctctcatcatctcatattgacatttattgatcacctactatgtgccaggcactgtgttaggtgttaggttaccagtggacaagactagcctggttcttcttagagcttacaggccagcaggagaggtagccaatcaatcaaccaatcaatcatggagtaagggctatagctggctgggtgtggtggctcatacttataatcctagcactttgggaagctgaagagggagaatcaggagttggagaccagcctgggcaacatagcaagacaccatttctacaatcaatcaatcaactaaaagagctattatttgtctggtagcatgcccccagtatactgtaaactcttacgggaaaagattaggtcttacagttcttagatrgaatgaaggatggatcgaatattgtgcaatgatctctgagggctaacttaaataatttactgtccatttaaattcttagccttcagatatggtgtaacttaaatactctttgaacactaggaactaaaaaataagtctttttattgagacctggaagaaaggataagctagaaatggtgctgacatggcagccccagcctgggtccatggtgcagacccttggtggtgcccaccctcactagcatctccagggagaactggctgctcctgcacccactcagcactggatctgacatcaaaagctggctgcttatctctcggtggcttatttcctccttggacccaggcagaagaaaggagccctaatgtctatggactcacctactttatcttactcaggggacaagttaataaatcagaccatgctttggttggtcctgctgcccagtgtcaygttatcttttgattcatgggcagttcactgtctgaactccaaatggtgtggccttggtttctgacttttttttaaagggggaaaaagggcctatagaggacacttccatgcataggccaaaagctgttgcatctttttcttggcaactgagaagtttaaagaatcaccaacacgtcttttagaaatatcaactataatgaatgactgaatatgaacagtcttgctgactgtcacactcccttgacaagggtaagggaaggaggggtctgaaaaagacacctctttcctgttctcccctcctccttcaggcttgaaaacaactattgcccagccatcacaactggagaagtccctgcatttgtttatgttgtgacaaacgggctggacagcccccagtaatcattctctgtkggctagtaaatcatactgcttatctgttagactgctccatccccaaaatacctctggtccctcacctactgagatctttcactctctgtctctctccctctctctctccctctttgagtaattaaaatgttttaatagcagtcaattgtctattaatataactttacctaataacgtaagttatttgcatgtcttgctccatccaatgagagaataccctttgaaggcaagggttctgcagcagctagcacaagcctaacactgtaaatcaatgaatgaataaatggcaggcataatcaatattggttcatcaattgctccaaaccctgaagcagatcctcttgtggaagaagaaatcattctgaaatgagagtcatcactcccgatttatgtgctgtgtgttttgaaatagtactcagagttcttaaaatagggcctttgatgcatttgggtgacaaaggacaggaagatggccttgggccaaggtctgcaggagagccaaggggaccacagaagggacaagcagaaggggagctgcatctcagcaaagaagccacccatctcttagagagggcagctgggacagctgttgaggggaatataaactggtagagcctctgggctggggagatgggtggggatgtggcacaacacatccataaaataaaaaagcatgcattcccttcaacctggcagttttacttcttagaatctgccctaaagaaatacatactcatgtacaccaaacaacatagataaagatctttcctgcagcactgtttgtatgagcagaaatttagacacaacttaaatgttcatcaatagaaggatgattatactgaggagggaagatgcctatgcatttcccccaccccctgcaacagttaaactgggtaaggaagatttggagatcccttggggaaaatttctaagacatattggtaggtgaaaaatcaaattgcggaacaatacatacaaggtggtcccgtttgtattaaaaatacccacaccctaaactatatgattataaatgtgcatgtatgcatatcagcacacagaaaaagtctagagtggtgcctaccatactgagagctgctcagaggaagagaacacaattgagtgtgcaggaagattcttcatttttactggatccctggcatatttataagtgtgaatttatgtattcatatattaattgtgcagtttttaaggatgtgcataatgcagctatttacaaatatgttttatggtttggacccgactcctaatagacagacaggctcacataaaggaggaggggtccagcctgctccrtgtagccaggcacagcctcctacccggactgcccctgtaataccttccttagtggacagcctccatcagaccctacttctgctcctagcacttgcaaggacatagcaagaggcctatggctcagaagtttccctttttggaaaagcaacgtttgaaagatttttgtstgtttttgaagttagaattttttttttaaattacctgggattagagaccacagttcccccaaatcattgaagagggcagggcataggttctagcagtgccagtcaccatgctattcttccatccatgtaggatggatttaattagctcaggggattagatgagattcaattaatttgaattggattgattagttgcattagattgacagccgtttttaactgttccttagctcctaaaatcacattctcctcttccctactcaatgccctcagtttctgggctgtaccactgggatgtcctgctctcagttttaggaagtcacttctcccttctccactgtaaagacaatgggtccttcacttccatgccttttgcttgttctgtgtctgacactgggaaggagacttaactcctatccatgcccagcacctgtcccagtgctcaggacatagtaggggctcagctggtgtttgtggaattgaagtgagcccccaagtttcccccagaaggcctggtgggaaccagcagaaggagcagaccagcaggggaggggattttacctggggtgtcaggctgccctgatgtcaagcatcaaaacagcctcatcactgaggcagctgcttctgtgacctgaaagggtgataatgaagactgtctcgcccctttcctgaacacatttctggtgcttactgatggcagagcagggagaggaatctgggcttagctatattcagaacctcagtgaggagraggacaagcagggcttcccacctgtattagtccatttctcactgctgataaagacatacccgagagtgggtactttataaagaaaaaggtttaagggactcacatttccatgtgtctagggaggcctcacaatcatgacagaaggtaaaaggcatgtcttacgtggcggcagacaagagagaatgagagccaagcaaaaggggaaaccccttataaarccatcagatctcatgagccttattcactaccatgagaacagtatggaggaaaccgctcccatgattcaattacctcccacctagtccctcccacaacacatgggaattgtgggagttacaattcaagatgaaatttgggtggggacacagccaaaccatattaccacctctcagaggggacatggcagtggaggtgacctcactctgcggaagactttcaaggaatcataactgatatcagacctgtcatgaggaggcctctgtaacatccatctttgcatgccatcatagttcattgagtggagccaccacgctcaccatcataactggtacaattccttgaaagtcttatctataaagtccagaacctttctaaatgcagcatacccagtatctcaggtgtacctcccaaatctaattaggtagcaatgactggagatcatcttacagaaaatacaactggagcactgagaggttaagaaacctgctaaaggacacacagctagaaagtgatacagcctagaattggaatcagcttgcaccaacgcctggctctaaccattgagcaatactgcctgcagttgccctcaggtgttctgcttttattctgcccaggagaacaaggcaagctctgaggaactcagagatagaggaacctagacatggaacycaaaggccttctcctgggcagatgccgtgaggaaccccaggtgctcgggaaggaaggtcagctcagcaaatcgaagtggaaattaccaggcctggggaaaggggaggaggaccactcagacctgcaaccagcaaaggcacacagcacctccaaaaaaggcatggagagggtatgacaaggggcagggccaacacagaagggagggtgggcaacagcagccccagaggcctgtggaccatgcttttgttttatttttccttgaagattttactatatggctactgtagaaaatgccagggaggaaacaaaaatagaaaaacataacccatagcacctccatctattgaaagtaatggttatgcttttggtatctttccttgcaattttctctctatataactctctgtttctgcctcagttagggctcctggggatacaaggagcagagagcctcggaggctagagccaaaggcagtggttactgaaggctgggaagagctcactggaaagcaaacacacacacctgctggtactaagactgagagctaaggagctattctctctgttgttctctctcctcagatccctctcccttgtcctctctcccctctccctcttctgtccctctgttggcaggactcctaaccctgcttacacaaggttccacttcctcaaaacctccccttacccacagcccatagcggctgggccccttcagtagggttctgggtaaagcagcttccgatgatcatctctagcccagtttgtccattggattttgatattgttttctccatttgtccctcaacattgtttcccataaacatcttctcctgccatgaggacgtctctgtaaatgagtcttagcattccatcacggttcactgagtggagctgccattatcaaccccattgttccctgttcttagtctctsgggatccccattgtgatggtcgcaatgagtgagcaccrtgcaccagctcctttatccaggctgcctcatcacagccaccttgcaagataggcttccctgtgcccatcttatacatggggaaactaaggcttgstaagggagagatacaattcaaaccccgacctttcagattccaaagcctgtgctcttttcaccaccccatgctgcttctgagctcgcaggccagcaaagggaccagagccttctgaccactccatgtggacagaacttttggtaaccaagagaaaatgagatccttgattaaagagaattcatttcagagctacacatcgttttctaatgctaacttctctttgaatgtaatggctgttgtttttattttccaagcttttaagaaaccactttgcattagcaacccacttgctgacaggtagcaaacattgctgttatctgtgtcctgattttgctcccggctattccctccccccaactaccagcttgcccattcttcaactgatcccggtagaaatgagggtgagtcactgttgaagttttccaaggaaacgtgctcatattttgtccacacaccatggcaatggtcagaaaaatacagcattgtgccctgcgtgccgtgaatccaggcagcacagaggctcgcctgggatggcgttgattgctgcatcacttccccttgtgttttctagcagggggagtggattactcatcctccttcttcccagtggggaaatgaatgtctcattattgatcaggagtgaaagctaaggcccctgcctggtgccttgatgtgcaggagagaggaagcagcaaatccatccctagagtctaggacagaggtcctggttatagttctgactcccatttgctgtctaggtagccatgagcagatcactatacctctttggacctcaaactctctccccgtcaaatggccgaatgcctgcctacgtacgtcacctggctgttgagaggatcagatttggcaatagctatgaaagtayttcagttgtgaagcagctatgtcactcttttctgaatggagaagcaatgacacgtagtagagatgggccacctgatacaagtctactctttactttggaatggcatttagtgttattgttattggtattaaaattagcctgttattgagatggcctggacgaatgatggcagtggaggcttctgcttccacttcagagacttctgcttccagccaagatgtaggtacagcttgtggacttaccctcaacagtaacaccaaaaacaaaatatatgaaaaacaattattcaagacattgaatattaggcaacaagggatggtgaccccaaagagatgagaaataagcaaaggtgagcactatgattgccccagcttatgcccttgaaagactttccagccctgcacagggagggggacccaggttgagcccagtgactccctgagtcaaggacacaragctatgagtccagaaagaccgagacaascagagttcacaggacagagcaccagagaggagaggacttcacagagacagaactccagagatctgaaaaatcctccttgaaaattcagcatattcctcattggggtaggcatgtgagaaaactacccaaaacyagagaaagaatgatttgagaagatgagaggaaacagtgcctggcagcactcacacagagctgggaatagtgcctattcctactagtcaaactggaaaccctcataattcatggaacacttggtaaagtatccacaagggtcttgcatcagtaacaggaaataattagccctaaactaaaagctgctttgtttctgcctaacaaatcttcaagcaaaacccaaatgggtcaaactctttctaagtaacttaaatgtgttccagaacaaagctcaagaatatttatagggatataaaaaattcaatacccaacatgttaaaattcatgacatctggcatccaatcatgatgtctggcatccatgattggcatgcaaagaagcaggaaaatatgacctatgatgagaataattaatcaattaaaataacccagaatgaacacatattagaaattgccagcaaggacattaaaacatttatagctaaatctcataagttcaaaggatggacatggaatacatttgttaaaaagccaagttgaacttctagagattaaaaactacaatggctttgattttaaaaatacactggataagatgaacagcaaattaaacattgcagaggaaaagattagttaacttgaggagattgaaatgaaatagaaaaasaaggatttttaaaatgaagaatgtagcaatgagacaacttccagtggcctaacatactggtatttagagtstttcaagaagtatggggcaggtgggagggcagaaacaaaaattttataaaatgatggccaaatcctttccaaattttatgaaaattataaatccacataaaaaagttcaaagaaccccaagcacaagaaacatgaagaaaactacagcaaagtcataccgaaattgctcaaagccagttataaaagaaaatgttaaaagcgtccagagaaaaataactcattacctacagaggaataaagataaggaagacagtagattcctcaccagaawcaatgcaacagagaagacagtggagcaatatctgtcaagtattggaagaaaaaaaaaagctgtcaatctaaaaatctatatctagtaaaaatgcctccaaaaattaagcaaaataagtcttctcagacatataaaagcagragagccagcrgatccttactccagcatatctatcaccagcagatctgtattccaagagatttttcttcaaggaaaaggaaattgacatcagatggaaatatgggttcacacaaaaggaatgaggagcaccagaaattgtattaattgtggtttttgtcattcaaagtagtggcaaaaggctgggcgtggtggctcacacctgtaatcccagcactttgggaggctgaggtgggcggatcacaaggtcaagagatcgagaccatactggccaacatggtgaaaccctgtctctactaaaaatgtaaaaattagctggacatggtgatgcacacctgtagtcccagctactcgggaggctaaggcaggagaattgcttgaacccgggaggcagaagttgcagtgagctgacatcacaccactgactccagcctgggtgacagagcgagactctgtctcaaaaaaaaaaaaaaaagtaatggcgaaaactgtggttacttttgcaccaacctataactacaatggtaaatatattttccttgttatttacatttacttaaaagatagttgaatgcttaaataataacaacatattatgaactttataacatatgtataagtaaaataaatgacagcaatatcgtaaaggacaagatggaaaaaatgggagaataccattggaaaattcttctactctgcctgaagtgctatacttgaaggtagactatgatgacttaaagatttatatataaactctacaacagccactaaaagagcaaactgaaaagttttagcttataatccaacaaagggtataaatgaaatcacaaaaatgtccaattttagtccaaaatattttatcttcatttactgcagttggaggcagaaaatgagggaagggagaaaagagaaaaaaatgggactagtagaacacatataacaaaataataggcttaaatctaacacatcaataatcacatttaatgcaaatgktttaaccacaacaatttaaggaattgccaaactggattaaaaaaagaaagtttcaactatatgctggttacccagaaaaaatgtattttaaatataaaggtaaaaatagttttttttaaaggatggaaacatatataccatacttacactgatcaaaaacaaagttgaaatggctatgctaatatcagacaaaatatgattcagaacaaataatatcaccagggacaaagaaggtcatttcataatcataaaaaggtcaagtcaccaagaggacagagcaaacctaaatatttatgcacctaatagcagagtttcaaaatacagaaagcaaaaactgatagaactgcaaaaaaaaatcaacaaatccacaattatgcctggagacttcaaaacccctctctcaataattgataggacaagtagacagaaaaccagcaaggatatagaagatttgaacaacactctcaaccaagttgacccaatgatggcttatacagcactccacagaacaatagcaaaatacacattctttacgagtacacacagcacgcttaccaagatagaccatattctgggccataaaacaagcctcaatacattcaaaaggattcaagtcatagaaagtatgtcctgtgatcataatgaaattaagttaaaacaataacagaaagatagctggaaaatctccwaatattcagaagcaaaataacacacttctaaataatccatggatgaaagaagaaatcaaaagtgaaattaaaaagaattttgaagaggttaaaatgaaaacctatcatataaaaatttatgtgctgccagtagcacaataccaacaggtaaatttacagaattaaatacctatattaggaaaagaagaaaagtcttaaatcatgacctcagcttctgcattaraaaactaaaaaaaaagaagagcaaattgagccaacactaagcatggcaaggaaaatgatgatgattscagccgaaatcaatgaaatagaaaaacaatagagaaaaacaaggaggccaaaagattttttttgatattaataaaattgataaacctctaaccagaatgatcagaaaaagaaaaagcacaagttatcattaaaagtgagagaggcaacacagcacagactccatgtgtacaaagggtgatataagaaaactrtaaataattgtatgccaatatatttaccaatttagggcttggcactgagttgcaactgcttaaattcacaatcacttattttgggtttgttttgttttgttttgttttgttttgttttgttttgttttgagatggagtttcgctcttgttgcccaggcaatagcacagtctcagctttcttactgcaacctctgcctcccaggttcaagcaattctcctgcctcagcctcctgagtagctgagattacaggcatgcaccaccatgcccagctaattttgtatttttagtagaaacggggtttctccatgttggtcaggatgatctcgaactcctgacctcaggcacaatcacttattttctattgcctctgggtgttgcctctrcagtgaccaaccatcctggcttgctcatgactgagggtctttggggaagtgagactttcaattctaaaactgaaattattggtcaacctaggcctgcatccctctgataattccacccttccacscccccaggtccagtcacctagaagcccacaaagggatctcacttaccaggttttcccctgccgttgcactctctgggttgtctgagtgggcaagcatctttatttgacctcctctcggtactggctctcccaggtcagagacaaggtcttgcccrgagccctctctctccagagccccatgcagcaaatacatttagttaatcctccccttgctttgggcccaggctgctctgcaggggttgtggactactcagaaaaggttgatgatgcattaaagaagtcattcccaacagccaaggcaaagtggctttgaaggaacaattcgcctcgtcctggcccacctccatcctctcattagccatgaggattcacttctcttcttttttaactttgcaaagttgctgtttctctctaccctgatgagagttcagttatatttcaggcaattgagacattctggaaagtcagactttacaggcatccctaaacctgctccaccctcacttagacacccttggtggctccctactgaagtggttgaactgcactctaaagaataaagtgtggtttcttgaagccaaagttcaaggcctcctgtgatccagtttcatacttgwtgtgatgctctgtcaaaaagagctactcagtgtgccctgcagattcccatctctgaaccttgcctgcccttttatctttctcagaattccatctcctctagctcctcatatacaaatccarcactttcttccatgctaccatctcctctagctactcatatacaaatccaacacttccttccatgccacctcctccaggaagccttctcagatgcccacagaggtcttttcctctgaatcaactttgtctgtggcccttggtacacgagttattaatccacagatgtctcttgactcagattccaatccttccttgaaagtagaatccccatctttcaacccttgcctaggcttggccatttcatgagttggccccattatttatctgcaagaactctattttggccattagaattgtcttgtcagtgccccggagagccatgctcgccaaagattctggtcttttgcctgcgatgttcccactgccagtgatgcccttccttcaggcctgcttggtaactaactcatccatcattttacaatcccaggtttaccttccagactccccaggctcctgcctgttgccaagagtactacttactgccctgtaatcacccatatttttgtatctctgtcccctgagtattctggggcaccttgagggaatccttcattttcctcacctttatatccccagagtccaacagaggacctggccccaggaagcatctaggaaatgtttgttgaatgaattattttgcttcaaagctctaagccgtggtttccaggtatagcaggtagctcacctccaaaagcctgccctgatttactttatcctgaaccaacagtggattaacatggttgtgtggccttggtaaagtcacttttcctctataggtcttcaaattgtccatctgtaaagtgaaggcactggatctgatggaaagggagggccctgccaagtttcccctttcctgatcctggttccatgacgctgagtttttagccgaaaatcttcaatatgtacgtgtcttgtctctttaaatggcccatgaggacatcctttaccctccagcctaagcctagcaccaggctgggtggcctccaaagctctactaaacatctgctgaataagtattagatgggtcatggggtccaggacctcgccaactgctagcagggtgagaatccacacaccatgcacgccagagtttgtgttcattatcagagacagccattcttctcccaggtatcacagtttttaaaagtcttcacccagatgtgttccaagttgttctctctcagccctcactaccaagtccccaattctggaagttcttcactgcccctgagcaatgaagcccttgccttcccccaaataaaaagacatcagctgccacggggaaaggactcgctggagatgggttcatactccccgagaggaaatcctgataggaaatggggcccaggtgtcccgccatggtgggaagcacatggtcaaagagagcctttctgttgtaggttgggagggggcttgatgtgtcgccttaacatcccactggtctgagacagaagcccagccctacctttatcactgtaggatctcatacaaaggccttgacttttcgggcctcatccgtcaaagtggattgaaaatcattccaatttcaaagggctcctatgaaggataaatgaataaaaactttaaaaatcggacatatagtttttcattttactccactttttattctgtcaattacatagcctgatttttctccctcagtttgttatgtctcatgaggctaatgttaatgacacattcccttacctctacttcttgcacatggtagacacttaacaaatacacactagatgagtgagtggaagttgagaatggaagttgcctcccctatcctcctccagatattatttgactaataagaattcaatcatttgggaggccaaggcaggaggatggcttcaggccaggagtttgaggccagcctgggcgacaaagcaagacccccaactctacaacaaaataaaaaataaaaattagccagatgtggtggtgtgcacctgtagtcctagctatttgagaggctgaggtgggaraactgcttgagctcaggattctgaggactgcctgggcatcatagtgagaccccaattctcaaaaaaaaaaaaatagcaggaagtggtgactgagcagctgtagtcccagctactcaggkggctgagatgggatgatcacttgtgcccaggagttcgaggccrcagttagctatgactgtrccactgcactccagcctgggtgacaaaccaagactttgtctcaaaaaatatatatgttcaatcattttcaataaatacagagcccctattatgtgccattaatttcagtaaattaaacacactctcaaaaaaaaaacctgcctattaagtgtgatatgtccccatttcccagctggggaacctgacaataagagaatttaatgaccttccccaagccacaaaccttctacgtgactgggctctaattcaagcccaagcctctctgtaactccatgttctcaatcattccccacagtactgtgcaaaggacatatcatctttccatttcagaagctctgcatgtgcatgactgtaaacttggaaaacacagaaaagtagaaagaataaaatgtggaccaccaaaagacatactgagtttgaattgggggttccaagatggccgaataggaacaactccagtctaaagctcccagcgtgagtgacgcagaagatgggtgatttctgcgtttccaactgagctttgaagagagtagtggttctcccagcacggagtttgagatctgagaacagacagactgcctcctcaagtgggtccctgacccccgagtagcctaactgggatgcaccccccagtaggggcagactgacacctcacacggccaggtacccctctgagatgaaacatccagaggaatgatcagacagcaacatttgctgttcagcaatattcgctgttctgcagcctccgctgctgaacccacaaacccaggcaaacaggtattgamgattacccaggcaaacagggtctggagtggacctccagaaaactccaacagacctgcagctgagggttctgacagttagaaggaaaactaacaaacagaaaggacakccrcaccaaaaccccatctgtacgtcaccatcatcaaacaccaaaggtagataaaaccacaaagatggggaaaaaacagagcagaaaaactgaaaattctaaaaatcagagcgcctctcctcctccaaaggaacgcagctcctcaccatcaacggaacaaagctcgatggagaatgacttygacgagctgagagaagaaggcttcagacgatcaaacttctccgagctaaaggaggaagtgtgaacccatcgcaaagaagttaaaaaccttgaaaaaagactagacaactggctaactagaataaccaatgcagagaagtccttaaaggacctgatggagctgaaaaccatggcacgagaactacgtgacaaatgcacaagcttcagtaaccgattcgatcaactggaagaaaaggtatcaatgattgaagatcgaatgaatgaaatgaagcgagaagagargtttagagaaaaaagaataaaaagaaacgaacaaagcctccaagaaatatgggactatgtgaaaagacmaaatctacgtctgattggtgtacctgaaagtgacggggagaatggaaccaaattggaaaacactctgcaggatattatccaggatattccccaacctagcaaggcaggccaacattcaaattcaggaaatacagagaatgccacaaagatactccttgagaagagcaactccaagacacataattgtcagactcaccaaagttgaaatgaaggaaaaaatgttaagggcagccagagagaaaggttgggttacccacaaagggaagcccatcagactaacagctgatctctcagcagaaactctacaagccagaagagagggggggccaatattcaacattcttaaaggaaagaattttcaacccataatttcatatccagccaaactaagcttcataagtgaaggagaaataaaatactttacagacaagcaaatgctgagagattttgtcaccgccaggcctgccctacaagagctcctgaaggaagcactaaacatggaaaggaacagctggtaccagccactgcaaaaacatgacaaattgtaaagaccatcgatgctaggaagaaactgcatcaactaatgagcaaaataagcagctaacatcataatgacaggatcaaattcacacataacaatattaaccttaaatgtaaatgtgctaaatgctccaattaaaagacacagactggcaaattggataacgagtcaagacccatcagtgtgctgtattcaggaaacccatctcacgtgagggacacatatgggctcaaaataaagggatggagaaagatctgccaagcaaatcgaaaacaaaaaaaggcaggggttgcaatcctagtcactgataaaacagactttaaaccaacaaagatsaaaagagacaaagaaggccattacataatggtaaagggatcaattcaacaagaagagttaactgtcctaaatatatawgsacccaatacaggagcacccagattcataaagcaagtccttagagacctacaaagagacttagactcccatacaataataatgggagactttaacaccccactgtccacattagacacatcaacgagacagaaagttaacaaggatatccaggaattgaattcagctctgcaccaagcagacctaatagacatctacagaactctccaccccaaatcaacagaatatacattcttctcagcaccccaccacacctcttccaaaattgaccacatagttggaagtaaagcactcctcagcaagtgtaaaagaacagaaattataacaaactgtctctcagaccacagtgcaatcagactagaactcaggattaagaaactcactcaaaaccgctcaactacytggaaactgaacaagctgctcctgaatgactactgtgtacataacgaaatgaaggcagaaataaagatgttctttgaaaccaacaagaacaaagacacaacataccagaatctctgggacacatttaaagcagtgtgtagagggaaatttatagcactaaatgcccacaagagaaagcaggaaagatctaaaattgacaccctaacatcacaattaaaagaactagagaagcaagagcaaacacattcaaaagctagcagaaggcaagaaacaaccaagatcagagcagaactgaaggagatagagacacaaaaaacccttcaaaaaatcagtgaatccaggagctggttttttgaaaagatcaacaaaactggtagactgctagcaagactaataaagaagaaaagagagaagaatcaaatagaygcaataaaaaatgataaaggggatatcaccaccgatcccacagaaatacaaactaccatcagagaatattataaacacctctacgcaaataaactagaaaatctagaagaaatggataaattccttgacacatacacccttctgagactaaaccaggaagaagttgaatctctgaatagaccaataacaggctctgaaattgaggcaataattaatagcttaccaaccaaaaaaagtccaagaccagatggattcacagccaaaatctaccagagtacaaggaggagctggtaccattccttccgaaactattccaatcaatagaaaaagagggaatcctccctaactcgttttatgaggccagcatcatcctgataccaaagcctggcagagacacaacaaaaamagagaattttagaccaatatccctgatgaacatcgatgcaaaaatcctcagtaaaatactggcaaaccaaatccagcagcacatcaaaaagcttatccaccatgatcaagttgtcttcatccctgggatgcaaggctggttcaacatacgcaaatcaataaacgtaatccagcatataaacagaaccaaagacaaaaaccacatgattatctcaatagatgcaggaaaggcctttgacaaaattcaacagcccttcatgccaaaaactctcaataaattaggtattgatgcaacatatctaaaaataataagagctatctatgacaaacccacagccaatatcatactgaatgggcaaaaactggaagcattccctttgaaaattggcacaagacaggagtgccctctctcaccactcctattcaacatastgttggaagttctggccagggcaatcaggcaagataaagaaataaagggtattcaattaggaaaagaggaagtcaaattgtccctgtttgcagatgacatgattgtatatctagaaaaccccatcgtctcagcccaaaatctccttaagctgataagcaacttcagcaaagtctcaggatacaaaatcaatatgcaaaaattacaagcattcttatacaccaataacagacaaacagagagccaaatcatgaatgaactcccattcacagttgcttcaaagacaataaaatacctaggaatccaacttacaagggatgagaaggaccttttcaaggagaactacaaaccactgctcaatgaaataaaagaggacaaaaacaaatggaagaacattccatgctcatggataggaagaatcaatatcgtgaaaatggccatactgcccaaggtaatttatagattcaatggcacccccatcaagctaccaatgactttcttcacagaattggaaaaaactactttaaagttcatatggaaccaaaaaagagcccgcatttccaagtcaatcctaaaccaaaagaacaaagctgaaggcatcatgctacccaactgcaaactatactacaaggctacagtaaccaaaacagcatggtacttgtaccaaaacagagatatagaccaacggaacagaacagagccctcagaaataataccacacatctacactatttcatctttgacaaaccttacaaaaacaaaaaatggggaaaggattccctattcaacaaacggtgctgggaaaactggctagccatacgtagaaagctgaaactggatcccttccttacaccttatacaaaaattaattcaagatggattaaagacttaaatgttagacctaaaaccataaaaaccctagaagaaaacctaggcaataccattcaggacataggcatgggcaaggacgtcatgtctaaaacaccaaaagcaatggctacaaaagccaaaattgacaagtgggatctaattaaactacagagcttctgcacagcaaaagaaactaccatcagagtgaacaggcaacctacagaatgggaaaaaatttttgcaatctactcatctgacaaaaggctaatatccaaaatctataaagaactcaaacaaatttacaagaaaaaaaacaaacaaccccatcaaaaagtggscaaaggatatgaacagacacttctcagaagaagacattgatgctgccaacagacacatgaaaaaatgctcatcatcactggccattagagaaatgcaaatcaaaaccacaaygagatatcatctcacaccagttagaatggtgatcattaaaaagtcaggaaacaacaggtgctggagaggatgtggagaaataggaacacttttacactgttgatgggactgtaaactagttcaaccattgtggaagacagtgtggtgattcctcagggatctagaactagaaataccatttgacccagccatcccattactgggtatatacccaaaggactataaatcatgctgctataaagacacatgcacacgtatgtttattgtggcactactcacaatagcaaagacttggaaccattccaaatgtccatcaatgatagactggattaagaaaatgtggcatatatacaccatggaataccatgcagccataaaaaaggatgagttcatgtcttttgtggggacatggatgaagctggaaaccatcattctcaggaaactattgcaaggacaaaaaaaccaaacaccacatgttctcactcataggtgggaattgaataatgagaacacttggacacaggaaggggaacatcacacactggggcctgttgtggggttgggggagtggggagggatagcattaggagagatacctaatgtaaatgacgagttaatgggtgcagcacaccaacatggcacatgtatacatatgtaacaaacctgcacgttgtgcacatgtaccctagaacctaaagtataataaaatatatatatatataaagacatcctgagtttaatacttcaaaacagtttttcagttatctttttccgcatatagttttgtgggtttggtttttggtttttggtttttttagagccataaccatacagtataagcaggtgctgctcctctctgttcaacattatgttggaagtgtcatttccttgatccaacgtactctccatatccatcattttaacgattgcataatatttccatcaaacagacatataatttacttatcatctctctattgttgaacacttgaattgctttatctgtttttgctattataaataatattctgctgaacatctttgtacatagagctttgagattattttattaggctaattttaattctttccttacgctggtttctggaaaggtgagatgactgcatcaggggtaatgagcatttgcaagkctcttgaaaaaaaatattgccaaatgtattttcccaaagattttcatgtaaaaaagagaagagagagtaggggccgaaaggaagatagatggttactggacagctgacagtcatagacaagaaaaaccagggcctgccagcagtagaattgtattatgagctgagctccgtcaaagtgaagtgataagaagcaaaaagatgtttggtgttttttgttgttgttttgggttttgttttttttttttttttttgacttctcagaagggagaaaaaacagtggtagaaaattgcatgtagattaatgaagtaaaggtattttcaatcactctaagagttggcttgctaaaaaataacaatccgtggaaatctactcttaccaaacaaatctcccatccttttccagtcggcctcacctctgagcattgacaaaggaggcccaagttccaacttcaggtctgtcattgaacagctgtgcctcggtytaccagcctgccttacctacctccyaggggttattatcaggataaataagcttgtgtatatgaaaatactctgtaaaagttcaatcacttatattatctcctggtcaaaattaatttcctcgttaattgccattccatggtacagggactttcatggctatacagagggcatctggcatacatacctttttttttaatatgtagttccctgaaaatagactttcatcaatgtattaaaaagatgtatgcttaacttttactgggaaactcgaatttgtaaagggaggcacacccaacttcatccagaatctgtgcaggttcagcctcagtcctctgtgcccttccaaatgccccacctctaatgccagtagaagtgtgctgactctgatggcctctggagttgggctggcctatgactmtatgactgttctatgtgactgggctgacttaaccactgaggatctcagccatagctcctccccagaacttcctgccctggaggtcagccctggaggcaaagcctcaaccagaaccattccacggggtttccaggcggttcaacccagaatcactgggcttctgcttagaaatgttctttcctccattctctggagggttgttccagaaagggcagttcctctgcccagaaaaaccttggaagactctggggtttggtagtcagtcgtcacaacaaagccagccctgcaaagatgttatccagcatcttaaaactcttgcattggcttccagccatcatgttcaggtccacctccctggacagttaggaaaatgacaagcacatagagacagaagagacctaaagatcatcaagtccttcccctwgatttatagctcaggtatggaggttcagagggggtgatttcacactgctccttaccacaataatatttgaagtatagaatgaagttttcctaagctagtatagaatttgaagtatagaatgaagtactccaactccagtgtgtgttagaggcagccgggaagcaggttaaatgcattcctggacctcaccccacaccaactgcatgggactctctcaaggtgaggcccaggaatctgcatttctaacaagcctccctgtaatgcagatcctcttgccattcagtgcccagggccctaatattayagcagacagccctaatttagctcatctctgctgtggcttccattcccttcccrcctccttaaacacacacactcacacacatacatacacacaccattcacactgggcctgttgatgttgtggaagtaaataaataggcaagttcaaaatctagagagaccaaagtacaatgtggcctgggcttctcaacagatggtcagtagctttgagagataatgcaagtgacagcatatgtgaacccctctctggcttcagaaggaaaccctgggtggctggagaagagctgaaaacgtgctcagctccttctgatgacagcagctcactggcttgaagacaccagttcaatggggtattayattcctacataatttaatagcctattctgctcattaatttctttytaagagcaatcccagatgggaactgtatcgattcctggtgagtcattcattcgctggccagtaaactttatagagcgtcytaggctaccagccctgaacacccagcayrttacagtggggatgtcaggctctctgacagcagggtataaggagcwtggaaaaggttcacagagagtcccaacatggctcaacctgtgtctattccctaaagaaggctgaatcctactgggccagggaggggggtggctgggaaggrgctatcttccccmaaccccaaactgtcaggggttatggtcaagcaaacaacattaagcatgtccatttttaacttggacactttcacttcgattcatttccaagttctattgttaatttctgcctggattttccaatacagagtgaatttcatacactcagctgtgtatctttgggtgtgttggtgtgtccacctgtggctacagcaaaatctcagtggagtgggctgattgggtctttgaatgaggaatccaaagataccccagaaaactgaagcctagccccacctctgcagccaactgcatgaccagaggcaaatcacttggcctttctggatctcagttttcccttctgtcaaataggttggactagatgaacggttctcaacctagctccagcatgagaatcctctagggagttttcgaaaaatactagtacttggagtccatgccagaaacaactgaattctaatcttagggctgagtccagggcttctgtgatttataaaagtattcccaggtgattctgacgcagagtgcggttgacaaccactgccctgggtgatccagctctgctattcaattaattccaccatttatcacggaggagacaagaccgagagaacatggcgcagtcgcttttcttatgattcccgtgaagagaggccaagggcagaaaggctcaaacagtgccatctgggattcaatttaacttgcgaatttcctgaattaaaaaaagaaagggcgtcctgaatataaaaatcagacaccaagccctggacttgaggtttcttagtagaaatacactgccaaaggaaagatcgcttaagccctggagtttgagcttacagtgagctaygatcatgccactacactccagcctgactgacagagcaggacaagcggaaggacgagtcagaaaagctttcgggaagaggcagggcatgagaggctcatcagaaaattcagccataacataggaatgtgaagcagacgggggagcaggaagttctcggaaggctggctgaccccagaggcccttggtaaccagaagcgacagttgaggaacgaggagtcctggagcaggagaggaaaaggtggcaactgagctaagaggtgaagggcttccctggagtcagagtgagttgggtggccagyactgagtgggggacacccaaggaattcctgcacatgcagccatcagggccaaatcggacatatcccaggccaggcatttggcaaggaggggttgcccgaatcataacaaccatgaattctcactgttttgagcttgtaaaacctatgaatgtaactccattagatacaacagactgtcctgcattgtattcctggagtgctgggaaaggggtaaaccaccccaatgtcaaccctgggaaatgcatgtaggagagctgtgacccaggagctgacatgggctgagtggaggggagggaactgacccaaggccatgtggccaatggtgatggagctccttgaacctgctaatggcgtggcatgaaatgtgttgagaattccccctgcccgccctacatcacgccctaaaataaaagcaaccgtgtaacaagttgcaagcctgcaaaaggcttttcttcccatgccgtggcataattgatcacrcccatttctcatcagggtcaataaataggacatcttaccccagtttttatatctgagtgatggtttatgagccaagtgactgaagtctaaataacgaagctgtgtttacttgataaatgaagtgctggaacgcccgagacgccacatttgctaaacctgcaccataagcttttctctaatgataaattctctctggtgtcaggcaaagctgagagccacatgcacccccaaggacagtcttctgaagaattgtggctcacacacaggaaaaactctgagtattgatttccctcacatgactgcacaatgttagtggtaaaatcatagaatcctgggatgctgaaaccggaaaagcccttagaggcaggccatcaaggactatcacttgctaagcaagctcccaattttacctatggggaaactgaggcccagggagggaaagctaccttggtaactggtttggcagcgacagagtccagaagtctagtcatttgagccccaratttgggccagccctgggaaagagtaatcagtcacctacctacctccccaaaaagcttaaaggctggcaggagatgggcatgtcaggcaataaatacaatgtggtgttgcaggtgctgggataaaactcaggctgaacaccaagatccaaaagcagagggaatgggtggagaaggcatcttggcagaagggcacaaactgagccttgaaagctgggtagatggttgcaggctgacaagcagaaagaacaatcctggcagggatacaggagagcaaaggtaggtgcggcattgtggtgaaagggaaggagatgatgcatttattctggattatgtttgaagtgttagatggctaagtattaaaagcatccagattaaatccttagcaatcagaaacgcttgcttcactagattttgctaactgccagtcatgttgaactgaattaatatgtcccttyttgtgaaactattaagktaaataattaacaataaagcttcctcttataaaggaaaaaaaagagtaaaggcagagtggctacaagagcctgatggtttgcaggaagatgagactggaggtaggaaggcccatcagagagggtcttctgaagaaaaggattttggattttaccagagaggatgatgatataattgagtctgcattttagtaagatcaggtgggggtcagattggaggagggtatacacgagacaaaggccagttaagaagctcttgcaacagtcctggagagaaatgattagcctcaacttagagaagaagggatgcttacattgacttgggaaaatggaatctgtaggtccttttcacacctccagtggaggctaagggagaaggaaaaggggccaaggtcctttttaaaagagactgtgttcttccctccaactcccaaaaagaataatttttcaggtctaaaaattaagaatccatgcagttagtgctcttcaagttataagctaaattyccatacaacagatatcagaggtgaattrcaatgtgctatgtagttaatagaagccatcatgctaactcagaacagacggccgcctgggattttcttgagttggataatttgagttctgttaaataaagtattgtttactaataaaactaataaaaaattgcctgtattaggcaggggaggctaacygttgtgacaatcaacccttaaatctgagtggtttaacactaatacaataagaatgtgtttctcactcacattgcaatccaatgcagttggcatttgggcggttctccatgctgccattcagggacccagccttctctcaactggtgtctctgtcctcctgtaggttttcaggctcatctctctttagctatcaactggtaaaagagagagcacatctactcagtcaggggatcccacatcacttctattttaccgcatctcaatggtgagaactagtcacgtgcctctcctagattcaaggagagctgggaaaagcagtcagccyaggaagaaggtgagaattccaatactggagaactgccctagtttatctgtgcagtgaactcactgttagcacatggcattttcttactgaagatgttctggatacccgctagagctcagtgggcacgatttgcctagccacccccgacccaaagaccccaacaagcagggacctcataccctggaggtcactgggtagaggctgtatccatcatcctgtcctctgccctrtctatcctgaagagasagttttatcctccacctgccaagctcctcaatgccaggagcttcctgttctccacatgctcctcctaatagatggctcttccctctcgcatcgacaggagacagaggctctaaggcagttgtcaagaattactgcagcccagagaaaggacggggagaatgacagtgattcatcaagaagacttataagctgattgggcaactcatgatcaaagctgtttagctacccaaagggatagcaggataaattacagccagaagaattaacaattttgtaattggcatcttacattgtgaaggctcattccagtcacctgtcactgagcttttaaagtttaggggaaagcatttggcggtgcctgactctgtgtgttcatatcttgctttcaacaactgaaggatgggtttctgagaacaagggtgagatacgtatttataaatgaaatcttttccatgggttcctctttcagacctattttttctgcagtcccatttggtttctagcagtcagtggctcccagcactggctttccataatgtgggctttgctctttttctcttcccgctaccatcaccgtcaagtagctaatgattcgtaaacaggcatggcagcttgcacatgtagctgccacttaaagggccctggataaaccctttgtgaaaatcatggatccttgaataattgaaataatgtctgccctgacccaaggttgggtgaatttcacagactggattttcttaaggcagacaaartttttctgtcctcttttgccaatgaggatctctgctatattgactgccttctatatgtcatataggcagtgcgctagattctgttcttatatctcataaaacccctccaagatgaagaatggtattcctatttcacacagaggtaactgatactcaaagaagttcactaacttgcccgaggtcaccaagctagcaggtggcaaggatgaatttcaagcttaggacatctgactccaacctcaacycagtccccagatgaggtgcttgcctacaggagtctcaagaagatgccagggagtaaatcagcttattaatattttgtaaagcttccaggaaatgacaaaacttgaattcacagggctgtgaatattgtgatagtcaattcaggggtctagcttgcagtgtatgggatcatattcttcctcacacagtaacccagaaagagagctgggcagggcacaggattgggagacagctggttcagtgtgcggtaggaccaggattcaaaagacttgggttctcattcaaactgtacctctgacctgctaaattatttctagaaaatcactttgcctttgcgagtctgtcttcaatctgtaaaatggtgatgatatgcctgtcctccactgaaagggaaagagacccttggcaaagcatcctgagacatacagaaatctctcaatgggtctctgaaaagaaggtctatccaggggcaatgggcaccatctggtattagacaaggaggggtaccttggtatgggactataggatagtagtgcagggcttcaacattagactgttgaaatctaaattctgactccatgactagccaacaatgagaccatgagcaagtttcttcatgtctccatcttaatttcttcatctgcatagcagggataacaatagtacctacctcatacctaatctatgcaaagcaccaggaccagagggtgtcagtccaaccttccctgcacccctaccctcccacactttctcatggtgtttccacatgccagtctccccaccaccaagcaggagggccatggtccatggaacaatctcaagtagccaggcttgaatgaaggttatttgttcctctttgaaaagtgagcacccgggatttcctcatggtctaacagtttgcatctgctcatctatgatgttacagacttgcaggggatgtttcacttcaaagaccacttcatcagagcagcaggaaagacatctgagcattttgtagttaaagtcaatattgcttacgatttcttccagtgctctttccaatgyccctgagttagggaagagggaagtgggataggcaacctaatatttttgagcacagactatatggcagaccctatacatgcaataaagacactgaggcctatagagaggatgtcacaggccatggtcatccagagccaggatttgatactgaggctgactgatcccaatccagaccatggtctcttgagcatacaagagaagggatgccgccaatacgttttgtcaaccaaacttgccctctgttactacgtctccagcatagaggtgtgttttgagaggcgagtgggagctgagraatggcctctcagtttagatctgagatctgaaaaaatttcccagcggccacgttcaggtataaagaaaacctcagcagaaggctcagcaggttacatcgtctcagttgaagttcctgaggtggggctcaggtcttccgttgaggtcttcctcagkctgagcaggcttacccgatagcattttctttcctaacattcccatctggttcaaaaagccttgccctgatccttgggaccactagsrggcaacagtgagcaggagacagatagtccagtggcacaaaagagcacaggcatgaggagtctctttccccttcctcccttccctgtcccacccaccttgccataattccaaaatggtgaggggcatgggggatttctcttggtgcagtcctggggaagaggagcacactttggagcgcctgttttatgcaaaatgctgcggtagatgcttcagtctatatgttaatctcatttaaaactccctgtaaccctgtaatgtaaagctaagtattcccattatacagatgaggaaaccgaggctcaacagcatttgtaaaacttacccatggtctacaggcaataataacaacagctgccattgactgagcaccagctgtgttccaggcactgtactgagccgtttgcaatcatgagtccatttgctgtgtatctcatcaaatctaaggtaacaactccaactgtaagggtcaatattatttcatgtgacagtaggaaagaaaaacactactaattaaaytaaacacaatgctaagaggccattaatggtaagaygttatagacatgttaggatatagaaaattatgcatcttaaaatgatgaaacatagaaattctcaaacagtgagatatgagctgttattcccagcttatagacagggaaactgggccaataaatgagacagccagccccaaactgtctacctttggcacacagctaagtcttttarccacaccatgctactcccaaatattgacaaagaagtcactgtgttccattgtgccgacactctcctaggacattccattcagtctgaacagyaaatctgtggggccgtactgctgtctcccttctacagacaaagggacagctgagaattagaatccagacctgcctaataccaaagtccacgctcttttcacaacatggtacaccayctgccccttcctgcctctgtgatccccaaatgatctcttctggaagcccacatggcatcctgtgtggacactgatgtcacttggttgagcccctgatgaaaaggtaagagtgcatgtccttcttggggaccagcaaggaggtcagggaaacctgraagaaaataataygtaggaccagaccctctctatcaggtgaaattgacagggaatccactctctgcagccacaccccaaagtccaggcagacagggagacccccgtaccagggacaaagatccaaacccaacctggaactccaggccctgggatgggcccacaggacccagggagaactcccatccagggagtrctrgggaaactagtcaggtttttaaggcccagggctccagacctggagcagatttcaagkactcaactgcaccacctgtgtaatctgtagcagatgacgtggtctctcttgactgaatttcctcttctggaaaatgagagtaataaccataacatgcattaggacatacaaggcccawccagaaattaagccccttacctggattttactatcaaaattcttcctagctgtaggttgatcttgagagatacgttcaagtgtgagctcgctggccatccccagtttcctaaggcatgatcctcagagacgagaggccctagtgagcagtgatcaagaagctatggggctttactggttcacaaactgaartgtgcctgtccatgagagagatgagagattcttagtcagctcgaggtgccatagcaaaatgccacaggttgagtgccttaaaaaacagacacttaccttctcttatttctggaggctgaaagtctgagatcagggtgccagagttagtttctggtgaggactctcttccaggcttgcaaacagccaccttcttgctgtgtcctcaaatggcctttcctcagtgctcacgtggagagagaaagagctctgctatgtcttcctcttcaacagacaccagggactccaaccttatcatcttgcttaaccttaattacctccttaaaggatctgtctccaaaaattgtcacactgggggtaagggcttcaatatatgaattttggggaggagagacagacaattcagtccatcacaaataaaaatgactttgaactcctgaggtagatggtatatttatctttccatcgcagtccttcctaattgtcaaagcattcaagattacatctakgaagggcagcatctgcccaattcccattcaaagttttcatgatgtaccccagagactttaaaaccaatgctggctagagcactggctcarycatatacaactgaaatcatttagtggaaaagaaagcctcagccatatacaactgaaatcatttagtggaaatgaaagtactttacttgctgtaaagtaaggccaggcatagtggctcatgcctgtaatcccagcactttgggaggctgaggtgggagaattgcttgagcccaggaattcgagaccagcctgagcaacatagtgagaccctgtctctacaaaaaataacaaaattagacaggcatgggtgacatgtgcctgtagtcctagctacctcagaggctgaggtgggagggttgcttgagcctaggagacagagggtacagtgagctatgatggtgctgctgcactacagcctgggtgacagagagaccctgtctctaaaaaaaaacaaaaagtggggggagggatctgtaaagtagctccgccccatgtgagacatgtgccccagtatgccaaggattgcagcatttctaggratgaggacagggaattcaccctcaactctgagagggaagggggtcaagaacataaagtttggatcccagatttcaccctggcagaatcccataaaagccacacatgttttatgcctgtaagcatccactattcccccactgaaaagatycaggaagaggacaataaaagatgaattttatggcaactgcttggtgtgcacagagcttcctgcgaggccatctcaggcgctgagggatgcagcagagccttaatcatgcggcatcacgagtgcagggaagaaactcatccagctcttgagcctgggctccrgggttggttctgccctgtgggccccctgcccctgcagtagtgtcccaaaggaagaaggtgactggggctcattctgacgactctgcccggcctccagcggcctccctggtggagtgttgggcgtggagttgtcaatctgctgcagctgccactcaagggagaattatcagtgaggattaactgaggctgcacacacacagaccctgacatgttgccacccatgcaggggctcaacagacatccccttccttttttattcagggctaagccctgaagcttggtgctgggtcagctgaaaacaaatctgttctgaggctatggagggctaaggttgtggtgggggagcatggctggaggggaggacaggcgggctgcagaggccagagctgggcaggcttcccctgtattcagctccccacacacacacacccagcacccactccctcacactcccagcctgggcaaaagccaccctgggacaagagacactccttcatttcccactcaggtgggggaaagtggattttgaatagagcaaaagccaaaattgcagcaaatgcattgagrtgtgctctactttaagaaaacccattaagcaaatattccaacctggacccaacttccatttcaaatacacccaytgaaaaaagcaaggaaataaaaggccgctattccaaaagagakagtgaatggargccaatttataccccaacaaacgcactcctgaccccaccccaatcccctgcccttgtcactcatccaggaatgtctccattgccatgtaaatgtcatatgtgtaatctrtgttaaggggaagagtagaatgatgggaattgaagatggatgactagctaaggagcagagtcaagccccaratgacaccacagtacagggaaacaaacaattcacggctgcgcctgtgcactctctggaggcttcattcacaccttagtccatatgagtagaccctcttgcagttgcgcagtgcatgctctgcatagctgtacccggcagctctgagatrgtccaattcacatagagaaaggtcacttctcctgacctcttcagattcttcagctgagggtggaagttggactcaggaattttcttagaaagatggaaatgcaaccataaaaagaaaaagaggaaacggaggaggagaaggcrtgtggggagaaaatgcaggacagagatgcaatctggaatgaaaattgcccctttccagcttacagaggagtcaggactctccctctcagtactatgtcttgaggatcccaacagcactggcaggtcagatggtggcccccsccatgaccctggcccagaaaagacaaagctgatatcctagcctgtggctggaggggctgaagaaaagctgagctctgagaggtaaagtgcctggccagccccccattagccmagccacacctgcgtaactccaaagcccaggctccttcctgtgggtgagtccacctccccacctgcatccctggaacacttctcctccccctgtttcaatcaacaaatcatacacggaggcaatttgctgggaacatgcttccggcgccgctgacagcactcgcccaagaaattgtgtcccgatgaagatgtgattataatggtgcgtcggcatgcacaggcacactgaaaacactcttcttgctgaggcggctcttatgttggggagaggaagggagggcacagatttaacaggggcgagacctgctagtgatacctaggattcacagtatcatttaacaagggtgatacctactagtgcrtgggtaggattcacattaacaattatggagaactgttcaggccctcagctggtacagtgttggggctgctccataggcaccgggcattgtaccccagcccaacactcacccacatgccagccttgctgtattgcttgaggcttccccacctctttatacctctttatacytctgtatctctgcacaygcagtatcctctacccagaacacatttcccactcctgatctgcctaaaaaaacatagtctttctaaactcagctcaaaggtgaccaccccctccataaagtcttttccggatggcacccccaattagttggaycatgccctcctcagtgcccccactacgcctsgacattatgmccccactatagcatttgcttggttatgtgcatgtctgttcttttagactaaaccccatgggtgtaggaatcatatcttattcatcttcatagcctcaattcctagcagtgtttctggaacagattagtgcttaataaatgtttattggggccaggcgtggtggctcatgcctgtaatcccaacctttgggaggccaaagcagacagatcatttgaggtcaggagtttgaggccagcctgaccaacatggtgaaaccccatctctacaaaaatacaaaaattagtttcgggtgcctgtaatctcagctacttgggaggctgaggcaggagaatckcttgaagccaggaggcggaggttgcagtgagccaagatcttaccattgcattccagcctgggtgacagagcaaggctcactctcaaaaaaaataaaaaaataaaaaatrtttattggacacatagaaggtggatgggtggggggcatgggaagatggatggatggatggttggatggatggatggatggatggatgratggatggatggatgggtagatggatgaacagatggacagataatgggtgggtgggtggatggatggacagatggaaacaaaactgcagaggctcttatgacatcaaagcttaaaggrttctcgcagagctccagaggcatatctagagccagcaaggcccaagataaaagtcgtgttagaatgagtcaagttatagtctttcaaaaaaaaatcctgttgcttttttgcataaccaattcacattttctgctcttatcacattctctcccactcatagacatttttgcaatggatatgagcttattattttattcatcacaaaccatgggtagttcactttttaaattgatttttgttgctcatcaaagtgctatatcagctactactgcaacttcgcttccaaccagcacaacaatcagctgtgtgtgattccagggcaggaggagggcatccccagattctgatggggtgattccctgtgtggtctgattgtccaaacgccagtcagggacactccttcacaagcaggcaggttgtggttactgttcttgtggggaagtcatgctgagcacattctgtattttatataatacataataagttttgtctgttctctgtgaatatttagcaatgtgtggtttgatggtttctacatatgaagcctcccaaaatggaacatttcctctcagttccaatttcaatcaaatggcagtgtttagataagttctaagacagtgtctgtgattgattggtgatgtttgccatatgcccaggattggagggaatggggagcagtcccctggtttgccttatagagcacccaccacctgtactacacaacaggttatctattctgaacctacatgctgcagatgaaaatgctaagtctcctagagacgagagctggttaatagcagagccaagattaggatgtcccctgacccccagccagtagccttgtggtcagaccaacttgcttttgaatcctgcctctgccacttcttagcagtgtggcaagtgactgaagtttgctcatcagtaaaacggggatgtgccgagtgtggtggctcacgcctgtaatcccagcactttaggaggccgaggaaggcagatcacaaggtcaggagatcgaggccattctggctaacacggtgaaaccctgtctctactaaaaatacaaaaattagccgggcgtggtggcaggcgcctgtagtcccagctgcttgggaggctgaggcaggagaatggcatgaacctgggaggcggagcttgaggtgagccgagattgcaccactgcactccagcctgggcgatggaagagactccgtctcaaaaaaaaaaaacaaaacagggataatgtttaatyggcaaggttgttgtgagaactaagctgtttgatgcatctatgcaatrtttcccatattggggtctgaagaactcatatccctatctcaaaaatctctgcaatggcctccagccactcactcagtaattacctctgcttcctgtggactccaccctgctgtggtatattctttctttagacaaagcagtctcaggtggttgcaaaaagtatgatctgctgggttccaatcccagctaggccacctactgtccaatgtgaccagagtcatttaacctctctgggctccagtctcaccaggtatccaacagagacaatcaaagtttcaattccataaggctgttatgaggattcaatgagacggttctagtaaaatgcttagaacagtgcctggcacrtagtaaaggttcaacaaatatcagctatatttataccatcagttaatctacagtgagtcttttgggcaagtagtacccagtctcacagggttattgtggggattaaaagagataatattcttaaatcccttttaatccacagacaccaactggcaggtgttattgctccatctcttaacagtgacttttgcttattcttgatctcatcctttctgctttgaccttctgggttgaacccttactgaagccaggcagaggcaggaggagggtgtctcactgcttctgtgctgcctacaaggacatgtctcccctgagacccctttgatgcctctgttacctgctgattggtggatttgattttagtatgtgatttgatttccaaattgtttaaaaggagcacaataataatcatatacaaacacacttaaatcatgcagcaggatgcaataaaaacatcaaactgaacattatggctcmaaaagcaggctctgatttgccctccaactgggtggggcaagacagaaatttgcacttatagtgggaggcaggaaaaagaggggagctgacaaggcacaaggttagaaacagggggacctcacagggccacctgatcctagaacctagggcctctcggagtatagtgccccttacagatggggcacaaaggcccagaaaggttgagtgtcatgcccaagatcacactggaaatcctgaccatcggctagtcctgaactcagatgtgatttggtgctaagcccmcctcattgtagagcccatgaggaccagcatggacattctgctcctgcctggcttcagcctggttcagcagagtgcagaactcagctgacacccacagaaggagcatttaagccagccctagccaaaggggaattgtcaattccagtggttagaacccgagttctggcttagaggaggcagtctcttgtacttatcctctggtctggggctgggagaaagtaggatagggaaattcattcatttgctcgctcattcattcattcaacaagcaagcatcaagcacccactatgtgtcaaagtctgagatccagtgagcaagaagagatgtggggatgttctgagaggaggatggcaattaggacaggcaaagagaccagccaccatactgccatcttgaatgaaggactttcataagtgctttcctaacctaaagaytcagactcaacaaacgcatgtaaacactgtgcaaggtgcatccatgtctattgtctaatttaactctcaggaagtcctaggagttgcaaattattatctctgttttacagataaggaaactgaggcccagagtagttaggtaacttgaccaagaccacacagctcatcagttcttcccaccacccctcagctgtgtgggcaggaggaggagggagagaacaggctccagggctctggagatgtgcctcaagatggtagcgggaggggctcaggcaaacaggggccccttgagagcaagtaccctgttttactcatctctatagccccagtgtctggccctgtgcctgacgcatcctaggaattaatgaagtctttatatgattaggttgraccactcagctggttgggytaacaaaagcctttctgaggcccccaacaaggtaacagcccagggcgcacccccactcctgyctctcrcactttcaaaggacacrtccatcaggttgagcactatcttgtsaatgatagagccttgctgagcaagctgaacactccttttgactatgctgtctgaaaaacagactgcaaaggagactttttgcctccgttcccaaggcagtttttctcagagagaaggctttctgctggctctaagccagggtcatgctggcctygtcttgatcggtttctccagacaaagaaaaggaagaaagcatgttctgacctaaacatttagaccaccstaatcatctgagagtagcccatccacctaccaccatctgtcctggatggcagtaagtgagatatgtagactcaaagactttgaagaccctggagcttagaaactatctggtccagacccctgatttagtggagcagatacattaggctgagaggttacaattcctgccccaatagtgctcttctcacaccaccarccactacattgcattgctgacaccattgtgaagaagtggtcaaactgttggatgctascttcccagccaataatacacagacagagatcccagagaggagacttcattggaaccataggtcattggagtgtgyctcttcatgactgatgcaaaggcatggccaggtgggctccagccatcactcactgcactccctgagccaacctcctaactagggagatagaagggcaatactgactcacagtgaaaccatggctgccgtttattcaccatctgtatacatcaggcactcttggagatgttccatcttgttacacaacaaggcagaaaaatatcttaacatctagcctcggaattcctcttagggagggaacttcctttccttgggaaaatactatgatatagtgagactctgtgggaaaggatgttgccatgtgccaagacttcagaataggatgaaactgcttaggaacatgttgattctgctcctggaaaagggtaagagcacatgagtgagagagaaaggaggagggagaagaaagagagaaaaagatggggagggagcaggatcaggcaggtgaaggaggagtagaatcctctcttccagtggaaggttttgctttgctctgaggtagccccctcctccaactccctctgacatcttctgtgtgttctaatgctttgggtgagtgggccttctgtacaacttaacaaggggctgcattttatgtcaggtcctattatgcagaacagagagcaaatgtcagccaagggtaatatctgggttacacatactttaacatgttcaaaaatcacagcatcctctgaagcagccaatatctcaggattgatctcatgcagaaggaaaggtcagagaggctcaaccatttgtccaatgtcccccagctaaggtggtgtcagggccaagattcaaagccagcttaatcttgaccacggagcacaggctcttaaatagtcattcccagcggaagaygagccaggatctcagacacacgggtcagtgaggaaagggaggaggccaggccaggcaaggctgaggatcctgacctccacctgggcaggaaccctcagggatacccccaagcctaatggaatttggtccatgtgagcaaatgtccaatccctgtggcaccatgraacagccctgtgagcaccgtgtcctatccctgtggcagaaggcctagtgactgacataacagaagagccaggtgggtatcaggtgagccaggtggatatctctccctgyctccctcctttttcctctctcctcatatatgctttcctgcccattccagaagcagaaaccacatactcttaggcartttcatcatcttctcagcatccactcacagcagcatctaagtcaaagcctcagagtgtgggatgcagacacaaaggagggaagggcccagggagcttggcaaggtcctaggagattggctggactccccttagggctgcgagggctgcggaggccttgggcagctgtgcttgctgcagcgccacctactggtgtgccttaggatctttggtctgggagaggctggaaaartcaatgattgaagaacaacataaggaygtccccaggcaggttaagggcaaacatcagcttctctctacaaaatgaargcgactgttgagagaagctccagrcagtggagcaatgaaagacatgcaccagggtatttaatcacaaaagttctgcattccttgctctgttcataaatttaagcaattatcaaagcctccagttccatagcacagtggagaaagagtgggggaggatgagttgtcaagtacatgcaggagcatctcaatcctgggtgtctctcctcgatctccgggctagctcatccaccctacatgttcattatacactaatgactcccacattcatgtctgtagcccagatctctctcccagctccactcccatagattcatcttcctggtaacatcttgacttggatgtctgaaccgggcaggagtcattatcacaagaaactcaactcaaaataacttaagccaaaaaggcagagatttgctggcctgtttagccaaattgtaaagagagccaaggtggagctagaatatttgttgaataaatgaaaggatagaaaaacatgaaggagtttattaagagaaggtgatgagaactaagtcttggcaagtacctactagcatctgggcactgaacttatttaatcagataaggaaactaaaagctggggctgagggatggggctgtgtagcttacccaaagtcacacagctgtctcatgaaagagwggagttcgaggttctgcatgggtcattctgctatctctcattctcaaattagaatagtagatttaaggtctatgattagacacaaagrcttaagagatcatggaartcatctcatctaactgtacacccaatgcttgaatctctctctcttcccatcccagccaaatagttgtatagtttctacttgaacagccctggtgatggagaagtcactcccaagacagtgattttattattgaattataccagtggattagaaagttcttccttatgttgagccagaatgtatccaatgcttataatgtgcctacctaccasagtgcctgcaacaaaaataaacgttattatcatcccacgttccgtattacaactattcttgtgtctatctttcccttgggatgccagaaaacaaatctaattcttccctgagacagttcttcagatatttgaagatggtgcttcagggtcctcctgagtctttgcttacccggataaacaaatactccaacccactttcagacactcattggtaagcaagagtcggtgctgtgcrcacagtaattttccagctgctgttgtgtgtgaggcttcagagacgctgatggagcaaatgatgaaccagccacagcagggctggaggggtatctgaatcatgacctctgcmaaaaaaaaaaaaaaaaaaaaaagagggggaagtggctgaccctgaacaaaccttggcccatctccagagcttcaccagctacattcattgtccacccattgtaagaacccattttagtagaagagaaacgagtttcccccaaagttaacctgcatcattttagacccccagtccctgcccaaaaggcatgattagtccttccaaaatccagattgtgtgttcatggatccaatattgagcaatgtaggggatccaaccaattcttttttttttttttttttgctaccacacctggctaattttttttaatttggggtttgagggtacatgtgaaggtttgttacatagataaacatgtcacaggggtttgttgtacatgttattacatcacctagttattaagctcaataccmaatagttatcttttctgctcctctccctcctcccacccttctccctccgattctaaatcatagaatatcaacacttgaatgggacttggtggtgtctagcccccaattccttcttatttacagatgagaaactaaggtccagaggggagcagtgacttattcaaggtcatacaggaaatctctgtgaaagcctgtttagctcacaaactgaaaagaaagaggaacatgacaaagtagagcaaggcttcatgggaaaggaagaacagggcagttagagaaaaacaaaagaaaggctgggcatgatgactcacacctgtaaccctagtgctttaggaggcagaggcaggaggattgagaccctaacaacactccatctctaccaaaaaaaaagttcaaaaaattagctggctgtggtggcacatccctgtagtcctaactccttgggaggctgaggcgggaagatcgcttgagtccaggagttcaaggttgcagtgagctatgatcatggcactgcactccagcctgggtgataaagcaagactctgtctctaaaactaactaattaaataaataatgtctgaaaagtgctccatggagggtttctccatccctcccatcgatttccttgacctatggggcattgtggcactgggtcactagcaagcacaagtttaggatctgaaatctgctgactctgcccctcacaagatcactatgtgatcttgcacaggctacttaaccttcctgaaactcagtttcctcatcaataacatgataataggaacatctacctaaaaaaagagccctgcaaatattcaagtaagtataaagccttttggttttcagtaatggtggagaagctaatatcagactaactctcctggaaatagcaatcataaactgtggacaaaatattttaaaactactatttgacagcaccggagagagaccaaaaccaggcacaaactggacagcacaggtttatttacctgagttctcccttgagggcatttcaaagttctaagggaatactggggatggagctcaaccacaaatcagcaggcattaagttaagaaaccagaaatcagtattcrgggttgccagaaaggctgaaaattggaagggaaaatcctagaaaagaggaacccacrgaggaggagccctcaaatttttacacaaatctaggttgaactttgaactgtatgtggatagggagagagtctaaaaagcccagggggatgacaacagttgaaagagctgagcagtaatttcagttgctgccattgcatggggagataggctacaatataagtctcaccaaattagaaaatcttgatgaacaactcaggctttccattaaacccagaagtgttgttccttaggagttaagatcgcttcccaagaccagsggctaaaccccaggactaaagacaaaactaaaatatacctatctctaaacaaagccttaaataatgtctccatgaaatcaaagtagttcaccattaatttaaccacctactagaacaaaactcaacagtattcagagaaagataatctacccagagtcaccaaaaatagttatctgaaatgttcagtatctaataaaaatgactctctcctagtatacaatcaaaaactcctagacacatgaagagggaaaacaggaaaagaaaaataaaccaccaatagaaatagatctacatawaaccccaatgttagaattagaaaacagcaactttacaataacaatcataaacatgttaaataattgcagaaaaagatgtaaataatgagaaacttttagtcaagatatggaaacctttaaaaaaatgaaagccctagaactgaaaatcacaccatctgaaatttacaaattgttgcatggaatcaatagaagattggttacaaaataataaatgaatgccaaacttgagcacaggttaataaaaattattaaaataatacataaagagaaaaaagactaatggaagggaatagaacgccaatgacttgtgaacagtgtcaagtactccaacatgcatataagtggtatccctgaaaggagagacagaataaggcagaaaaacagttgaagaaatactggctaatattttttcaaatttgttcaaaagcatcatttcatagatccaggattctcaagaatccccaagcaggataactacaaagaaagccacagttaagcataatgtagtttaaatcctgagaagcaaagaccgagagaaaagcacaaaggcagccagagggagaaaagggggcataatacctgcagggaacaataaaaagaatatgactgattctcatcagaaacaatggaggccagaagacagaggaataacacctttgaaattctggaagaaaacacttatcaacctagaattctatctacagccaaaatgtttcaaaaataacaaaaaaaaactaagacattataggttttttaagttggttttgggtgtttgtttatttgtttgtttgttttagaggagtctcatgctctgtcacccaggctggagtgcagtggcacaatcatagctcactgtagccttgaactcctgggctcaagcgatcctcccacctcagcctcatgagtagctgatactacaggggtgcactaccactcctgactatattttttacttgctagagacagggtattgttacaggatctctagggtgccgatttttctggctggaaacctctgtggccacggtgcctttgcctgagttcttatcctgcatccaggaagaatgaaggatgcagacaagtgaagggagaagaagaaaaagaagaaggaggagaaggagaggagttttatttagtgttagaagagctcagagaagtgggtagctcctctctgcaggcagctcaccccatcgagtgctcagctctcagcagcgaggaggccctggagggtagctcctctctgctggcaggccatctctgcagctctcagtggagagggtacacctctctgcagctgatcatctcatcgtctccgctatcagcagagagagtactcctctctgcagctggtcgtcctgtccccttgtctctctgacctcttggtcctctggccattctctgttctgctctggctgagcccagggcttttatggacctcagaggggaggaagtgtgtgccgattcatgcatgggcacccatgggtgggcctggaaggggcaccctgagtcccaactccagtgagcaagactggcagtccctcccacagccttcaggccttctctggtctgaaggtggggccttactggggacccatccccttcctgccaggaatcaatctgcctcctgctgtcattcatggccccaaccctgctccaagttcagaggaggctccaagagcatagagaggccaggcagtgggaggagtcacccaccakcctgcagggatgggttggggtggtcccttctggggccactgagggtgcaggctgcagagatgcccagatcctgcacctgggagggcagctgcagctgtacctgggagctcccacctgccaacttggaaggggcagggctcccacttgtcccctgctcctgcctgcttgctggagtgagaggcccaggtctgcagccgtgggtgccgcagttgcagctgcacccccaggaaggcagatcctgcctgttgccagctcccagaagagcacagggaggctcagatacacagctgcagtttgggcggctgtagccccgcccaggagctacaggaggcctgggtctgcagctgtgggtgcagtggcatggggagctccagtcttaactcagaagggtcagggttcccactggctctacggagtgtgcagccccagctrcacagctgcacagctgcagccggcataatgtaagcagccactgccatcggtatcactatgttgcctaggctggtcttgaactcctcaccttaaggaatccttcggccttgcctcycaaagtgttgggattacaggcatgagccaccatgctcagcccaacattgtatatttaaatgaaaactgagaaattttgccataagtaaacccattctaaaaaaaaaaagttaaaagagattcttcagcatgatgggaaatgatatcaaatggaaaattcagatctgtaagaagcatgatgaacaatgaaaatggtatatatgtggataaatataaaacgtaactttctttcttccttaaaagtcaactggctgcttaaggcaaaaataatattaacagtgtgaccagtcacagtggctcatgcctctaatcccagcacctgggaggctgaggcaggtaggtcatttgaggtcaggagtttgagacaagcctggccaacatggtgaaagtctggctctactaaaaatacaaaaattagctgggcatggtggtgcatccctgtagtcccagctacttaggaggctgaggctggagaattgcttaaacccaggagacagagattgcagagagcagagatcgcaccactgcactccagcctgggtaagagagtgagactttgtctcaaaaaaaaaaaaaaaaaaaaaaaaaaaaacagtgtattatagtgcttataacagatgtagaagtaaaatatatgacacagaagcaatataaatagaattatatgtgaactggcataatattaattcaaggtatattgtgatgttaagtatgaatattgtaaatcctggagcaacaactaagaataataatacagagctataaattgaaactcaatggagaaaacagaatgaactactaaaacaatattcaattaacccaaaaagagtcagaagagagagaacaaaaggagaactagaaatcggtacaaataggaaacaaagaacaacatgataacttcaaccgaactatatcaaaaattgcattaagtgtaaatagatcaaaccttccaattaaaaggcagagaggttgtcagacaggataagatacaacactcaaatagatgtaccttaaaaacacattcaaaaagagatgtaccttaaatatataaagattctgacagttaaaagtagaaggatgaaaacaaaatagtagatggaaaaagataaatagtaggagaataaagctgccatgtctgttatcatgcaaagtaaacttcaaaacaaggacattgtatgagatgattattcacaatgatgacagggtcaagtcatccagaagatgtagcaatcctaaatatgtatatgcctaataagtttcagaaatacccaaagcaaaaattgagaaaactaaagggagaaacagacaagtccatagtcatagttagatgttttgatactcctctctcataactgattagtaagcagatgaaaaaattagtaaagatatagaagatccgagcaacaatattaaacaactaaacctaattgccttttgtaaaacagtacgccaacagttacagaatgcatatacttttcaggtgcacgtggaacattcaacaaaatcgaacattgatttatttttcttgtccagtatcataaaaacatytcaataaatgtttaagaaatgaaaccatggggaggatgttttctgaccaaaacataatgaaattagaaattattaacaataaggaaaaatagaatacaaattaccagtaatcagacatgaaaagacataactgtaaatcctacagacattaaaaaatgataagaatattacatacaactttatgcccacaaattcaaaaatctagatgaaatgaacaaattccttggggaaaaaacacaacttaccaaaactagcacaagaacaaaaatagaaaatctgaatgtctctgtatctattaaaagagttgaattcataattaaaaatcttcacacgcatacacacaatcaccaggtccagatggcttcactggcaaattctatcaaacatttaagttagaaatggtaccaagtccgtacaaaytcaaaaaattgagaaagaggaaacacttgataactaattttatgaggtcagcacactcccaatacccaaacttgacaaggaggttataagaaaagtaaattaaatacaatatgcctcataaacatagatgcaaaaaacctccacaagatattagcaaattgaatagagcaacatataaggcggataataaattatgactaagtggagtttatcccaggagtgtaagttgggttcagcttcttcagatcaatcaataccattcactgtgttaatagaatgaaggagaaaaatcatgtgatcatctcaatagaagtagaaagtatatttgccaaaatatatatcactgatgataaaaactctcagcaaatgagaaataagacagaactttctcaatgtgacaagcacatctaagaaaaatatattcctaatatattatggtgtaataatgaaccctccttcctaagatggaaaaagggaagataycctctctctccagttttattccaacatgatactggagtttctagctaatacagcaaggtaagaaaaagaaataaaaataataataaagactagaaaggaagaagtaaaactcggcaataaaagagaatgaactactgatacgtgcaaaagcatgaatgaatctcaaaaacattaygctgagagaaagaagccaaacacaaaagaatgcatactgtctgattctatttatatacaacactaacacaggcaaatctrgtttataacaacagaaagcatattgggggttgcctgagggttggcagggaggcagtgactgcaaataggaaattctggggattcatggaaatgttctatatctgattagggtagttgttacaagggtgtatacacttctaaagatttattaaattgaacattaaaatggatgcattttattgtatataaattatatcttctgaagttgattttaaaaaatagataccattaagaaaatgaaaaggtaagccacagactataggtggtatrgacaaaatatttacaatacatgtgtctgacaaaggacttgaatccagaatatatgaacaactcttacaacccaaaagtaaaagttaaaaaataataatttttaatggacaaaaaactcagacatttcacaaaagattatatatgaatgaccaacaaacacataaaattgtgctcaaaatcatccgtcagggaaccacaaatacaaatgagatgcaaccatacacctacaaaaatggctaaaatcaaaaaggtggaygaagtccagatttggcatggatgtagagtaatgagaattctcagacactactggtggaaatataaaatagaagaacmactttggataacagttgggcagtttcttataaagttgtgcctatacctatcttacaaaccagctgttccactgctagccatttactcaagagaaattaaaacatatgtccacaaaatgacttatgtataaatattcataggagttttttcatgattaccaaaaactggaaaccatccaaatgcccatcatcaagtgagtggataagcaaattttagtgtagtcatacataatgctggaaaactattcagtaattaaaaggaaagaactcctggtgcaaacaaccatgtagatgaacctcagagacactatgttgagtgaaagaagctagatgcaaaagagcacatagtgtaagctttcatttatatgaagtttgagaacaggcaaagccaacctatggkgagagaattcataaccgtgattacccaggtaggttggggactgattggacagggacagaaacgaactttctagggtgttttaaaatgtcctctatcttggttggtgtgctggttacatgggcaaacacctttgttagaatatattgaatagtgcacttaatatttgtacattgtattgtgtttttattctttaatcttgaaaaatggatataaaggactcaacacctagaaaatgctcaacaaccattagttccctcatccttcacccttcccactaggcaagtaccatagatgctatgagagcatttatgatcactggacctctgaaaataggaatgtaattttctccaaagggaaaaggtgccatctacagcatgacttggaaagtctctctagtccaggcccaggactataaataagaaggatagtgcctagagccatttcattctgaatcttcctctgggtttcgtcctccaggtctaggtctgggattccaatgtctcaaaccaagagggtggaatttagttgggtctttccaagagatgcaagatggcaaaatgtggaagtgggaagacatggtgggggtaagagactctgaggagaaccgcatttatgggaagattataaaagataagttagggtggggcttgatggtgcccacctgtagtcccagctactagagaggccgagacaggaggatcgcttgagccaggagttcaaaaccagcctgggcaacatagtgaaactttgtctctaagaaaaaagaaaaaattaaagtaaggtaagaaaactagtattggagccagatgttgaaggtctataaagttaatggtatttaaatgctcaataattgtttgttgattgagtaagtaaatgaatgagttactgagtctgttgaggctgactgccgccccctccttcctgtcttrcagctcacatacctgcccccaccgtggggtgagtgccgatcctcagagatgggcctcgacttttttcctgtttacagcatcaccgcctgtaggattgactgtgagacccgctacattgtggaaaactgcaactgccgcatggttcacatgccaggtcagtgccagggcagggtggccacagggcccctgggatctgcctgggacccaccttgcatttctcatcctaatgggaaacacttcacccacttcgctgggatccaaaaggatgatgttctgggaagactctsttatttggtgcctattaagagggcaggtggaaacttctggtccagcaaccaaggcagcatcctggtatccagaagcatccagtgtttggggaatgttcatcccagtgttcaatgtttgccagttgtctgctgttcttacctctgagagtttagcttccagataactggatgcttgcaattcttgcagctcgtgtagtacatgtttgagcatccagatgtttctttcatccagatgtttcactttttgtgtccaaatgtctagcactccttcaaatgaggcaaaagtctattggccagcaaataaatgtgcacataatgacacctctgttgtcagactaacaatgcatgtggccatctcacacagttggcttatcagaggctgaagtgcagagtggaaagctgatctggggaggaagagcgcagtgttgcagcaaggacacatgagtggggccttggtttctaattcaggctcttccactcatttactgtatgacctggttactaaacctctctgttctcacgtttatgaactttaaaacacaatcagcagctgttataaggtgaaaattaggctaggatataaaaatattttgtaaactataaaagtcagtggttgttatttagcatattgaaagagggaaccaaaagtcatgctgaytaaagacctactatgtgccgggaatgttgttattatatttagtagctgttatttcatggttatatcatactttattcaattttacttaactaaatccttatactggacatttggttcattaccaattgttttctgtgataatctgtgctgaaaggtgggcccaaatctaatcagagtcctcaaaatcaaccccccttttccagccagggtcagagggagatatgactatgaaagaagggtcagggagatgcaaacttgttcactttgaagatggaagaatgtgggtagtcgatgcatgtgggttgccagtgaatgtgggggtgacctctggaagctgggaaaggcraggaaatgaattctcccctacagccttcaaaaagaacattggcctcccacccaacaccttgattctggaccaatgagacctatatctgacttctgacctgctaaactgtaacataataataaatttgtatgttttaaatacgaataataataaaatggcctctgagcttcctagaaaacagagcaaacagggaaacatgtcatttaatctgttgtttttggaaaggagaaagcatattgactcttcggctccgaaaaaggatttggggaaaatgataaggaaaaaaacatggtggactttarctttagagsttggtaaaggaaaagaaaagatcctgggtttctacaaagagatcccagcaaggagaatccagtactggggaatattactcacctgatgctcagactaggccaccagccagtgaggttttccccaccaacccttagccaaaggcaagcagtagaggtgtcaatcacacccatgacactaatactgacatctcagttactaatgtggaattatgaacaaagcaatgaagaaacacaaaacaacccttgttcccatacagcagtgtggttgtgctgagaagagytccaggctctggatcagactgacctctgttcaaagcccacttccatcactactagccttggtgtcctgggaaggcaggatgcttaagcctcaaaattatcatgggtaaaacagacacagtacttctgacttcaaagggtgcctgtatgggttaaagaagatgatgtatagccaggcttacaaggtgcttaccaccacctccctagtctcaatcctcaaggtgwgcccacctgtcacccacgggagctggctggacctacacagaaacatgggagaagttagccatacagatcctactgtctcctgctcaacgaggtgaacagcctgcccaagcttacatagcagatcagaagccagmcttccagctctggggtgcactgtgatccaaggctcccttcgaactgcccactggcaggccgctgccccttcaactgccaggaggcacccctttccctaagcccaaagcagaggaggtgttgctgacatgaatgttcctgcctgagtaactctgtctggtgtttcttctttgcaggggatgcccctttttgtacscctgagcagcacaaggagtgtgcagagcctgccctaggtcagtactcaggggacagatggaatcatgggggccgggggcctgagactgagatcatggaaatcatctgggtttggggaaagatcaagtggaagaaggaatggagagaggatgagaagaaaggggctggtcgggtggagttgctgcagggatgggagagggagatggagaggaggaagaagagaaggttgggaagggaactggtgcaagaggatgagggctggaaatgggactggggagagaaagagatatggaaggtggagatggagaaggagtgggtttcaggggaaacagagggtgctaaggaatgcaggggagaggacagaggtggagagaggatagacagtgggcagccaggtaggcatcagaggagcttggcaatacctcccctcacacactctgatggtgtctacatggggaggccaaggtgattytgaagtaccatctttcttctgctccattgagcctaggggaggtggaggagggctggagaggtaaagtcaggtttgcattccatgcrtgcaaatggaaaacacaaagcacacttcttcctcctgcctgaggggcctgcggggggtctgccagttagaagacctctgctggttccccagctggaaaactaggagggagggagagtgcacaaacaagctgcagccccaaagctaggcccactctgcatgcttgcctctctctggacccaggaaatggcttataatcaagacaagcagactttttaaacaatgtgccctcaagttcgttcagcatctgcacttgctggagctaagtgaggcagtgctggcctcaggtccagatacctccaggaggactagagagggagggcaggctgagaggagagggagtgacttctgatgtgtgcaaagactcagcaaaacccagggtagctggaaacactgaggtggctagaggaaaaagggagggaggtgttaaagaaaaaatcactctgacactagttaaaatggtaaggaagtctttattcagggcaattgcaacaggtgtcaagagtatcacaacaggggaaacagatgggactcaactgagaattcagccaagacagctggagattcatagccatcaagcagagcgaggactcagtagatggaaaattacccagagaaaacatcaaagttagggggaaatctgcaaaggcaggccagggtgatcagatatcaagggtgggggattctctctaaactgactttagcaggattcttgctaaaactgggctaggcccgcccagcatggatgggggccaaggtcaaggcctagttgagaacagggttctgaagagcctggctaagtttgatcagggagaaagtctttgtcagagggaaatgatgccttaaactttatgtctaattggaagaagagaggagagggcaggaagggttccagatgcagggagttgcctccagggaaagaaatgaaggaactttgcctgcatcctaacccaccaggcagagaaggtggggcactggcwatgagggagccccagcaggaagagcacagagccctgggtttcagataaaatggtctcctacatttgctttgatggtggatcattctctgtggatgagaatactgaggctgggagcagggaagaaagccatgagaagctgaggacaccaggactctcttggagacctctgcaaaagtggtcccatttcaacaatttttaaagagtgacatgacagttaaaagaagcagaaggaaaacaagatcaacctacagcaaaagcccmgttcccctctctccacaatccctgcccctcactttccccagaccagtgccccttcccagctcayttctcagctrctacaatccagctactctggacccttagaaatcccagtgcccacacctgactaagccccacctcactctcccctccaggtctgttggcggaaaaggacagcaattactgtctctgcaggacaccctgcaacctaacccgctacaacaaagagctctccatggtgaagatccccagcaagacatcagccaagtaccttgagaagaaatttaacaaatcagaaaaatatatctcgtaagtttagtgggcatggtaggcagggggaagggggaactggataaggaggaaattggaggcaatcaaggaggaaagcaaagataagcatttggttcaagttagcaaacattagttgaacaccctctgtgtgtcacgctctgcgctccatgttcagaatacaaagacaaagatgagtaagacacagcccctgcccttaaggagcttgcagtcttatggagagacaagcacacactgaatggtatatagggtgactttggctatcatagggggatgcatagggaaggagagaatgatgggttagctgcagcttgcaatgaggtgacatcagggaaagcttcagagaatttttttttcttttttttttttttgagatggagcctcgccctgttgcccaggctggagtgcagtggcatgatctcggctcactgcaaggtccatctcctgggttcaaaccattctcctgcctcagcttcacgagcagctggaactacaggcgcccgccaccatgcccagctaatttttttstatttttagtagagacagggtttcaccgtgtgttagccagaatggtctcgatctcctgacctcatgatccacccacctcggcctcctaaagtgctgggattacaggtgtgagccaccgngcctggcccagagatttttttaaaggatgtatagttttccaggcagaccttgcacgttctattccctctgcctagaattcttttcctcccagcctccamctaactggttcctccttaagcaggtctccatttaaatgtcatctccagccagacatggtggctcatgcctgtaatcccaatgctttgggaggccaaggcaggaggattgcttcaggccaggagttcaagctcagcctgggtaacgtagttagaccctgtctctaaaacaaataaaaaataaaaataaaaataaaattgaggttatcccaggcatctagatgaggtgctctcctgttatttttctctcaaagtcctctggtgttttcctttataacaccacagtgtgtaattacatattcatgttgtgtttccttgtttgttacctgtctgccccactagactgaaagcccctgagggcaggaaactatcttttttgttctctgttgtctgccaagttctagtggagcatatggcacagagttggtactcaaaaaaatgtgttttaacagaataaatgaatggaagcatgggagaagtgggtgtcctaggcagaagctcagcagagaccatcagcacagggcagaagagaaaacttcaaaggggaacatggatatgtcagagcaagagggtcttgtaggctgagccgagtgggtgcagggggtgggctttatcctaacagactagggatcccctgaagagctttcagaggtgagtgacagactcaaatttgcatttttgcccactgctccccaataggacgaatgctgtgtgatgatggaaatgttctgtgtccgcaatgcccagyggggtagctgctagccacatgtggccaacgagcatttgaaatgcagcctgtgactggggagtggaactgtaattttatttaatttgaatcaagttagcagttttagaaagatccttcaggcggcgatagagaagacgggggaaaggcagatgggaagaagggaactgttaggaaacagctgtggcaagccaagcaagagaaggtgatactttgaacagctgccctgcgagccctgctcacagaaagaagaatctgctcctctcttcgccagcccctccytcttgccaacactgtccccagaccccatcctgggccagcttctgctcagtgggttgagaacaaggggcactggaggaaytgtgggcacattggaggagacaggaattgtaggggatgccagtccctgctgcttggcagacagtctgcaggcagtaacgacttttactgccgagatgtgtctcmctcacacacctgcccaaaggagcaaagcaagccgyggtgcttctgccagaacaccccccagccagawgtaagtttgctccctacaaactttctttgacttctggcaattgacttgataatgccagagcagggcctcccaacaggaggagcttgttataaataccagtgggaatttagggggcctcaggagtgggcaggggctgcccatgaggtcagctggagcaggcaccctagccaagacaagccttgtcagaagattaatgaaactcaccttcatgttgaggacgaggcaggccctttggaggcgcagaggcctggaagccaggcaggactcctgcatagggtgcaaagagaaagcagggagacagaaataagcaacaaaaggaggcaactgatgtaggcctccagacccgggctgggagtcaggcttcttggcttgaagccgcagctctgccactaaccagctctaactttgggcaagctgcctcacttcctgggcctscttttctccatctttccatgggaaagctgtattagatgctccctgtgaatgctgatagctctaaccatgtatggtactgactattctctctgcagagagaacatccttgttctggatatattttttgaagctctcaattatgagacaattgaacagaagaaggcgtatgaagttgctgccttacttggtaagtcagtgtctattgcacaaatttccacatctcatagagggtgggagggagggaggatgcacaggtggatgggaggcaagcrgacagacacatagcctcggaggagtctaaccttttgatttactaataattactccctgtttccttgcactgctcctctcccagaatggaaagaaccccagcagtggggtggaatttcaggcccaatttattccccaatcttggcttcattttccccatctatgcaatgaggacggtcagcctaaakgtctctctgggcctttctaaccctgcactcttggaattcatggtcttctgccccagcttgcagtcaggatcctggggccatggagagggggcagaggtatcagaaggagagaargagggaaggctgaactgtgggtggtcaaaggtgggacctgggaggtgagggccctgatggaacttcaccccaaaagcaacattgctgcatccagaaggccaggtgttgccccctggactgagagtcatttgtcaaacacaaatgaagggccactctccccaggtatctacaaacctgctgccaccccacaaaagttcgcatgagctccccggctccagtggcatctgatggatacaggcagctaatttccatcctaacccagcccaacccaaaactcacaagacccctgagagtgcacagttaarggacttgactctaragcccttctctcagctcccactcactctcaagaaaggatctgatgcctgtaaaccaraaagagaaatagctgttgtctccctgagctgaaccaggtgacgttagcattttggaaggggcaggtgcctcctacctggcttctcacaccagctatgagaatatgggcaagtagctttaccttgctgaacctcaggttcttcatctgcaagatgggtttaataaaacccactttatgagcttgttgtgatggttaaacatgataaccccctagcccagaaaaggtccataaatagtagtttctggcacctggacaatcastatgccagggacccagggctcagctggtgtgtccaggggctggctaagcatttctacactttctccaggaggctggggactccccaccatagctcggtcccagctgggttaaagtggctgtcactcagcctcagaagtcattgtggccaaaggtactgagccaagagactcattcccttggccccagcagagacatagacccctcactcacccctatgctggccttgccctttatttccataaagaggacccaggacaggcctcttcctaccccctgccctcccccagcataggctcacagtctttctctgtctctctgctctatgtgcgtctctttctttctctctctctctctctcacacagatccctctctttcacagagagagagagagagagagagacatacagagcaagaagggcctgagctctgaatttgtcatgtctgcgtcagatatgaggatgagtttgttcagcatcgatcgtgttcccatccagaatagccggctgaggagctcatgctgccatctggacctcctgtgatgagagcgtgtgccgcttgcaaaccctcagccatcaggtcccatcaggcccttctctcagcaccgcacggccctttctcacctcctggtgtccatgcacgtgcacgctacacacactacccacagcataccccaccccartctgcaygcacatgcaccaaacctacaggttcatgcacccacggtggtccaggaccacacacacaaatgcacacctctacagccccacgttccaatcacacagctagagacacatccatgcacacagcccccacacacccccatatacacacacaagcacacccacactacacacgctcgacacactctgctcacctccacagacccacactcacacacacttagacacactcagggtgcctagacagggagagccacctacataaaaccatagacagccagacctcctgcctgcttttatacaaatacgtgcacacaccccagaccctggcatataccccacactataccactacagactcacactgcacacgtacatcacacacctcccccgacatayatatccattagaacacagtccccaagaagcctccattaaagacatgagagggagcggtgatgggaaaggaatgagggagagccagtttgaggccagcaccgcgttccactgggaagagccttctccccaccatctctgttgttcacccgggcatgtgggtgctggaccccacccagccataagctgagaargagtggggcagatctgcctaccagagagttctcaggccaagaggtcaagctggcatctccaagagaactgtcctgccacccccaactgtgccccccaaacccaattcccaaacctctttccagagactgagagtcttagagattagggctggaaagaacttcatagttcatctcatccaaccccctccatcctgccaccaccaccaaatatcctttggagacaaagctcctgagaaggtcagggcttatgaaagccacacaaccagctggtggccactctctggactcagagcctcagagccctcggctctgccacactgcctctgcagcaaagcatcttaagcttttgaggactcagaacccctgttaaaaactgataatagctatggactctcctgctacaaatgcccaggcacacatacattttgcattcaatttcaggagagtctccagccatctgaagtcctcccaggagagtggttctcaaactctggtgggcccgagaatgcaccttacccccagcgggaacttaaaaatcccgacatycagaccccaaccgcagaggctctgattctattggcctaggtgtatccaggcagcaacactgattacaattcttccaggagagtykgatgmaggggtatctgaagacaaatccagaaaactttgaataatgggggcctataaaccccagagtaagaacctcagctctagaaagagtcaaaattgcacactaacttttggatgggggagagaggagacacctatggccttatcccaagggtgggaggtgccctaaggtggccctgaagcccatgccgtgattgggttaggggagcatctcctcccgagactcccacccagggcacctgtcaccagtccacacacatcctagctctctattctccctactcccagcccagagtcaaaacaggacccaatcggtgtggttttgagtgtaaccaaacaaccccgttagccctgtgggtcatgagatctagtctaagcccttccaataagccatcagcttagtccccgaccccactgaatgctgaaaaatggtagctctcagagctgtgcyrtgagggaaggaactgccaaaggcctggacctcccacaacaaggcccaggctccccatggagggggcgccattcagaaggtctgggttgcatctcagtctgttcacccttcctggaagctgcataaaagcaaagctttggtcttttccctctctctccaggtgatattggtggtcagatgggattgttcattggtgctagtatccttacaatactagagctctttgattatatttatgaggtaagatttgggattccccacagggaaatgaccgcatgctggtgccctcatcgtgccccaggttcagaatcatrgtagagggaaggcggtgcctctctccatgcagagcytgcttcccctcctgtccaccaatagagtcgatcactgaagcccaggctctgtggggcaaggggatgggaggtttttggggggcggtggatgtaagagaaacacaggcctatcctctgggagctggaacagcactgggccatctacactggcagggaaggatggggagggatgaggggaagggggccagactgtgctgaggccagctccaagcccctcctgcagctgggctggaggtggtggcttcatccatgagcatgtccrcacctgcacacacactccctccacccacacacacctgccctctaggtggcccatcacctgagtcatgtcctctgtggcccagccagtcttagggaaggggcacttcccagcagtcctcaccaatcctcagcgagaagacagcagggcacgccagccgccccggctgctgacagtctggggaaatgtctccctcaagaggcagctggaacgaggcctctgaaagctttctctgacaatgagggttcccagagctggggtcagccttctcacctgcatctctctctgacagcgagcctgtggatgccactatcccaggctctgttttgacgggtgttcccttggaggcctccatccccctggctgtgagatgggcaatgcacttcacctccaatgtgtgcccctgaaaatggcaatggctccagaacttccaaagaatgcctggacctatgaagtcccccaaacaggagcagtagacgggagcctgcagaaccatgttctgtctctcggagggggctgttcatgaccaaaggctgctcggaaccacagtagggacctgtcgtgccccagtaaccaggctcctctggagaatctcatgcgtctcagcacagtgaccccaaaaccacatcagttcccatggccagattttattctgctttgtttattgacttttstggaaaactgtacacagttatggcaattgaatcacaccaggtaacagattkaagaactaccctctattgctaggagtaaaatgttatgaactcaggcatgtcctggtcttctgaattgtgtgcagtgtcaggcctagcaagtgaataataatcttgtcccccagccccagccacagaaagggggtcccaaggctgctcctgaggacagacmgggagccagcataccagcacacaycacttactaacactcgccagccacaaagacagcagttcaccctgtgaagcagggccttccattacctattcctagctccatctcctgcaacaaaatcccatttcagccaaaaggctgggttgagacagacaggcacctggagctggctgccaggstgggcttgtgctacrgtatgttcagccacagcccaagcagctgccaccccagtggggcccaatggagggaggtcccttctgcctctgcaccctcttcccggcctgaccaaccccttcctgcttttcttgcagctgatcaaagagaagctattagacctgcttggcaaagaggaggacgaagggagccacgatgagaatgtggtaagagcagctcactgattggaagttgttctgctgctcyggcttgtaccggcagtacaaaaccagatgctggggccgggcaggaaagatgtgactcactgcacacctttccatggcttgggacatgctgtcagttcccaaatccaaggacactccagctgagcctcgagcctctctctgagrgtcatgccagaagccagtacggatgcagcagacaccaggaggtgcttccaaacataggaactgcctggcccaatccagcttctcccaggcagacagctgcttcccccatctcacagcagggggagaactggacaggctctgtacatctactcccttattccccagtggtggcaaagtacaagcaaagcatcattggccctccatcccattcgaaagggatagagtatggagccccatgaagttggtagtagcaatagtgcccattatagctactgactattgtatgcctggtacgtgtcaggcactgtcaggcactttgtatttgaggyagttgaggcccagagaccaaartcccacagctgctgagtgtcagagctgccctccaagcacttytaaccactgccctactctgcctctctttcctatagcccgagggcagcccctctgtggctgttggtcattctgcttccaaaactcagtctactcctgggctcaggccttcgctgatgggtgcaggtgtcgccagctttccccatccagccttgggccccaaatcagcacctccagccctggaaaacggtgcccattgagtgaccaccacccacttaatatcaacaaatccaaaatggatcccagccccttctccctatatggattccatttctgttccacacactgtctacaaatcttgctttgattctccggtcccctgcagcctctgtggaacggaagtggggaaggggagggcagtgtggaaggggcccacggtctggcatcagctggcctggctggatcctaaggctccggcttcctggctgtgtgcctgggggcaagttacatattaaacctgtctaagcatctgcatcagatcagactgcagggggctgtcatccgagttcagtgagatcctgccggcaaagcagtcagcacagcacctagtttatagtaagtgctcagcaagtggttccctttgcacccccagagccctccttgcttcagaaggtctcagcgtcacagmctcttctccaccctgtttctcctcccctagttgtggccctatcaaatcttccccaaattcctggcacagcctcctggctagcggtgccctgctcccatccctcccagcctcccacccaccacagcctgggaaccaccctgaagattcatgtgcggccagctcagcccctccccgcttagggacccacaactacattgccctgggtccagcttaaccctaaaagtccttggggcagctctgaccagctctggctctgagctctaaggccttctaccgtttctgcttggcctcagccatgggtcctccctgccccaggcttagccatgggctgcacttcctgcaccatagccccgagggaggcccccaagagagaggtcaggactcagaccatccagccccaaagctacagwccactcagatataggtccagttacatgaggggcacctctaagagggatcaaaccagcagccaatcaaaccagggagccwtctcactgccatagggggcacccaggtgtgcaatggtaaggattccattcagcctcatgcccccaagatggtaaactagcctatcagatgtctggagcagaagcagcccacaagtggggagcaccttccccagggcctaggctgggccgctggtggcatcatgaagaatttttgctgagcgaataataaactcccaccaacccttcccttccagagtacttgtgacacaatgccaaaccactctgaaaccatcagtcacrctgtgaacgtgcccctgcagacgaccctggggaccttggaggagattgcctgctgacacccctcgagtcacccagcactccctscaaacagaccttgaggcccaagacccaggacaaggaacagcaagctcaggtgggatggccccagtgctggaaagaagcaagagccccctatgcacacattgcagactagctgcctagacctcgctccggccacgtccaacacgacgcatccttgggccccgccgtgcgtccctcttaggagagatgagtcacactctggaactgtccragaacgaacctgccatcacatctcactgccagatgtataaagcacctgcmtgctcagacttcttrtggcgccacctccacgtctgtcttgtacatgacactcctccacgcggtttccagtgtccacactgctgcccgtgcagtgggaccagattccaggtccaaagtcaccatgaggccaccctggaatcagaactgcacaatcaagagggaacccatggractctctgctacattcagttcttgtgtcgtttgtgaaagttcttaacctgcccaaaaacccccttttccccaagctgcccaysgggcttcggcgccaaaggtgacccgcgccaacctccctccccccmagtgcctrtgacggcggcacagcagccagcgggtgggggacgcctgtgttcacccatggtgcccatgtcgttcttctctccctgtgacacagcttgtacagtctgawtctttttatctggggtaggggggcttttatgtttgtccgatggagatttgttttgttttgcttcattttatgcttttttattttagttttgatgttctgaggtttgctttggtttttccattttctttggcatttatttattcgtgcttcaaatcacagtcatattaaaagctggtcttgtggaaatggctgagttatttctgccttttctccacatccgagtctctctccctccggggcctaggaaagggtcggacctgccaggtcaaaactgcagactgtgtatatgtaaagttttacgcaacaacacttacttttacaaaatgtgcatactctatatgtttattctaaaattttttaaagattgctcacaactttgtaaatgtcttcaagtcccactgatgagtcacagcccgcgttctgaaggaggctgccctggacccacaggcacgtggcctggagaatgctgctcagacatggaaactatcaagaaggcctttgtgtccccctgtgatctgtctgctaccctgacccctcctgaccccatcggtgaatytgggctggacacaggccccagcatggcctccctcccacacacgagccttcctggcctccccacccccagcaaactgacctgccttgtccccccagaagccacactggcactctgccttgctccccatgagttcttagaggtggaatgagaggttgggaggtgccttttggtgttacggacacagggcatgcccttttcagcctccaggtgtgagagagaacttcctgatcaggcagaatcctcatccttagcaccatgctggttccatagcagcagttcctttagcctaatctttcactttccctcccggcccccaccactcccccctcaaagtctctcctcaagcagtgaagaaaggcctaatgtggctgtacctttcccctcaagcacaggtgctcagaaagcactggctagaccaggggttcagggttccagtcctgttctgccatccaacctccctatctgtctgtctctccttcatgacccgctaacacaaggaaaagttacttgcccagtgtgacaaatggaagagtctcccaccaggagttatgagccctggccccacagcgttcttctctcagtagctgtgtgacagtgggtgagaccatgcacatctctgggcacagctccctcaatttttggatgaagataataccttacctgtgtgaagggaagatgcaggaccagatgatctcctgagactcaaagtgccataacagcactgcctcccctkcccagtgggatgctcaygcccaagcatggccaggagctggcagtcctggggactgtagaaggcagctgggacagagcacccctgtgatgcctcctcccaagcattctcccagatggggctgccagctgttagctaagctagcttttattcttaragagtgtaaagttgccagaaarggtcttgtatggttttctatcactgccactgcaaataactactaccctcgtggcttaaaacagcacaaatgtattaycttacagttctataggtcaaaagtctgacacaggtctcgctgggctaaaacccagtgtcagcagggctgcatttctttctggaagctctacaggaggctgtgtttccttgctttttccagcttctagaggctgcccacgttccttggcttgcaaccacttcctcagtcttcaaagccagccataacgggttaagtccttctcctgtcacaaatccacacaggcacatctccctctaactgtgacttctctcatgcttccctcttccatttttgaagaatttttttttttagacagagttttgctctgtcaccsaggctggggtgcagtggcatgatctcggctcactgcaacctctacctcccatgttcaagcgattctcctgcctcagcctcccgagtagctgggattacagtcatccaccaccatgcccggctagcttttgtatttttagyagacttgrgatttcaccatgttggccaggctggtctcaaactcctgacttcaagtgacctgcccacttcagcctcccaaagtgctgggattacaggtgtgagcccccatgcccagcctttaaagaacccttttgatgacactgggcctactgcataatccagaataaccttcccatctcaggattactaaattaatcacctattcaaagcctcttttacgatgtaaggtcacatattcactggttccagggattagaatggggacatctttggaggccattaccacaggcccacaggcctgctggatcaggtagcttaatgtcctcattttccaattgagcagactctcaagaggagaggagggcctggcctagggtcacacagtgagttaatggcagtgccgaagctatacccctaaactcccaggttcacaattccatttgtagacccaccaaggtgactcactttaaacaagaaggactgacagtgatcagttttccagacttggccagagtgtgaaagtccctccactgagacaaactcacccacgactacatcaggctggaaaatgccctgctggtatctacactgtcagatacagaagaacagggatccagaggttagccttggaccgctcctaccagggacaggaaccaaatgaaatgactgttcaattrgtcgggagtctctctgatgcttctgcctcgttccagtttagcakcttcwtaaattttttaaaaatctatagcttaaattayaatttgaactgcttcgttggatttstggcttccttttcagaaaaaaaaattagatccatttgtgatagagcaaagaatatttagatgcatttggattgcttcagggctcacagatgtctgcacccatatggatttgaggattctgrctttgtccggcttaaaccaggtctacattctttacctgtttaaagaaaaaaaaaaggaaattcaagagagcaaatcaataggcagctactgattattattaattggctgttaacaaaagacacagyctaaattccagtgggtaggggagtgtttttatgatcctcccatcaaacaagtagctatttgtgcaatcatttccttagtgtggacctggggaagtctggtggagaagggagactcagggagttgtsccatttwcaggagtgacccaaaagatgacaccaaggcyaggagtttggagcaatcacaagtccaaaccacaaggttgaattctcagtgacttcagaggattggatcaatcaattaattagttaattaattaatggcacatgaccccagacacgggatctkggggatgtacagcagctgaagagagtgaaatgattgagcctsgctgtgagcatccattgccagaggactgggctagttgctcgcacactgttttcttgtttttggcagggacaggcmggagttattttattttcctcgttccagcttgaagctatttttgtgagagttttcaccatgaacgctgctagtgagaagcttgcggagccacaagcactgatgagggggagacagagggtctstggagaatggctcttggtgagctgggaaggaggacgtcgcaggcaggccctgcccacaggtgtgatcctggtgggtartgtgttccctcaggtaaagctcagyacagcccacctgagcccacaggcccaaagsaaacctcttcctccacaagctcagagatttttattcaattttgagaaccaaaccctgaacggggctgaaggcctccataagatcccaatgaatcaactcccatgtgacaaagaaamgcgggctcagagagggcaaggaactgcyaaagcagcgggagagaatgcagccaaccctgacccgcacacagccagggcagaccctcygctgcacagaacaagctctctggcataatagggaaggcagcaggggaagaaagaaggggcaaatgcaggaagggcccaggtgcatctgccatgcccttgtatgattgactgctaccttgctgggcacttgcagtgaggcaaggaatytctaatctgagcaaggaatactgacaagtaaacagaagactgcaaaagatgaatctgggttttccagttgaagggaagtgagagagcagcgtatgggaagcccaggaggctggaggaggcacagcccaggggattgcacacaggtccgggagaacccaagcaaagacrtgaaggggcatgagaggtaggcaggtgctgaaggatgaagggcctggccaccatgctgagaggagtgkcacggctaaagtccttcaagctctttcctktgctccccaagaggctatgaagacatttcccaaaccaagggttgatttcttgagctaatgcctttctccccactcattggagattcttagcctcttagcacatgggatctttttgtgcagcatttatgtattcctaaggctaacaggttattctagggggcatgaggttcatggggacatgaaacaggactataggacccaaccctgcttgaggacaggtggaaggagragaatctcttactaattcaatttaacatttgatgaaaccagtactcacttgkttttcaagaataaagcagtgggttggaaaaggctttggtcaaagtcagaagactgagttttgtttttgtttttgtttttgtttttattgagatggagtctggctctgtcgcacctaggctggagtgcagtggcgtgatctcggctcactgcaacctctgcctcctgggttcaagcgattctcctacctcagccacccgagtagctgggattacaggtgccagccaccacacctggctaattttttgtattttcagtagagacgggtttcaccatgttggtcaggstggtctcaaactcctgacctcaggtgatccgcatacctcggcctcccaaagtgctgggattacaggcgtgagccaccacgcccagccagaagactgagtttctaatctgtttctgctgcaaactgaccacatgactttaggcccagttcacttcacttctatgggtctcagtttcctcctctacaaaagggaaggagatgaaaatggacagataatccctttggtgcctcccgactctaacagtctatgagttgaagttgtaagtgaatgtcaggcatctaagcaaatatttaattgactgctcagagcccccatttctccatctataaaacagaaatgctgatgcttagttttcaggcttatkatgaggattaaataagtttaagtgtataaaacactttctatcttttcttcttttctcttttcttcccgtagaacattgatgtttaatcttrtttggatcactgactcttaaaaataagatgaagctgtaaattctctccccccaaaattgcacatggtcacatagatatacgtaaaattttgcctacaagctgggtgcagtggctcacacctataatcccagcactttgggaggctgaggtgggaggatcacttgacttcaggagttcgagaccagcctgagcaacacggcaaaaccccatctcwgaaaaatacaaaaaattagccaggcgtggcagtgcatgcctgtagtgccagctacttgacaaaacaaaacaaaatttttgcataymatttcaggagggttatggatccccagagcccatctgtgatcctctaggggtccacccatgctaggcaaagtcaccmtgatcgagaaagtgctaaacaatcctccaaaagaaygccacagtaccacaaaatgcaaccaacatttcttctcctaaaatcacataatgactgtcatttttcaatttacagaaagaagaaaaaataaaaggatagatagcatttgatcagtgktgttttctcccataatttttttaaacctttgscacctgctgcagcttgtgcgttctcacagatggcaaaatgaatgaacgagcagaaaatgaatatgaacagaaaaacttggaaacgtgatttcataaaattattttatgcatgtggagatttcgagggctgaaggaaaagacctgtgtacataagaagcaaccataacgtccactttgcagacacccccatggcctggttcttcaagaacatgccccctgcatgccctgcacccgggaatgcatgcataatgttcgctggctgccactgagcctccaaacatgccccactgctgacatctcatttg

SEQ ID NO: 1644 - DNA, 14105 bp, Homo sapiens
cctcaaactcctggactcaagcaatcctcctgcttcagcttccctgggactacaggtgtgcataccaccatgcccagctaattatttaaatttttggttgagatggggtctggctacattgcccaggctsgtctcgaattcctgggctcaagtgatygtcccaccttaacctcccaaagtgttgggattacaggctgagccactgcgcctggcccagtcaagttctttattgtacaacatcttttaaaagggcctaactggtaaataacctatctcttaactgccatccaataaatacaggccaggccctgtacaagtcagtggaaagttgatggtgaaaagacagacatggacccctctctcctggtgcttagtgtgttacacagtgaggcrcctgcagtggtgacaggagcatagcagcacagcaggagccagcagttaatccacaaatgttttctggagatctgaggatgagctagctagggaagaagggggaaagaaagttctaggcagagggcatcacatgtgcaaatgcccagaggcatgaaagaggttgactcagtcaagggattgaagaaagttcagtgtctataaggagaaacagactataaggggaaaatggcagggcgcagtggctcacacctgtaatcccagcactttgggaggcagaggcgggtggatcacctgaggtcaggggttcaagaccaggctggccaacatggtgaaaccccatctctactaaaaatacaaaaattagccaggagtggtggcacatgccagtaatcccagctactcgggaggctgaggcagcaaaatcacttgaacccgggaggtggaggttgcagtgagccaagatcatgccactgcactccagcctgggcgacagagcgagactccgtctcaaaacataaaaaaaaaagactataaggggaaaatgatgggatatggggctgaaaagttgcagggaaaggactgacaggtatagaattgctccaaacacgaggacacactggtcttcctcagacactaacttcgttatagcaggcctttgtgtattgtgtatctactgtggctaccactgattgccagacaatcctaagcatctccccaaggcaggtttctcagccggggactaagctgggtcacaaactagatctcattacaggatatgaactgtagcacgccctagctcttcctgttcaggctgaaggcccagaaagaagggccatgttttacccatttttagaccctctcctaaagcctagtacagggctaaatacacaaaatacttcatagctgggtttcttagtctttagtcaatgagcttggataaaaatttcatctttctttttcctttttttttttttgagacggagtttagctcttgtcgcccaggctatgrtattttgagacagggtctccctctgtcacccaggctagagtgcagtggcatctcggctcaccgcagcctcaacctcccggctcaagccatcctcccacctcagcctcccaagtagctgatactacaggtgtgtaccaccactcctggctcttttttttttttttttttttgagacagggtctccctctgtcacacaggctggagtgcagtggcatgatgtcgactcactgcagcctcaagctcccaggctgaagcaatcctcccgcctcagcctccccagtagctgggaggtgcgagtcactatgcccagctaatttttgtatttttttggtagagttggtgttctgccatgttgcgcagcctagtctcgaacttctgggctcaagcagtcctccctcctgggcctcctacggtgttaggatcacaggggtgagccactgcgtacagccatgttttcagtaaccttttaactgaaatttagcatttcctttcactgtgaatttaggtaacaaaccacagtagtattagcagtatctgtggtttcatctcaatagcagttacagatatgcttactttagaatggctgtggatatcttgaaccataatttgtatgcattgctagttttttattacatttattagagactgctgctagatctagttaatatgataacaaagaagtagacttgtactctatcaaatatctgggtttaattttcttttttattttttgagaaacagtctggctctgttgaccaggctggagtgcaatggcgtgatcttggctcattacaacctctgcctcccaggctcaagtcatcctcccaccttggcctcccaagtagctggcactacaggcatatgccaccatgcctggctaatttttttttttttttttggtaatagagacagagtctcactttgttttccaggctggtctcaaactcctgagctcaagcaatctgcccacctaggcctctcaaagtgctaggattacaggcgtgagccaccgcacctggcccatgcctgtaatctctttgagagtccaaggtgggaggatggcttaagcccaggaggttgaggctgcagtgagctgttatcatgccactgcactccagcctgggtgacagaataagaccctgtctcaaaaacacagaaaaaataaaaataataacattacaccgaataggggatcatgggcttcacaaaactgccaaagcagtccacagtagaaaaaaggacgaaaacccctgcttaatagaaatattcattgtcctaactsaaaggaatgcttgactttgggtgtggtgttgtctctctgatctgagtccatctcttggtgccctaaaggggagagtctctgggactcttgtccccatagcaaacaactgcatcaactgcatgcagggcattggataagggaatgtcccaggtgtagagaatcaatcagttgcaggcctacttgcaaccagtgggctgacagcgagccataccctcacattcgcctgagaaaagtggctgctggccttctctctactgagatttgtcccctgatacttatcatcctagccacagccagctggaccagagatctcccttgtgtttgggtggtggcctgaggagtggccaggcaggagagccggccaaataggtactttcagattgaataacaactaatcgacccagttggatcctgtcccttgggaagttggaatttgaacacttgagggagtcgacaggtggcagggccagcagaattgacaggcacacaaaaaaaaaggtgaagggagaaggggaagtggagccaagcgtggggatttgccaagtgagggtggccttccaccccattcattcagaggaggtctggctgagcagcccccaagagcccacagaattgtggagggccaggggtccccagctgcgtagggctcatgggagaacatgagacaggccagacacccaaaatgaggaagttgggggggcttttttctcagccttcctgacctggcgtgacctcctctgggcccatgtaacaggcctccacacccccttatgcctggtgcaggcaccctgttaacttctatgtccctgtaggtccctttccaaggactctacctgcttgactgctcccaaagcagccagagccagtattgcccctggtggggaatggagctggagagcaggctggcagcaaggaggagagagggacagagaggtctgtcactcattatcccagagaagcatcatggggtggactcctctgacctggctccttttgtttcccatggctggggtccttctttccctctagagcctgtaacgcccccgctctgtcaaattcctcatacagcaaacttattctactctctttacccagaaataggtcagactcaactacatccatatctgatttcttcctttgtttttttttttttttgtatgtttagtagagacagggtttgaccatgttggccaggctggtctrgaactcctgatctcaggtgatccacccacctgggcctcccaaagtgctgggattacaggtgtgagccacggcgcctggccccccaacagcattttagagatgaggaaatgagactcagagaggagtctgatggctatagtaagaaatgaggagtcaagctccttagtgtgcgctacaaaaaccctgcacacctgactgtgtttgcagctccctgccacccattcccatcctaccctcccttgccaaacagatacacttgctttctccaaaatatgccctctcatctccaagtttttgctcctgatgttcccccagctagaatacccctaggatgtcctactgaattctgagtcaaactttaagactcaaagtatgggccaggcatggtggcgcatgcctataatcccatcactttgggaggccaaggcaggaggatcacttgagaccagaagtccgagaccagcctgggcaacacagtgagactccatccctaaaataaaacacacacacacacacaaaaattaccggagcatggtggtgcatgcctgtagtcccagctactcaggaggctgaggcaggaggatggcttgagcccacaaggttgaggctgcagtgagctaygactgcaccactacagtctagtcttggcaacagtgagaccgcctctcaaaaaaamaaacaaaaaaagactcaaagtgtgctccactgttccttcagtgaggcatcgggggctgtgtcctaaatgtctttgtatctccagcccttcacattagggcctggcaaggtaagagaccaataaatatgtaccctttggcttcatttcactaagtcattagggtccagaggtatggtcagcacttggaaccctgtggaatggcctcaagatcagagtcctcttgcccaattcttggctgggaagtaggtgacatctagaatccatgagggtatgggtgatctcctgggttccagacatttgcaytgagtttattcaatcacttaacaatatatattaggtctgggctgggcacgctggctcacgcctgtaataatcccagcactttgggaggccaaggcaggcggatcatctgaggtcggaagttcgagactcacctgaccaacatggagaaactccatctctactaaaaatacaaaattagctgggtgtggtggtgcatgcctgtaatccagctacttgggaggttggggcaggagaacagcttgaacccaggaggcggaggttgcagtgagccaagatcatgccattgcactccagcctgggcaacaagagtgaaactccatctcaaaaacaaaacaaaacaaaaaaacccaatatatatcaggtctgttatgctctaaacaccgtgccgggtgctgaggatcaaagatgaatagagaaatgaactgaaatgatatagtgaagttaaaacttaaagaacacaacaaatctgtaaaagacaaacaaaagagggtttaatctgtgcttctgtccaggtgtgtggagctgggggtggggttgcacctgcccgggagcattcccaaggcaaatatttgagaggaattagatttctaatacccaggttggctctcactttcaggaagatgtgagacctgaatcctaacctggacgcattgttcccctaattcccagcagcagatctatgaattagcggtctgggtggcagcccattcttctttcagaggcccagaacaccgtgaaactatgctttcctgactcaagagaccctacctagacgtgggcccctttgacgagcacctgcccctcaggagggtctcaggcgaccttcttggaaggtgtgaccacttgaaaaggacgaggaggccaggcgctgtggctctcgcctgtaattccagcacttagggagccgaggcgggaggatcgcttgagtccaggagtttgaggccagcctgggcaagattgggagacactccccaccccgccccatttctacaagtaattaaaaatttagccgggcgtggtggcgggagcaggagccactcaagaggctgaggcaggagtatcacttgagtcctggaggtggagactgcagtgagcggtgatcgcgccactgcattacagcctgggcgacacagcgagacctgtcaatcaatcaatcaatcaatcaatcaagaggaggctggcgggagcatgctcgtgaccaccgggggcgacatagaccctaaccctaagtccaaccccaaggcagaccccaccgtcccgccaggcgcactcctaagagcgcggcttccggagcaaagccgctgacccccgcccccagggtcttggcgccgattggccaacgagagcgcagggcggagccaaatcttaaaggatccgggagctaagccagacccgggtggcggtggcagctgcgaaacccagggagccgatgccacgtgacccaatgtggacttcttttaaacctttctaatgcccataacccagcctcagacccatggagcccacgagagactgcccgctgttcgggggcgccttttccgccatcctccccatgggggccattgacgtaaggtgagaaggccggggcgcccaggggcggctgactgggtgggttgtgggaagagaccggggtcaaccagggtctgcctcgcctcactccagcgayctccgaccggtcccggacaatcaagaagttttctgccatcccgtgacggaccagagcctgatagtggaacttctcgagctgcaggcccacgtacggggcgaagcggctgcgcggtgagggaatggcccccggctggccaatggcaggggcggggtcggaccagtgggcggggcccgcggccgacggttaatccgggcggtgagaccacgcackggccgggagccaggcctgcaacttaaagatgctcccggggaggcgaccagagatgtcccttcctgaccccgcttccctactccaggtaccactttgaggatgttggtggcgtgcagggggctagggctgtccatgtggagtctgttcagcctctcagtttggagaacctggccctgaggggccgctgtcaagaagcctgggtcctctctggcaagcagcagatagctaaggaaaaccagcaggtgagggcccgagagtgtgtaatgtcctggaagggcggtagcggggacgcagagatccaggtaagcatcctgactctgatccccttaggtagcaaaggacgtgacacttcatcaggccttgctgaggctgccccagtaccagactgatctcttgcttaccttcaatcagcccccgtaaggaggaaggaaygggcgggtatctcatgactgggttcccaggagaatcgggctgggagggacagaacagggagactcactggtgggatcctccaaggaagcaggagtgggccagaggtttggggtaactgatacccaggtcctctggggaacaggaattggcaatttccaaacctcaggcctggatgatgttctgtctccatctgttcccccaccccaagccctgacaacaggtcatctcttggccccgaaaatctgtcacctgcaccctggagcctgggtgactttgaacarctggtgaccagtctgacccttcacgatcctaacatctttggtccccagtaaaggcgctgaagcactgcatgatgttgctgagaacttggggactcggttctgtgagggggaaaagaggttgaaaagagggtttcctcttatttcttccctgtgcgtaaacataagacaatccctcttcagaataaacttgctttataatcaatataatctctgtgcctttgaatctaacaggacacctgggtcccagacgcctgggaattgggtctctcrattccctttggttttggagggaggagtttaaaactgtgcatgggagcaggagggactcaagggtggcagtggtgagtgggaggaaatacactttgggatgactcsttcagccctgagagaggggtgtgagttacccagggaatgggtagggaaggtttaaagcaacacccaaggaaagaagggaaactcatctcttgtagtgattcaaccctgagaacagatggggagtggggttggctgtcccccatggatggatgaaaggtcacctaatcagtagtcaccaggacatagtggtggaggcacaagtggccaaggagtgctcatttggtggagactgggaaagcggctgttatttagtgtctgtgtagtagagggagcgcagctggtcccagaagaagagggagaggatggtgtgggggccgaggcggaagtaggaggcacctatacccttgtacatgccaaaaatgccctcggtccgagctgtctgcagcagagcgtccagtatcccccggtacatgaggccctgagagtgtgtcagagagggagggagagcacagagaaggagtttgtcagagcccaccaggggcagcacctctacaggctgcatttcaggctatcccacctgcacccgcaatctgccttccccatcccctgcttcccgcctgcatcccagagcacttccttaccttgccctgtgcatctgtgggctggttgtagagccttgtgcaggccacatcaaagggtgccatggccaagacaactgcaatgccactcatcatggcagccaccagcgccaacttccagctctggggaggaaagatctaagggggtagagaggaagagcrykgtcaaccagccaactattacaccccaaggacaggacagtccctgccctggggacacagatgctggtaactgggggagcttccactgcaccagttataacagtgcaaaaacagtgagaaggaggaaggccagggtaccctgaaggctcaggtaccccttctgggaggaagtgacaagagaactgtgggaagggtctaaagagttgacctccaagccctcctgccactccctcacctgtgaatgttgggcaccatcccctccagggcctagtgcagcttgccctccccttccccccttcccgaaacagacccacccatttcccaggcagtacctcccactggctcaggaggtccttggtggatgagaaggtgcacagctgggtggaggaacckacgataactcggggcaggccgcccagagccccacgccataaccccaccagaccatgtttctggccaatctcggttagcgcctgaaacatgccctagtgtggggaagaccgggggtggggttcagacagcccagcatcaggggctgccatcctaacactgccaaggatgggtccttaataggaatctcttgtccagacaaccagttcaatgtgggcttagagccagaatgtgggcccttggttgtctagccaccccattgttccttccctgggcacccaagaactggggcgggatgtatgcaagtgaggccattcactggtcaggagaaacaggggcagaaaattagaggaactggagtacatattggaaagaggcatcaggcacggtggctcacgcctgtaatcctagcactttgggaggcccaggcgggtggatcacctgaggtcaggagtttgagaccagcttggccaacatggtgaaaccccatctctattaaaaatacaaaaattgccgggtgcagtggctcatgcctgtaatcccagcactttgggaggccgaggcgggcggatcacaagttcaggagttcgagaccagcctgaccaacatggtgaaaccccatctctactaaaattacaaaaattagctggacgtggtggcgcatggctgtaatcccagctactcaagaggttgcagcaggagaatcacttgaacccgggaggtggaggttgcagtgagccaagactgcgccactgcactccagcctgggcaacagagcaagactctgtctcaacaaaacaaaacaaaacaaaaaaaatttagctgggtgtggtggtgcacgcctgtagtcccaagctactcgggaggctgaggcaggagaatcacttgaacccgggaagcggaggttgcagtgagccgagatcgtgccaatgcacttcagcctgggcaacagagcgagactccatctaaaaaaagagtaaagagggtctgggtagactccaggggcaaaatgggacagaaccgatgggttgagcagagcagtggctgggattggatctgttgggtgcaggcagaaagctaggggaaaagagaaaggatggtcagggactttggcagacttgggaaccctcacctgatgcttatactggtgccctacagcaatttctgaggctgcctgtgcctgcaggtgtgtcttcacctgggaacaagagaatatcatagcctgtgccccagtggccatcctcctacctgagaaccaaatgtctcaccccctcacacttcctctagggtgttcagcaatgaatagcctcttactctgattattgttcttcctacttaacaaactggttaacaaaaagactctgtctctaggctccagccccaggggggtggatctcccagcactgcaagacaccccaaccccttcatatcctctttcccttggggctagcagtcgggggtggagtggttggagaatggcaatatttcctaaggctgttcatgttaggcaagacctggtgtcccgcctctcatgctagctcccattcccagactggatctccagccaccacttctatcaggctccccatcagactctgggcaaaacttgctctctagcccccaacccccacagaggtatcgagctgactttggggagaccactgtccctgaaactcacaccttgaaatgagaccagactgcctctgctacaggacatactacttccccgtctcttttgctcttgggagcactaagcagggcctagtcctagcaataaacagctgtgtgaccttgagtgggtcacttcccctttctgggcctcaggctcttgacccttcacctataccagataactcaaaggggcagatgttgagattgttaattctgtgatgcccagggccttcctgatccctagactctctgacgtatgttaaattccttatcctccccttcacaaatccaacctcaatatcaacacataataataaaaacaaatgctaccaaatgcttactgtctgccaggattcgcactaatgctttcatgtctaccgcatttgtctccctcgatcctcccaataatcacacagaaagggcactataattatcaccattttacagatgtggcaactgaagctcaacaactagtaattttctttcttttcttttttttttttttttgagacggagtctctctctctggcccaggctggagtgcagtggccggatctcagctcactgcaagctccgcctcctgggtttaggccattctcctgcctcagcctccggagtagctgggactacaggcgcccaccaccacgcccggctaattttttgtatttttagtagagacggggtttcaccgtgttagccaggatggtctccatctcctgacctcgtgatccgcccgcctcggcctcccaaagtgctgggattactggcgtgagccaccgcgcccggccaacaactagtaattttcaaagccaggattttagttccagaaagtctgattccaaagcccataatctttttttttttttttgtgagacgtagccttgctctgtggcccaggctggagtgcagtgaccggatctcggctcactgcaagctccgcctcccgggttcatgccattctcctgcctcagcctcccgagtagctgggactacaggcgcccaccaccgcacccggctaattttttgtatttttagtagagacggggtttcactgtgttagccaggatggtctccatctcctgacctcgtgatccgcccgccttggcctcccaaagtgctgggattacaggtgtgaaccactgcacccggccccaaagcccataatcttaatcaatacattcaatcgtgtccatcagatgggtgtgtatagggcagatcagaagactccgaagcctaccagcactttcctgatgcctttccctgcttgcagtggggcagcacyctgccacctatgcccttgggaaagaacagctcctatcctacaacgaggatctgccctgaaggtcccaggcaagagccctcttcttaccatgtagatggggctccccaagtaggctcccatgaccccagccatggccccagctgctgcgctgcgggcaggactgtgggtgccttcggctgtgtgcaggtagcccccagcctcagccagcccataggtgcccagtcggatgccattcatcaggaactggtacaagagggcgggggccaggcctttctgcagggcagcaaggccatccaccttgccgatggtgatgaaggcatggaagacatttcggtagtgccgctggtatgtgccaggggcctgcagttctccttgcaactgcatcctggtcttcaccacctccaggggattggtgaatacacaggccccgcaggctgccaggccactcatcaagaagtccatggtgggatagctgtagcaggaactgacccaagagtaagaaagtaaaaatgggtgtcagaaagcggggttggaagacagggggaaggcctgtttcagcagtacaggttgcagaagataagaatttagatttgcagtcaagggtgtcagggtcaaatgtcaagtggtcaaacgtcagctggaatttgggagtcaagagctggcaagcagggaagagatagaaatctaggagattctggtgagaagcttaaggcaggaccctctgaggtcaaggaggggcaaaagacagaaggttgcaggtgggatggctcaggatggcgggcgacgggagcacgggagtagaggagggaatcgcggggttgggagatggaagccagggagkcaggaagaagaaagccagcaagtgagagaagaaaaggatccgggagaasagccggtgatttcctcgagccagcaacgagatctcgatccgagaaagaagtcaggactctggccaggaatgagcgtccctgagcgtccccaggcagccaccggagctcgcagtagcttcaaccccgggtagcytgcggaggccgggccgccacactcctgccrctggagcgcggggccaatggggagccttcaagagccacaaccgaggccctcagccaatcagcgccgagccggctccgcggccaaagggaggagctctcggcgctcctgtccccggaatcacccggaggcggttggaattaactgtccaggctccgccaccagcgctcggccgccgactccggctccggaagggaggcccgggacgcggcggttttgttattggcagggaagagacctgggttcccgatcgaacacagaggccgagcgcagcagtcccccactggggtgctgggaccgcccctcgggtgggcggacggctttagcttcctaccccgggttgtgaccgggtggggtcacataagttcaggtccacgccctgctcggtgccggcgccaggagagccaggaagacgcggcccggcttgcggggggtagagggacacacytgcgctgcgggaccagtctcctgaggctgcacgggttggtgcttggttaattaaatccttagtccttaggctctttatttttattttttattttttttgagacggagtctcgctctgtcgcccaggctggagtgcagtggcgcgatcttagctcactgagagctccgcctcccgggttcacgccattctcctgcctcagcctcccaagtagctgggactacaggtgcccgccaccacgcccggcttattttttgtatttttaatagagaccaccgtgttagccaggatggtctcgatctcctgacctcgtgatccacccrcctcagcctcccaaagtgctgggattacaggcgtgagccaccatcccyggcctggagttctttcatatgagatatttgtctctactcctccattatttattcaaccatttatttaatcagtatggactcatggacatttatactttgggttataatccaatatacttcatatttattttctagctaatttcgttctagctttggcctttgagagctgtttccgttggctcctgtgtctctttagcatacccccatccatttttttttgcacacaaaagtttttagtttataaatcttgtgaaaaatccacagtggccacagatgttactgtagcatctttactcctttggctttttgccacaccaacactg

SEQ ID NO: 1645 - DNA, 17833 bp, Homo sapiens
tgagtaataatcaattttgcatgtggcatggccggcctcgtgtcaattaaactctttctttactgcaatgccgtggtctttatttgtgcagaggacaggaagagcccactgggcagttacatttccactgaggatgctaagctggtggaatatgggcctgcagctgctagtggccatcagtgaggtggcctgagaataaaaccgatacatggcagaggtggagagagacagatttgagtgcctgattctgctggcctgaagtcatgtgtgtgtctggagctttcagttgtgtgagtcaatgagttccctttttgtaagctagtttgagttggatttctgtcacttacaacaaaacaatcccttataaagggagcttctaataaaagaagtgttgagtccagctscctccggtagggccaggacttggaagtccagtagactctttcatggagcacagaacacctgggcctcatttctgtctgcaaagctgttaatgtaggtagcctgcctgtgatgggggataaatcaggaagaagcagtaaggaaaagctggcctgctctgggaatttatacaggttttggcccaggtgaggatacacagagacgatccttcctcaccaccactaggtggagtttgagcacttcgggtgcgcgctcagcagccaaaaggaacccatcagtgtctaggctaccaaggaagaggcaagaaagacacagccccctgccctccaagcctccccgtctttctcgctccctctctatgttaccaccccttctttcagacacctggggacttttacgttccctatgcaactcctctcaaatctgattcatgacattcacatccaggaaaaaatggtaacagcctacaataaatcaagacagcatgatattggtcaaaggctagacacacagatcaagggaacagaagwgagggcacagaaatcgagccacacaaatatagaaaacagattttttacaaaggaccaaaggaagaagaagaaagaagaaggagaaaaagaagaagaaggagaagaagaggaggaagaggaagaagacracgaaggaggaggaggaggaaagaagaaagaagaaaagagagaggaggatgagaagaaaccaaacccagacctcacataatttacaaaaattaactcaaaatggatcatagacctaaatgtaaaaagtaaaactataaagcttctagaagaaaacataaaagaaaatctaggtgaccttgggcctaattatacatttttgggttttttttgtttgtttgttttgttgttgttgttgttgttgttttttgagacggagtctagctctgttgcccagctggagtgcagtggtgcgatctcggctcgctgcaaactccgcctcctgggttgaagtgattctcctgcttcagcctcccgagtagctgggattacaggtgcccgccaccacacccagctaatttttgtatttttagtagaaatggggtttcaccaggttgaccaggctggtctcgaactcctggccttaggtgatccacccacctcggcctcccaaagtgctgggattacaagcatgagccactgcatccggcctcaatttttttttttttttttgagacagagtctcactctgtcgcccaggctggagtgcagtgrcgcgatctcggctcactgcaagctccgcctcctgggttcatgccattttcctgcctcagcctccctagtagctgggactacaggcacctgccaccacgcctggctaattttttgtatttttagtagagatggggtttcattgtgttagccaggatggtctcgacctcatgacctggtgatccgccctcctcggcctcccaaagtgctgagattacaggcatgagccaccacacccggccaatttttgtattttttttttttagtagagatgagggttcaccatgttgggcaggatggtctcgatctctcgacctcatgatccgctgacctcagcctcccaaagtgctgggattacaggcctgagccaccatgcccagccctgatatatatatatatagatagatagatagatagatagatagatagatagatagatagatgtaattttgagacagagtttaactcttgttgcccaggctggagtgcaatggcgcaatstcctgctcactgcaacctccacttccggggttcaagtgattctcctgcctcagcctcccgagtagctgggattacaggcatgcgccaccacccccagctaattttgtattttttttagtagagaagaagtttccccatgttggtcaggctggtttcacacccccaacctcaggtgatctgcctgccttggcctcccaaagtgctgggattacaggtgtgagccaccacgcccagactcctgatattttttttattttattttttttgactcctgatatttttaattaaaaaaaaaattaggaggtcagggaacccaatatggaaggcagattgtggcaaaagaatttaatgatactactaatgtatgaaataacttttctgaagggagctgggggaaaggtgctgacctgagtaattttggaaatgagtcgagtctgtaagatcaaaggcaaatggaactacacataagcactgtaccctagtttataagattgttctccacaggggtatgtgttaacaattctcttttgagacattatgattacaaataaagaaatattttattttattttattgaaacggaatcttgctctgtaacctaggctggagtgcaacgacgcgatcttggctcacagcaacctccgcctcccaggttcaagtaattctcgtgcctcagcctcccaagtagctgggactacaggtgcgtgccaccacgcccagctaatttctgtatttttagtagagacggggttttgccatgctgcccaggatcgtcttgaactcctgacctcaggtgatccacctgcctcagcctcccgaactgctgggattacaggcatgagctacttgcctggcacatataaagaaaaattttaggctgggtgtggtggctcacccctgtaatcctagcactttgggaggccgaggcaggtggatcacctgaggtcgggagttcgcaaaccagcctgaccaacatggagaaaccctgtttctactaaaaatacaaaattagccaggcgtggtggcgcatgcctgtaatctcagctacttgggaggctgaagcaggagaatcgcttgaacccgggaggcagaggttgcagtatgccaagatcatgccattgtgctccagcctgggcgacaacagcaaaactccatctcaaaaaaaaaaagaaagaaagaagaaaaagtttaggccgggtgcagtggctcatgcctgtaataccagcactttgggaggccaaggcgggaggatcacctgaggtcaggagttcgagaccagcctggctaacatggtgaaaccctgtttctactaaaaatacaaaaacaaattagccaggtgtggtggttcgtgcttgtaattccagctactcaggaggctgaggcaggagaatcgcttgaacctgagaggtgaaggttgcagtgaactgagattgcaacattgcactctagcatgggcaacaagaacaaaactccgtctcaaataataataataataataataataaagaatttaaaaagaaaaacaaaacaattctgatactcctatacacgtgtcctggaataaacaattaagtaaatagatggcaaattatggaagccaggtttctcacagttggggtgggagtttagataaacaagggaggtggctagaatgatccatgtagtaatggattaaagttggagacatcagtatgaattcatgcttagcttaatatagatatggatggttatatatggaaatacatgtttgtgtatatacgtgggttagtatacacacatatatttccttgctttctcagatgtgagggtccagaagcaatgatacctcaaaagcaacaagcacacctagggcccagatcttggattctaaaaccatttgccaataaaagaaaataggggtccttggagaaatggctgattgcaggactgtggcaggaaatacacaaaatgagcctggagcattttatagtaccagaaagtaaggtgacactaaataaaaacaaggttttaattaaaataccaatgatgacaacaacactgatgggactcttatttttctccctggttgaggattgaccgccatcatgaatgacttagtaactatctgaactaggaagttcatgatcaactgactacatacttcaggaggaacaaatggttattgaggtccttcaccctgggaagacaacagtmcytaagacagaaattcaggaaaaactagccaaaatgtatgagactacactagatgtcatcatctttgtttgtttttgtttgtctttatgagatggagtctccgtctgtcacccaggctggagtgtagtggcgcaatctcggctcactgcaacctctgcctcctgggttcaagtgattctcctgcctcagcctcccgagtagctgggattacaggtgcctgcyaccacacccggctaatttttgtagttttagcagagacagggtttcacaatgttggccaggctggtctcaaactcctgacctcatgtgatctgcctgcctctgcctcccaaagtgctgggattacaggcgtgagccaccacgcctggcctcatctttgtatttggattcagaactcattttggtggtggcaagacaactggctttggcatgatttatgattcactggattatgcaaagaaaaataaacccaaatgctgacttccaagacatggcctggatgagaagaaaagaactcaagaaagcaatgaaaggaacacaagaccagaatgaagaaagggggactgcaaaggacagtgttggtgtggcaaaaagccaaaggagtaaagatgctacagtaacatctgtggccactgtggatttttcacaagatttataaactaaaaacttttgtgtgcaaaaaaaaatggatgggggtatgctaaagagacacaggagccaacggaaacagctctcaaaggccaaagctagaacgaaattagctagaaaataaatatgaagtatattggattataacccaaagtataaatgtccatgagtccatactgattaaataaatggttgaataaataatggaggagtagagacaaatatctcatatgaaagaactccaggccrgggatggtggctcacgcctgtaatcccagcactttgggaggctgaggygggtggatcacgaggtcaggagatcgagaccatcctggctaacacggtggtctctattaaaaatacaaaaaataagccgggcgtggtggcgggcacctgtagtcccagctacttgggaggctgaggcaggagaatggcgtgaacccgggaggcggagctctcagtgagctaagatcgcgccactgcactccagcctgggcgacagagcgagactccgtctcaaaaaaaataaaaaataaaaataaagagcctaaggactaaggatttaattaaccaagcaccaacccgtgcagcctcaggagactggtcccgcagcgcargtgtgtccctctaccccccgcaagccgggccgcgtcttcctggctctcctggcgccggcaccgagcagggcgtggacctgaacttatgtgaccccacccggtcacaacccggggtaggaagctaaagccgtccgcccacccgaggggcggtcccagcaccccagtgggggactgctgcgctcggcctctgtgttcgatcgggaacccaggtctcttccctgccaataacaaaaccgccgcgtcccgggcctcccttccggagccggagtcggcggccgagcgctggtggcggagcctggacagttaattccaaccgcctccgggtgattccggggacaggagcgccgagagctcctccctttggccgcggagccggctcggcgctgattggctgagggcctcggttgtggctcttgaaggctccccattggccccgcgctccagyggcaggagtgtggcggcccggcctccgcargctacccggggttgaagctactgcgagctccggtggctgcctggggacgctcagggacgctcattcctggccagagtcctgacttctttctcggatcgagatctcgttgctggctcgaggaaatcaccggctsttctcccggatccttttcttctctcacttgctggctttcttcttcctgmctccctggcttccatctcccaaccccgcgattccctcctctactcccgtgctcccgtcgcccgccatcctgagccatcccacctgcaaccttctgtcttttgcccctccttgacctcagagggtcctgccttaagcttctcaccagaatctcctagatttctatctcttccctgcttgccagctcttgactcccaaattccagctgacgtttgaccacttgacatttgaccctgacacccttgactgcaaatctaaattcttatcttctgcaacctgtactgctgaaacaggccttccccctgtcttccaaccccgctttctgacacccatttttactttcttactcttgggtcagttcctgctacagctatcccaccatggacttcttgatgagtggcctggcagcctgcggggcctgtgtattcaccaatcccctggaggtggtgaagaccaggatgcagttgcaaggagaactgcaggcccctggcacataccagcggcactaccgaaatgtcttccatgccttcatcaccatcggcaaggtggatggccttgctgccctgcagaaaggcctggcccccgccctcttgtaccagttcctgatgaatggcatccgactgggcacctatgggctggctgaggctgggggctacctgcacacagccgaaggcacccacagtcctgcccgcagcgcagcagctggggccatggctggggtcatgggagcctacttggggagccccatctacatggtaagaagagggctcttgcctgggaccttcagggcagatcctcgttgtaggataggagctgttctttcccaagggcataggtggcagrgtgctgccccactgcaagcagggaaaggcatcaggaaagtgctggtaggcttcggagtcttctgatctgccctatacacacccatctgatggacacgattgaatgtattgattaagattatgggctttggggccgggtgcagtggttcacacctgtaatcccagcactttgggaggccaaggcgggcggatcacgaggtcaggagatggagaccatcctggctaacacagtgaaaccccgtctctactaaaaatacaaaaaattagccgggtgcggtggtgggcgcctgtagtcccagctactcgggaggctgaggcaggagaatggcatgaacccgggaggcggagcttgcagtgagccgagatccggtcactgcactccagcctgggccacagagcaaggctacgtctcacaaaaaaaaaaaaaaagattatgggctttggaatcagactttctggaactaaaatcctggctttgaaaattactagttgttggccgggcgcggtggctcacgccagtaatcccagcactttgggaggccgaggcgggcggatcacgaggtcaggagatggagaccatcctggctaacacggtgaaaccccgtctctactaaaaatacaaaaaattagccgggcgtggtggtgggcgcctgtagtcccagctactccggaggctgaggcaggagaatggcctaaacccaggaggcggagcttgcagtgagctgagatccggccactgcactccagcctgggccagagagagagactccgtctcaaaaaaaaaaaaaaaagaaaagaaagaaaattactagttgttgagcttcagttgccacatctgtaaaatggtgataattatagtgccctttctgtgtgattattgggaggatcgagggagacaaatgcggtagacatgaaagcattagtgcgaatcctggcagacagtaagcatttggtagcatttgtttttattattatgtgttgatattgaggttggatttgtgaaggggaggataaggaatttaacatacgtcagagagtctagggatcaggaaggccctgggcatcacagaattaacaatctcaacatctgcccctttgagttatctggtataggtgaagggtcaagagcctgaggcccagaaaggggaagtgacccactcaaggtcacacagctgtttattgctaggactaggccctgcttagtgctcccaagagcaaaagagacggggaagtagtatgtcctgtagcagaggcagtctggtctcatttcaaggtgtgagtttcagggacagtggtctccccaaagtcagctcgatacctctgtgggggttgggggctagagagcaagttttgcccagagtctgatggggagcctgatagaagtggtggctggagatccagtctgggaatgggagctagcatgagaggcgggacaccaggtcttgcctaacatgaacagccttaggaaatattgccattctccaaccactccacccccgactgctagccccaagggaaagaggatatgaaggggttggggtgtcttgcagtgctgggagatccacccccctggggctggagcctagagacagagtctttttgttaaccagtttgttaagtaggaagaacaataatcagagtaagaggctattcattgctgaacaccctagaggaagtgtgagggggtgagacatttggttctcaggtaggaggatggccactggggcacaggctatgatattctcttgttcccaggtgaagacacacctgcaggcacaggcagcctcagaaattgctgtagggcaccagtataagcatcaggtgagggttcccaagtctgccaaagtccctgaccatcctttctcttttcccctagctttctgcctgcacccaacagatccaatcccagccactgctctgctcaacccatcggttctgtcccattttgcccctggagtctacccagaccctctttactctttttttagatggagtctcgctctgttgcccaggctgaagtgcattggcacgatctcggctcactgcaacctccgcttcccgggttcaagtgattctcctgcctcagcctcccgagtagcttgggactacaggcgtgcaccaccacacccagctaaattttttttgttttgttttgttttgttgagacagagtcttgctctgttgcccaggctggagtgcagtggcgcagtcttggctcactgcaacctccacctcccgggttcaagtgattctcctgctgcaacctcttgagtagctgggattacagccatgcgccaccacgtccagctaatttttgtaattttagtagagatggggtttcaccatgttggtcaggctggtctcgaactcctgaacttgtgatccgcccgcctcggcctcccaaagtgctgggattacaggcatgagccactgcacccggcaatttttgtatttttaatagagatggggtttcaccatgttggccaagctggtctcaaactcctgacctcaggtgatccacccgcctgggcctcccaaagtgctaggattacaggcgtgagccaccgtgcctgatgcctctttccaatatgtactccagttcctctaattttctgcccctgtttctcctgaccagtgaatggcctcacttgcatacatcccgccccagttcttgggtgcccagggaaggaacaatggggtggctagacaaccaagggcccacattctggctctaagcccacattgaactggttgtctggacaagagattcctattaaggacccatccttggcagtgttaggatggcagcccctgatgctgggctgtctgaaccccacccccggtcttccccacactagggcatgtttcaggcgctaaccgagattggccagaaacatggtctggtggggttatggcgtggggctctgggcggcctgccccgagttatcgtmggttcctccacccagctgtgcaccttctcatccaccaaggacctcctgagccagtgggaggtactgcctgggaaatgggtgggtctgtttcgggaaggggggaaggggagggcaagctgcactaggccctggaggggatggtgcccaacattcacaggtgagggagtggcaggagggcttggaggtcaactctttagacccttcccacagttctcttgtcacttcctcccagaaggggtacctgagccttcagggtaccctggccttcctccttctcactgtttttgcactgttataactggtgcagtggaagctcccccagttaccagcatctgtgtccccagggcagggactgtcctgtccttggggtgtaatagttggctggttgacmrygctcttcctctctacccccttagatctttcctccccagagctggaagttggcgctggtggctgccatgatgagtggcattgcagttgtcttggccatggcaccctttgatgtggcctgcacaaggctctacaaccagcccacagatgcacagggcaaggtaaggaagtgctctgggatgcaggcgggaagcaggggatggggaaggcagattgcgggtgcaggtgggatagcctgaaatgcagcctgtagaggtgctgcccctggtgggctctgacaaactccttctctgtgctctccctccctctctgacacactctcagggcctcatgtaccgggggatactggacgctctgctgcagacagctcggaccgagggcatttttggcatgtacaagggtataggtgcctcctacttccgcctcggcccccacaccatcctctccctcttcttctgggaccagctgcgctccctctactacacagacactaaataacagccgctttcccagtctccaccaaatgagcactccttggccacttgtgcctccaccactatgtcctggtgactactgattaggtgacctttcatccatccatgggggacagccaaccccactccccatctgttctcagggttgaatcactacaagagatgagtttcccttctttccttgggtgttgctttaaaccttccctacccattccctgggtaactcacacccctctctcagggctgaasgagtcatcccaaagtgtatttcctcccactcaccactgccacccttgagtccctcctgctcccatgcacagttttaaactcctccctccaaaaccaaagggaatygagagacccaattcccaggcgtctgggacccaggtgtcctgttagattcaaaggcacagagattatattgattataaagcaagtttattctgaagagggattgtcttatgtttacgcacagggaagaaataagaggaaaccctcttttcaacctcttttccccctcacagaaccgagtccccaagttctcagcaacatcatgcagtgcttcagcgcctttactggggaccaaagatgttaggatcgtgaagggtcagactggtcaccagytgttcaaagtcacccaggctccagggtgcaggtgacagattttcggggccaagagatgacctgttgtcagggcttggggtgggggaacagatggagacagaacatcatccaggcctgaggtttggaaattgccaattcctgttccccagaggacctgggtatcagttaccccaaacctctggcccactcctgcttccttggaggatcccaccagtgagtctccctgttctgtccctcccagcccgattctcctgggaacccagtcatgagatacccgcccrttccttcctccttacgggggctgattgaaggtaagcaagagatcagtctggtactggggcagcctcagcaaggcctgatgaagtgtcacgtcctttgctacctaaggggatcagagtcaggatgcttacctggatctctgcgtccccgctaccgcccttccaggacattacacactctcgggccctcacctgctggttttccttagctatctgctgcttgccagagaggacccaggcttcttgacagcggcccctcagggccaggttctccaaactgagaggctgaacagactccacatggacagccctagccccctgcacgccaccaacatcctcaaagtggtacctggagtagggaagcggggtcaggaagggacatctctggtcgcctccccgggagcatctttaagttgcaggcctggctcccggccmgtgcgtggtctcaccgcccggattaaccgtcggccgcgggccccgcccactggtccgaccccgcccctgccattggccagccgggggccattccctcaccgcgcagccgcttcgccccgtacgtgggcctgcagctcgagaagttccactatcaggctctggtccgtcacgggatggcagaaaacttcttgattgtccgggaccggtcggagrtcgctggagtgaggcgaggcagaccctggttgaccccggtctcttcccacaacccacccagtcagccgcccctgggcgccccggccttctcaccttacgtcaatggcccccatggggaggatggcggaaaaggcgcccccgaacagcgggcagtctctcgtgggctccatgggtctgaggctgggttatgggcattagaaaggtttaaaagaagtccacattgggtcacgtggcatcggctccctgggtttcgcagctgccaccgccacccgggtctggcttagctcccggatcctttaagatttggctccgccctgcgctctcgttggccaatcggcgccaagaccctgggggcgggggtcagcggctttgctccggaagccgcgctcttaggagtgcgcctggcgggacggtggggtctgccttggggttggacttagggttagggtctatgtcgcccccggtggtcacgagcatgctcccgccagcctcctcttgattgattgattgattgattgattgacaggtctcgctgtgtcgcccaggctgtaatgcagtggcgcgatcaccgctcactgcagtctccacctccaggactcaagtgatactcctgcctcagcctcttgagtggctcctgctcccgccaccacgcccggctaaatttttaattacttgtagaaatggggcggggtggggagtgtctcccaatcttgcccaggctggcctcaaactcctggactcaagcgatcctcccgcctcggctccctaagtgctggaattacaggcgagagccacagcgcctggcctcctcgtccttttcaagtggtcacaccttccaagaaggtcgcctgagaccctcctgaggggcaggtgctcgtcaaaggggcccacgtctaggtagggtctcttgagtcaggaaagcatagtttcacggtgttctgggcctctgaaagaagaatgggctgccacccagaccgctaattcatagatctgctgctgggaattaggggaacaatgcgtccaggttaggattcaggtctcacatcttcctgaaagtgagagccaacctgggtattagaaatctaattcctctcaaatatttgccttgggaatgctcccgggcaggtgcaaccccacccccagctccacacacctggacagaagcacagattaaaccctcttttgtttgtcttttacagatttgttgtgttctttaagttttaacttcactatatcatttcagttcatttctctattcatctttgatcctcagcacccggcacggtgtttagagcataacagacctgatatatattgggtttttttgttttgttttgtttttgagatggagtttcactcttgttgcccaggctggagtgcaatggcatgatcttggctcactgcaacctccgcctcctgggttcaagctgttctcctgccccaacctcccaagtagctggattacaggcatgcaccaccacacccagctaattttgtatttttagtagagatggagtttctccatgttggtcaggtgagtctcgaacttccgacctcagatgatccgcctgccttggcctcccaaagtgctgggattattacaggcgtgagccagcgtgcccagcccagacctaatatatattgttaagtgattgaataaactcartgcaaatgtctggaacccaggagatcacccataccctcatggattctagatgtcacctacttcccagccaagaattgggcaagaggactctgatcttgaggccattccacagggttccaagtgctgaccatacctctggaccctaatgacttagtgaaatgaagccaaagggtacatatttattggtctcttaccttgccaggccctaatgtgaagggctggagatacaaagacatttaggacacagcccccgatgcctcactgaaggaacagtggagcacactttgagtctttttttgtttktttttttgagaggcggtctcactgttgccaagactagactgtagtggtgcagtcrtagctcactgcagcctcaaccttgtgggctcaagccatcctcctgcctcagcctcctgagtagctgggactacaggcatgcaccaccatgctccggtaatttttgtgtgtgtgtgtgtgttttattttagggatggagtctcactgtgttgcccaggctggtctcggacttctggtctcaagtgatcctcctgccttggcctcccaaagtgatgggattataggcatgcgccaccatgcctggcccatactttgagtcttaaagtttgactcagaattcagtaggacatcctaggggtattctagctgggggaacatcaggagcaaaaacttggagatgagagggcatattttggagaaagcaagtgtatctgtttggcaagggagggtaggatgggaatgggtggcagggagctgcaaacacagtcaggtgtgcagggtttttgtagcgcacactaaggagcttgactcctcatttcttactatagccatcagactcctctctgagtctcatttcctcatctctaaaatgctgttggggggccaggcgccgtggctcacacctgtaatcccagcactttgggaggcccaggtgggtggatcacctgagatcaggagttcyagaccagcctggccaacatggtcaaaccctgtctctactaaacatacaaaaaaaaaaaaaaacaaaggaagaaatcagatatggatgtagttgagtctgacctatttctgggtaaagagagtagaataagtttgctgtatgaggaatttgacagagcgggggcgttacaggctctagagggaaagaaggaccccagccatgggaaacaaaaggagccaggtcagaggagtccaccccatgatgcttctctgggataatgagtgacagacctctctgtccctctctcctccttgctgccagcctgctctccagctccattccccaccaggggcaatactggctctggctgctttgggagcagtcaagcaggtagagtccttggaaagggacctacagggacatagaagttaacagggtgcctgcaccaggcataagggggtgtggaggcctgttacatgggcccagaggaggtcacgccaggtcaggaaggctgagaaaaaagcccccccaacttcctcattttgggtgtctggcctgtctcatgttctcccatgagccctacgcagctggggacccctggccctccacaattctgtgggctcttgggggctgctcagccagacctcctctgaatgaatggggtggaaggccaccctcacttggcaaatccccacgcttggctccacttccccttctcccttcacctttttttttgtgtgcctgtcaattctgctggccctgccacctgtcgactccctcaagtgttcaaattccaacttcccaagggacaggatccaactgggtcgattagttgttattcaatctgaaagtacctatttggccggctctcctgcctggccactcctcaggccaccacccaaacacaagggagatctctggtccagctggctgtggctaggatgataagtatcaggggacaaatctcagtagagagaaggccagcagccacttttctcaggcgaatgtgagggtatggctcgctgtcagcccactggttgcaagtaggcctgcaactgattgattctctacacctgggacattcccttatccaatgccctgcatgcagttgatgcagttgtttgctatggggacaagagtcccagagactctcccctttagggcaccaagagatggactcagatcagagagacaacaccacacccaaagtcaagcattcctttsagttaggacaatgaatatttctattaagcaggggttttcgtccttttttctactgtggactgctttggcagttttgtgaagcccatgatcccctattcggtgtaatgttattatttttattttttctgtgtttttgagacagggtcttattctgtcacccaggctggagtgcagtggcatgataacagctcactgcagcctcaacctcctgggcttaagccatcctcccaccttggactctcaaagagattacaggcatgggccaggtgcggtggctcacgcctgtaatcctagcactttgagaggcctaggtgggcagattgcttgagctcaggagtttgagaccagcctggaaaacaaagtgagactctgtctctattaccaaaaaaaaaaaaaaaaattagccaggcatggtggcatatgcctgtagtgccagctacttgggaggccaaggtgggaggatgacttgagcctgggaggcagaggttgtaatgagccaagatcacgccattgcactccagcctggtcaacagagccagactgtttctcaaaaaataaaaaagaaaattaaacccagatatttgatagagtacaagtctacttctttgttatcatattaactagatctagcagcagtctctaataaatgtaataaaaaactagcaatgcatacaaattatggttcaagatatccacagccattctaaagtaagcatatctgtaactgctattgagatgaaaccacagatactgctaatactactgtggtttgttacctaaattcacagtgaaaggaaatgctaaatttcagttaaaaggttactgaaaacatggctgtacgcagtggctcacccctgtgatcctaacaccgtaggaggcccaggagggaggactgcttgagcccagaagttcgagactaggctgcgcaacatggcagaacaccaactctaccaaaaaaatacaaaaattagctgggcatagtgactcgcacctcccagctactggggaggctgaggcgggaggattgcttcagcctgggagcttgaggctgcagtgagtcgacatcatgccactgcactccagcctgtgtgacagagggagaccctgtctcaaaaaaaaaaaaaaaaaaaagagccaggagtggtggtacacacctgtagtatcagctacttgggaggctgaggtgggaggatggcttgagccgggaggttgaggctgcggtgagccgagatgccactgcactctagcctgggtgacagagggagaccctgtctcaaaataycatagcctgggcgacaagagctaaactccgtctcaaaaaaaaaaaaaggaaaaagaaagatgaaatttttatccaagctcattgactaaagactaagaaacccagctatgaagtattttgtgtatttagccctgtactaggctttaggagagggtctaaaaatgggtaaaacatggcccttctttctgggccttcagcctgaacaggaagagc

SEQ ID NO: 1646 - DNA, 26471 bp, Homo sapiens
tgtggcgtctgaacctagacgtcccttttggagacagctggacaaagccctattctccgcagccccagcctctatcctgaggcctctgggagctgcgtgacggccagcatggggtgctgatcatggtcaaggaggcaggtctttgccaggttgccccatgcagccacccatcctcagcatcctaacttgagggggcaggagagggctttgtttttataatccggattaaatttcccttccctgggcacaagtgcctcatgagggcccggggctgctggttgggagggaaagcatccccgtttttgcagtgaggaggcyggccgagggctggggttccacttagacccttggcagaatggctgttgaggggcaggcgctgcccagtgcccacgtctggaaagctaattcccgggtggacgctgaacatacctgctgagagactctgtcccctggtttccaggacagttgtcacaagctgagtggggggggactcccaggacttgagggacccagtcccaccccaaactgctccccctcccccaaattccctttctcctcctgctctttctccccgctgtgcctcccccagttacccacagaagtgcctgcctctccagygctcacagaacacacaaaaagggacaggaattggtcactgggtagtggccgtggctcctgacgatccagaccagcgtctggcccaagccattcagaggtggggtctggggcctgggggttttgtgtcgtgacactttgtctcaaggagattccacatagggatttgaattaggctttctgcttgccaaggcctgtggcatctgagcctggctgagggccgggcaagcctcccctgagcctttggaagccgagttcactctctgcctgcccaggggagcaccggcttggttctgggggctcctctaacatctcaggtttttatcttgtcttaaatttctttctaggaaaaaacccttccctgccaaaggtgactgtgttttctgccgccgaaggagggcccggtccctccaggctcagtgtggcttctccctgaccccygccctagaacttttgccagtgccttttytgaaactcctgtgtcccgggccccccaggcggagaaggatatgccggattctgcctggggctgggctytaggagaccccaaatttgacaccacagaaagcaaataaaacacttgaaatacgcawacatttcctgtgtgtccttttgtggggctggagttcagctgggtgcccggggatagaggggaccccgtgtcactgggtttctattctcggtggtgctgggcccagggcagctggtgaccatgtgctgagtgagcgagaggaggggaattctgcctccagtggtctccttcctcaaaatcagaggcctggcccagcgcagtggctcacacccggaatcccagcactttgggaggccgaggtgggtgaatcacctcaggtcaggagttccagaccagcctggccaacatggcgaaaccccgtctctactaaaaatacaaaaattagccaggtgtggtggcacgtgcctgtaatcccagctactcaggaggctgaggcaggagaatcgcttgaacccgggaggcggaggtcacagtgagccaagatcgcaccactgcactccagcctgggcaacagtgtgagactcagtcycaaaaaacaacaacaaaacccgcggacctttgttccaacacacagggaggttgaggaacttgcctgtggtaacacaggcactggggtttgagcgatgatctgcrtcaacctccagggcatacaaaatccccatcatggctgggcacggaggctcacgcctgtaatcccagcactttgggaggctgaggccggtggatcacctgaggtcaggagttcaagaccaggctgaccaatatggtgaaaccctgtctccactaaaaatacaaaaattaggccaggcgcagtggctcacacctgtaatcccagcactttgggaggccgaggcgggcggatcacaaggtcaggagatcaagaccatcctggctaacacggtgaaacctcgtctctactaaaaaatacaaaaaattagccgggcacggtggcaggcacctgtaatcccagctacttgggaggctgaggcaggagaatggcgtgaacccaggaggcagagtttgcagtgaaccgagatcgcgccactgcactctggcctgggcaaaagagcgagactccacctcaaaaaaaaaaaaaaatacaaaaggtagctgggtgtggtggcrggcacctgtaatcccagctacttgggaggctgaggcagcagaatcacttgaacccggcgggtggaggtttccgtgagctgagatcacgccactgcactccagcctgggcgacagagcaaacaagactccacttcaaaaaaaacaaaaaatccccatcattctgacaggggatgccatgccattgccacctttacagacagggaaactgagtttccaccagttgaagccccttgtcccctatgtcacggccagggagagtaggggtgggaatgtgaacccaggcgggcttctctggagcggagggccttgaagaacacaaatggacatgttcattccctacgcctgtcctcagcaggaatgaagacaccctggtctctggctctctgagaataaacttttgacaccaaagggacttggacaacagttaggaagatgtcctggagcaagtggaccccgtgggttgggggaacttcttggastcacagaggactgagggttcttgcacccccagtggaggtattcatatctgggtggtctttcccatagggtcgactcttattattgttatttaatgtagagacagggtcttgccatattgcccaggctggtctcaaactcctgggcttaagttctctacctgcctcggcctcccaaagctctggaattccaggcatgagccaccatacccgtccctttgctgtcttgagccttagtttacccatttctcgtggggcttttgtggcaattcaatgagattctgcttttacagcccttaacttggagcctggtgccctgtcattgctcagtaaatacaatgatcagggtgtgggctctcgcttataatcccagcactttgggaggccaaggcgggtggatcacttgaggtcaggagttcgagaccagcctgggcaacatggtgagaccccccccccccatctctacaaaaaatacaaaaattagacaggtgcagtggcgcacacctgtagtcccagctactcaagaggctgaggtgggaggatcacctgagcctggggaggtcaaggctgcagtgagtggtgatcgtgccactgcactccagcctgagtgacagagtgagaccccatctcaaaaacaaaaacccggtcgggtgcggtggctcatgcctgtaatcccagcactttgggaggcaaaggcagatggatcatttgaggtcaggagtttgagaccagcctggccaacatggagaaaccccatgtctactaaaaatccaaaaattagccagccatggtggtaaacacctgtaatcccagctactcgggaggctgaggcaggagagtcgcttgaaccagggaggctgaggttgcagtgaactgagatcgcgccactgcactccagtctgggtgatagaatgagactccrtctcaaaaaaaaaaaaaccccacaaaataaatacagttaccatcacctcctcttccaggaagccctcctggctacctaggcatctcctctgactcctacagctgcctgggtgtccccattgtagcactctgggtggtaattgacagcctctgtgagagggtggatgggtatgtgtggggccccctctgtgtcttctgtgcccagcacagtgccagggacacagtagggaagcaataaactgctgrgaggagagstgagtgctgtgggtccactcctgaggccagccaggggctcagcaaggcaccaatgcctcctcccaggagtgaaagatgctggaatcaccaggctcctcctgcagtctggggtccccacctaaggaggcccctcaccccgtggctgtcccagtcattcaggaagtgtccactgtgggctgagccctggactggggacacagcaaggatcaggcagctgggagtacagcctggaggwccccccttgggatgagggctgcacaggcagttaaagggtccaaggatcatcccaggatatggctgagaggctgcaagaggctccatcccctagaggccccctccgccctcgcctgggtgctcccagccttactcaaaggagcaggtcggcccggtgcgttgtctcacacctgcaatcccagtgctttgggaggccgaggcaggcggatcacttgagcacaggagttccagaccagcctgggcaacatagcaagattctatctctacaaaagtaaaaataaatcttataaagtagctgtggactgggcacagtggctcacacctgtaatcccagcactttgggagaccaaggtgggcagatcacctgargtcaggagtttgagaccagcytggccaacaaggtgaaaccccatctctactaaaaatacaaaaattagccaggcatggtggtacacatctgtaatsccagctactcaggaggctgaggcaggagaatcccttgaaactgggaagcagaagttgcagtgagctgagatcgtgccactgtactccagcctgggtgacagagtgagaccctgtatctaaaaaaataaaataaaaatgaaaagatgaggatcttggcctccattcttgcccttccactccattccaactgctgagcctctcacaccctctgtggctccctttcgcctacaggaaataggatttctgtactgggcatttgaaccccattcccttgtttctgctgacccccagcagtctcaatatcccctacttcctcttcccagaaccaccctccccaaagcccttatcgatgcttggaggattcctatgcatccctcaaaatccaaggtttgggaaagatgctgcagtggtctcaagacatcctcagtgtgatgacagcctggggtgggggtaagggggcaaagtacagcaccagaaatcccaactgagtccccccacacgtcttccaccttcccaccctctctttcgggttctggctccctgcctccaggcaatcaccagtttttaccaggagtgcctcagacctgcccggacatgtccaagtcccctagaagcagggaggggtgggtgaggctgtcacctctcccttccctgtatggtgctgataagggcgtggggaggcagagacaggcagagatagacatgatgagagacaggcagaaatggagggagagccagggagagakagacacaaagagaaaaagtggaaattctccagatattttgtttagggtgaggacacggagacacagagagggacttagccagctgaggatgacgatttgggatgttaggtcacccaggtgctgtgctgtgtaactcaggcacagagctgccctgttccgagcctcagtttacccctgtgactcagagcagatctccatacccccatcacagggctgtgtatccgagctcagccagagcctggcatgcagtaggtgcttcataaatacacactgtggacagtagaattatgatgggagcgagcgtgtgaactgggttgctaatgtggagcgtgaagrgggaggcccagggttactcggccaatgggttccgggcagcaagcacgtgggggaagcctcagctgaccacttcctggccagtttatgcaggaactcgcacagccggtccctgaggctgagcccaccacttccgccccccatggtcccagccctgctgactcatactcagctgccacggtccgctttccctgctgagcacgggggtgggggcgggggggaagagggggagggaagggcacctgaccgaggccagaggcccagaaaggacagaaggtcatggctggggagaagcaggcaggagaaccgagtcttggccttaactggctggcaacgtaaaacctgccctccacaaggacaagatgaaaacttggggatttggaggggacaacaaattagactcaatcacaatttcaaacttttggatgtcaatatatccatcaagaaattgaaaagaggcctggcatggtggccgatgcctgtcatcccagcactttgggagaccaacgtcggaggatcacttgaggtcaggagttccagaccagcctgggcaacgtggtgagacccsgtctctacaaaaaaatttaaaaattagctggacaggggccaggcgcagtggcttacgcctgcaatcccatcactttgggaggccgaggcctggatgacagtgagagactctgtctaaaaaaaaaaggacaggtgcggtgsttcgcgcctgtaatcccaacactttgggaggccaaggcagatggatcacctgaggtcaggagttcgaaaccagcctggccaacatggtgaaaccccatctctactaaaaatacaaaaattagccaggtgtggtggcgcatgcctgtcrtcccagctacttgggaggctgaggcaggagaatcacttgaacccgggaggcagaggttgcagtgagccgagatcgtgccattgcactccaggctaggtgacagacagaaaatcttgtctcaaaaaaaaaaaaaaaaaaaaacccaccagagataaaaatgggcagcagatgacattgtttacataatactgaccacaaacttgatgtcctaaaagaacagggacttctctcagagttctggaagccagaagtccgaaatcaaggtgtcacagcaggactggttccttctggaggctgtcaggactcagaatgtgatactccaaagtatggctccttggcaaaaactttgtggtttttgtttttagagacagggtcttgctctgycacccaggctggggtgcagtggtacaaygatagctcactgcagcctctacctcctgggctcaagcaatcctcccacctcagcctcccaagtagctgggactacaggcatgcgccaccacacctggctaattacttttatttttgtagagatgaggtctcgccgtgttgcccaggctggtgtcaaacttcttcttcttcattttttgtttttgagatggaatctcgctctgttgcccaggctggagtgcaatggtgtgatcttggctcacagcaacttccgccttctgggttcaagtgattctcctgcctcagcctcccgagtagctggaattacaggcatgtaccaccgtgcctggctaattttgtgtttttagtagagacggggtttctccatgttggtcaggctggtcttgagctcctgacctcaggggatccacctgcctcagcctcccaaagtgctaggattacaggcgtgagccaccgcgcccagcsaagacagttattttaaagtatttgtctagtgagtctgatgtgtgggcttccttagggatggtttctgtctgttaattttgttccttaaaatgcgccacactttgctgtttctctgtatgcctagtgatgtttttgttgttgaaaagcgagcatttgaatattctaaattatggtaactccagaaatcagattctccaccttcctgagagttttgtgatttttgtttctgtttttaattatggaaggcagtagccatctctttgtttagatagttttccaaaccgcttttttttttttttttgcaaagactgtattccggccgggcccggtggctcacgcctgtaatcccagcactttgggagtccgaggcaggtggatcacgaggtccggagatcgagaccatcctggctaaaacggcaaaacccccctctctactaaaaatacaaaaaattaggtgggcatggtggcgggcacctgtagtcccagctactcgggaggctgaggcaggagaatggcgtgaacccgggaggcggagcttgcagtgagctgagatygtgccacggcactccagcctgggcgacagagcgagaccctgtctcaaaaaaaaaataaaataaataaaataaataaataaataaataaacctgttccccaaatatatatatgaaattaaaacatgcgtggtcatgatcaagttctaattacagacaaagacttccwtgagattrgggagaacctgccttggactacggggaccacttcaactctcttgggaatgatttttctttaggtgggtgctggataggggtgtttgtgattttattattaatacttttgtgtgtgcctgaaagatttcacaatgacaaataaaactgagaggaaaaggtttggcagttccccattaagttcaatacagggttactctgtgacccagtaattccactcctcagtagagagccaagtgaaatgaaaacaggtgttcaaacaaaaacgtgtacacccacttttacagcagcattcttcatcaaggcgaaactacagtacaaatattgtaagattccatttctgtgaaatgttccgaataggtaaatctataaaggcagaaattaggccaggtgcagaggctcatgcctgtaatcccagcactttgggaagccgaggtgacaggatcgctggaggttaggatttgaagaccagcctgggcaacatagcgagatcccatctttacaaatttttttaaaaattagcaaggcactggctgggtgaagtggctcacgcctgtaatcccagcactttgggaggccgaggcgggtggatcacctgaggtccggagttcgagatcagcctgggcaacacggtgaaacccccgtctctactaaaaattcaaaaattagctgggcatggtggtgcatgcctgtaatcccagctactcgggaggctaaggcaggagaatcgtttgaacccaggaggtggagaytgcagtgagtcgagatggcgccattgcactccagcctgggcaacaagagtaaatctccatctcacaaaaaaaaaaaaaaaaaaaaagcaaggcacagtggcatcaggctggggtgggaagatcacttgagcccagccattcgagaccaacctgtgcaacacaggaaaaccccattctacaaaatagtaaaaaattatcagggcatggtggcacatgcctatagtcccagctactcgggagagtgatgggggaggatcacttgagcccaggaggtcgaggctgcggtgacctatgattgtgccactgcactccagcctgggctacacagccagaccctgtctaaaaagaaacaaaacaggcaggacgcggtggctcacacctgtaatcccagcactttgggaggccgaggtgggcggatcacctgacatcaggagttcgagaccagcctgtccaacatcgtgaaatccccctctctactaaaatacaaacattagccgggcatggtagtgggtgcctgtaatcctacctactcgggaggctgaggcaggaaaattgcttgaacctgggagatggaggttgcaatgagccgagatcgcgccactgcacgacagcctaggygacagagcaagactccatctcaaaaaaaaaagaaaaagaaaaaaagaagaaactctcattgatggagtgttcattgatggagcactttttgggagtgggttgacatgctcacaggtgtttttaacctcacctcgtctctgaagaggtgcagataaaagtcacctggtgaggaaaatgcctttttaaaaacaatttttagagggccagcacggtgactcacgactgtaatctgagcaatttgggaggccgaggtgggcggatcacttgaggtcaggagttcaaaaccagtctggccaacatggtgaaatcctgtctctactaaaaatacaaaaattagttgggcatggtggcacatgcctgtaatcccagctactcgggaagctgaggcaggagaatcactttaacccaggaggtggaagttgcagtgagccaagatcgcgccagtgcactccagcctgggcaacagagcgagactctgtctcaaaagaaaaaaaaaagagatggggtcttggggtctcactgtgttgcccaggctggtctccaactcctggcctcaagcaatcctcctgctttggcctcccaaagtgctaggattacatgcctgagccactgtgttcagccagggtgtcccttttctgagactgcattcttyccaccttgcccaagtattgcaggagaaccacaggccccatgctgtgctggcgaaaatctcatctcatgctggcctgttagggtggccatatcctctcatttcagaggctctgagggagatggaacaggctcagcggctggctgcttggggctctaaccccagccctgctgtcttctggctgtgtggccgtgacgagcccacctctctggcctcagtttgtcatctgtgaaatggacataatctatccaccacatcaggctgtataaagattaggccaggtgtggtgcctcacacctgtaatcccagcgctttgggaggctgaggcaggcagatcacctaaggtcaggagttcgagaccaacctggccaaaatggtgaaaccctgtctctaataaaaatacaaaaattagctgggcatggtggcatgtacctgtaatcccagctacccaggaggctgaggcaggagaatcgctggaacccgggaggcagaggctgcagtgagccaagattgcaccactgcactccagcctgagtgacagagcgaaactccrtctcagagaaaaaaaaaaaaaaaaaagatatgtccaagtcctaacgctcagtatctgtgaccttatttggaaagaaggtctttgcaaatgtaattaaactaaagatcttgtactgagatcattctgaattaagaatggaccygtggctgggcacagtggctcacacctgtaatcccagcactctgggaggctgaggtgggcagatcacctgagatcaggagttcaaaaccagcctggccaacatggcgaaaccccgtctctactaaaaatacaaaaaaaaattagctgggcgttgtggtgcacacctgtaattccagctactcgggaggctgaggcaggagaatcacttgaacctgggaggctgcagtgagccgagattgcgccactgcattccagcctaggcaacaagagtgaaactctgtctcgaaaataaaaacataaaaagagtggacccatggccaggcacagtggctcatgcctataatcccaacactttgggaggccaagatggaaggatcgtttgaactcagccgtttgagaccagcctgggcaacatagtgagacccctgtgtctaaatacaaacacaaacagaaaacaaaaagaacccgggctggctgcggaaccccctagatggcacaggcacatcctggctttcgaggacagtcacgagcatgagacagcatttcttcttgtcctcggggcctgcaggaagtttttaagtaatctgcttttgtgcctcttccaaatctcctcctatgaccctgtttaccttacatcacaagaaacaatcaataaaagtggtttgtgttcgtgagtgccgtgtgtttgacaaaggcgttgataactgagagctggtagtggaggggggagattttgggagattggggccctgccaggtggacggactggcctgacctccrgcccctgygctctgtttacttccatcccagctccacctctggggacccatggaagctgtcggtgaggaacacaggatccgacctgctgagctcatctctggccacctgcctgcatccgccccatctctcctctcagcttggccatgaggcgggctatgaggtcattggttaaagatttggggaagcagagccaggcgagtggccagatgtggtggctcatgccatcacaggatcccagcactgtgagaggacaaggaaggaggatgcttgagctcaggagttcgagaccagcctgtacaacatagcaagacccccgtctctacaaaatataaaattagccagttgtggtggcacgcgcctctagtcccagctactcgggaggttgaggtgacaggatcccttgagcccaggaggtcgaggctgcagtgagtgggtaacagagccaaaccctgtctctaaaacaaacaaaaacagaaacaaaaagtacactacttactgtcctgcttctcaccattccagcctggtagtccttttttttttttttgagacagggtcttgctcagttgctcaggctggagtgcagaagcgtaatcacagctcactgcagccttgatctccaaaaagactaccagcttggctgggtgtggggactcatgcctataaccccagcattttgggagccagaggcaagaggattccttgagccaaggagttcgagaccagcctgggcaacacagtgagaccctatctctaaaattttttttttttgagatggaatttagctctcgttgcccaggctagagtgcaatggtgcaatctcagctcaccacaatctccacctcccaggttcaagcaaaattctcctgcctcagcctcccgagtagctgggattacaggcatgcgccaccatgcccggctaattttgtatttttagaagagacggggtttctccatgttggtcaggctggtctcaaactcccaacctcaggtgatctgcctgccttggcctccctatctcctcattgggggccataggattaaatagcttttttctttttttatgagacggagtttctctgtgtcccacaggttggaggcagtggcacaatcacggctcacggcaacctccgcctcctgcctcagcctactgagtagctgggattacagtcatgcgccaccacatctggccatcttgtgtgtttgagtaatctcggtatatatccattttgtctatgaagctcgttaatttgggccccaaagcacccgctggcaatggcctttaagtgcgaaaatcctggcattaggcgtcccccaccttttttttttttttttgttgggacggatgtaggtgtgtcgcccaggctggagtgcagtggcgcaatctcggctcactgcaagctccgccttccgggttcacgcctttctcccacctcagcctcccgagtagctgagactacaggcacccaccaccatgcctggctaatttttttgtatttttagtagagagggggtttcaccgtgttagccaggatggtcttgatctcctgacctcgtgatccgcctgacctcggccttccaaagtgctgggattacaggcacgagccaccgcgcccagcctggtgtccttatttcttgggaaaggatacagagggtcagagaggcgccccagcttgtgcaggaatgcattcctgagatctggcctggccgtggtcactggagtgtttactctgcttacagggtctggtgtagtgggggatggctgggtaggaacgtgcgggctataaagccagaccccaggtgtcagtgcggttcagaaagcaactagcacagccatgcccaggccaggacccgtgacacagcgatgctctcagatgctgctgatgttacagatgttgttgggggcaccctgagggggcaccctgactctgcaggtgagaaccttctggggttcctaggaccctcggacaagcactctgatccggatgactccaggtcccaggagttgcagaaacgccaccaggaccttcagagcaccagttagacaaggagagccaggaggagctgggccccaacctcatccaaaagcacaggtgagctctgagacctccacccccaggacagcccccaygtctattttctttttctttaaagatgttcttatttgggggccaggcgtggtggctcatgcctgtaatcccagcactttgggaggccgaggcaggcggatcacctgagatcaggagttcgagaccagactggccaacatgacagggtgagaccccatctttacaacaaatacaaaaattacccaggcatggtggcacacgcctgtaatcccagctactagggaggatgaagcaggagaattgcttgaacccgggaggcggagattgtagtgagttgagatcgcacaactgcactccagcctgggcaacagagcgagactccaatccaaaaaaaagaaaaaaatcccctaggacagggctgtggctgagaccctgagggctggaggcttggctggccttgcacagcagcgggtgcatgctggggtggggagaggcctggagaccctgtgactccactgggggccttgctgtgtgaccccctagtgagtccttgtgtctcttacccacgcatgcctgtcacatgcagacacccacacacacccastatctgccggacagrgcagcccttcctctccgcagccaggaagctggacataggcacaagggctgacgcctggggccaggaatccygcctgagcattaggagaaggtctggaaccccagggggaagggcactcctggggcatcccctgcccctctaccatctggtggctggactctacaccagcctgccctgctctaaaaccccagctcctcaattctgtgccacctcctctctgggcccagacaagagcagattcatccctgccccaaaggaaccaccagtcttgggtcagcagagctgggcacagacacttccagtgccgtggggctgtaactgtgataggtctgttgctccatgcacttggcaagtcaacagctgagaaaacaggttgcaacatggaaagagttttaatccgaccggcgtggtggctcatgcctgtaatcccagcactttgggaggctgaggcgggtggatcatctgaggccagcagttcaagatcagcctggccaaccaggtgaaacctcatctctactaaaaatacaaaaattagccaggcgtgatggtgcgcacctgtaatcccagctacttgggaggctgaggcaggagaatcaattgaacctgggaggcggaggttgcagtgagccaagatcataccactgcactccagcctgggcaacagagcgagagactgtctcggaagaaaaaaaaaaaaaaaaaggctgggggcagtggctcatgcctgtaatccccacactttagaggcagaggccgacggatgacttgaggtcaagagttcgagacctgcctggccaacatggtgaatcacygtctctactaaaaacacaaaaattagccaggtgtggtggcgcatgactgtaatcccagctactcagtaggctgaggcaggaggcggaggttgcagtgagccgagattgtgccactgcactccaacctgggggacagagagaaactccgtctcaaaaaaaaaaaaaaaaagagatttaatcctagggccacccaatgaggagataggagggaacctcaaatccatttccaggaggaggagtttggggccatataaatgtatatatacaaatatatatatwttttttaagatggagtcagccggccgtggtggctcacgcctctaatcccaatactttgggaggccgaggccggcggatcacaaggtcaggagattgagaccatcctagctaacacggtgaaaccccatctctactaaaaatacaaaaaaaaattagccaggcgtggtggggggtgctcatagtcccagctactcaggaggctgaggcaggagaatagcatgaacctgggagctggagcttgcaggttggagtgcaatggcatgatctcagctcactgcacctccgcctcctgggttcaagcgattctcctgcctcaggctcccgagcagctgggattacaggcatgtgccaccacgaccggttaatttctgaaattttttagtagagacagggtttcatcatgttggtcaggctggtctcgaactcctgacctcaggtgatccgcccgccttggcctcccaaagtgctgggattacaggcrtgagccactgcacctggccaggggctagagttttaatttttaaggattttggagtgggctgaagtgtggaggtcattgcttggtgaaagagtgcaggaggtgaagtcacagacagtaagaaactgtattctcatgcagattccgttcctctgtggggtcttcacactggtgggtgtcattggttaaggatttcaaaaacatcttaagaaattcttctaaaaagtcttatgattctaaggtcggaaatcacatctatagcaaatggtcggtatcaggtgctacaagcaacttgcggtcacaaggaagtgggtcaaagtgcagcctgattagtgcttaattataactaagtttctgtccagaattctttttttttgagacagagttttgctcttgttgatcaggcggaagtgcaatggtgaaaacttggctcactgcaacctccgccctctgggttcaagcgattctcttgcttcagcctctcgagtagctgggattacaggcatgtaatcccaccaccaagcccagctaattttgtatatttagtagagacagggtttctccatgttggtcagrctagtctagaactcttgacgtcagatgatccacgtgcctcggcctcccaaagtgctgggattacaggcgagagccaccgtgcccggcgcagaattcttttttttagagaygaggtattgccatcttgcccagacttgtctcgaactcctgggctcaaacaatccacccacctcggcctcccaaagtgctgagattactgacataagccaccatgcctggcccccagaattatgaatcctgtgaggatggcttcaaggtgagcgctgagccagacaaaaggatggggtttgggagcaccctgcttagactggaaagataatgttggagaagacttcctggaagaggggctttttgcgtagagttttgaagaatgagtaggagttctccagaggaggatgagtaactgcaataacacccagtttatcaagtgcctcctatgtgtctggccctgtgctttacccctcatttgaccacctctccagtgagagtctcagtccyttttttcctggtgaggaaacaggcatggcagagaggcatgacacatcaaggttgcccttcctggctccatctagccygttctcctctgcttcctttgtttttcaccatctttagcctttgaccccaaccaaaaagagaagagaggaaatcccatgggcatagacagccacctcttaaactcttgtctggaatttttcacatagtaacaatgtctttttttcctccaaaaagactcccaggctggaatggtgtcctcatatcgaggaagaggatactgaggcycagaaatgtgccctagctttactaggagcgcccccacctaaagatcctccccctaaatacacccccagaccccgcccagctgtggtcattggagtgtttactctgcaggcagggggaggagggcgggactgagcaggcggagacggacaaagtccggggactataaaggccggtccggcagcatctggtcagtcccagctcagagccgcaacctgcacagccatgcccgggcaagaactcaggacgstgaatggctctcagatgctcctggtgttgctggtgctctcgtggctgccgcatgggggcgccctgtctctggccgaggcgagccgcgcaagtttcccgggaccctcagagttrcacwccgaagactccagattccgagagttgcggaaacgctacgaggacctgctaaccaggctgcgggccaaccagagctgggaagattcgaacaccgacctcgtcccggcccctgcagtccggatactcacgccagaaggtaagtgaaatcttagagatcccctcccaccccccaagcagcccccatatctaatcagggattcctcatcttgaaaagcccagacctacctttgagcctcagttgccccatctgtgccctgggtaggaatatcctggatccccttgggtctgatggggtagccgatgcctgatttgcacccacaacgtgggaggttataacctgtccccaagttgcaaatggggaaactgaggtacagggatgccagggaccctcctgaatgtgcacagcacctgggaaacccggggacggggtcgggcgtgcggtgtgggcatggtccctgacctgggctggggccaggatccaagagaaacaatgggggtgtggtgcatggatagaagtttgtgatgggcagagccagctggagctggttctgaatctgatgaaatcgcttgtcaaggcactgctaaagtcacatgcaacgagcgacttgttaggggaggaggagagtattttccccatctctgtgccctccatggaggctccaggggtgcagggcactggatgaggtctgggctgtggtgggacccaggagggggcaggcagaggggcacactcttagcccgccctaaacccatctgtgccgtrtgactccggcaaacctctcacccttgctaagcctagcaactaggttaaggcaccctcaaaccccagtctccccagtctccctaacacttgtaccagcctgaggggctgtgattcctagaggctcagtagtctggaatgtgatgggtttggcactcttcatttctcgggattacacctgtaatcccagcactttaggaggccaaggtgggagcatcgctttaggccagaacattgcagcctgggcagtatagcgagaatccatctctaccaaaaatgtttaaaaaaaattagccagacatgatggtgtgtgcctgtagtctcagttattcaggaggctgaggcrggaggagcacttgaatccaggagattgaggctgcactgagccatgagtgccccactgcactccagcctgggtaacagcaagaccataataaataaataaataagtgaagcaagtaagtttttgactgccagaagaaaagcagagccatggttggaatctcaggctgcctgaatatcagatatacattaattccttcaagtatttactaagcacctattgtgtgccaggcacagtgtcaaccaagctaagattctaagtagggaatatgaatgatacacaaggaaataaaatagggtgcttcctattttaggcaggctggaaggaagaggaggagccagccatackgagattcaggagattcaaggggagaaatgcccytttttttttttttttttttttttttgagagggagtcttcctctgttgcccaggctggagtgcagtggcacgatcttggctcactgcaacctccaccgccccgattcaagccattcttctgcctcagcctcccgagtagctgggatcacaggcgccagccaccatgcccagctaatttttggtakttttagtaraagcgggcgtttcaccatattggccacatatcggccaggctggtcttgaactcctgacctcaagtgatccacctgcatcggcctcccaaagtgctgggattacaggcgtgagccaccgcgcccgcacggagaaatgctcttggtaggggaaataacttgtgcaaaggcgccgccgccgtggtgagatccagcttggcgtgttaggggaaatgggcaccctcgttcctggaaaacggtaggcctgtgggtgaccagcttccctatctgtcttcccacagtgcggctgggatccggcggccacctgcacctgcgtatctctcgggccgcccttccygaggggctccccgaggcctcccgccttcaccgggctctgttccggctgtccccgacggcgtcaaggtcgtgggacgtgacacgacckctgcggcgtcagctcagccttgcaagaccccaggcgcccgcgctgcacctgmgactgtcgccgccgccgtcgcagtcggaccaactgctggcagaatcttcgtccgcacggccccagctggagttgcacttgcggccgcaagccgccagggggcgccgcagagcgcgtgcgcgcaacggggacsactgtccgctcgggcccgggcgttgctgccgtctgcacacggtccgcgcgtcgctggaagacctgggctgggccgattgggtgctgtcgccacgggaggtgcaagtgaccatgtgcatcggcgcgtgcccgagccagttcsgggcggcaaacatgcacgcgcagatcaagacgagcctgcaccgcctgaagcccgacacggtgccagcgccctgctgcgtgcccgccagctacaatcccatggtgctcattcaaaagaccgacaccggggtgtcgctccagacctatgatgacttgttagccaaagactgccactgcatatgagcagtcctggtccttccactgtgcacctgcgcggrggasgcgacctcagttgtcctgccctgtggaatgsgctcaaggttcctgagacacccgattcctgcccaaacagctgyatttatataagtctgttatttattattaatttattggggtgaccttcttggggactcgggggctggtctgatggaactgtgtatttatttaaaactctggtgataaaaataaagctgtctgaactgttccctgtggtgtccaggataagggaaggtgaccttgagaagatcctcctctccctgacctcagtttctctaggagacctgggagggggtaagtggaaaggctcaaggaatgagtggcaaggtgttctcggagatgccaagccattggaaggtgcttacgacacctgtgggctctaagggcagccttggccattcctgactccctgactctctgtctctatttctctatctccttattgctgtttcttttttctttttattttttttagacggggtctcactctgttgcccaggccgaagtgcagtggcacaatcacagctcactgcagcctcaaccacccgggctcaatcgatcctcccacctcagccacctgagtagctgggactacaagtgcatgccatcatgcccaactaacttttgtattttttgtagaggctgagtttcgccatgttgcccaggctggtgtttctgttttggaaacagctgagaccccatacctttttaagtctcagcttccctccatctttcctcattcctcaaaacttctctctttggggtctgaggcagaggatctgtctctgtctttgtctctatcaccatcctgttgctctccccacttgggagtcacctttccaaacacaggcagctcagagccaagtctatctgcaaccaagtgccttgttttgtggtactgtccccaacctgaggggttagtcccatcacccctcctgtttgtggcacttccatgttagtgacacctcattctttcacatataaagagtagggagaaacaaataagttgtgaagaatattttcatgcacaccacatctcccaggttatatatacttcctgtttaggatgttggaattttgaggtgtgctgagtccagccccctctccacaccaaactgcctgcccatcctgaatctctgagaggaatggcgatgggtgtcttgagggacagagtacccacttccagcagtgaggtgtatctgctgggaatgccatcacccacaggccaacctgaatgactgcaggttccccttaayrtattcagtgagtgcccactttatgccaggccccggacacagctgtaaaaagacacacaaggaccaccccmctttgcggagcctggttgagtgaaggggacaaatgagtaaatcctaagaaagtagttgattgcagtaagatttgtgctggggattcaacccatcagttcattagtgaacggaggcagaggtgatctagatagttggatggggaggcctccctggggagggaggtcacatttgagctgagacctggaggaagaaaaggagtcggggagggggtagttgagggtggacattgcaagtaaatgcaaacagcaagtgcaaaggccctgakatgggagcaggctcacttcagtcacagcaaagctgttgaaaatgggcacctaggaggcttcaaaattaaactcaataccaaaaggcagcagatggtgtcactgagtctttccccaaacaacagctgttgcctttgcaaggtatagggctgggcctgtgccttctctgtgcttctccaggctcttgcacaagttggtccacccagccagcatgccctttcctctccaattctcaaactcctatgcatccttcaaaacccactgcagattcccctcttacatgcagccttattcaaactcattcaattgtctccatgtggggactgtgctcccattcttccctttggcccaggcttgatctcccaggactgagggtacttgtctctagttctatctcccccaggttggaggattgggctgggaccagctgataggaaacccagttgaggcatgagcctgamaaaactcttgaaatacagacatctgtgagtcattaactctgcctgagaagaaaccagggacagcttctcaaaggaggtggcattgcaccagggtcttgaaagattttctcagaatattagagctaaaggaatatatacatttttttattttgggggtggtgtgggctgctctggaggccaagcctggagatcagggacctgggaaggggccctgagaggggcagaagggaggaatgtgcctgggcgcagtggccacgcctgtaatcccagcacttcaggaggccgaggcgggcagatcgcttgaggtcaggagttcgagaccagcctggccaacatggcgaaaccccatctctattataaatacaaaaattagctcggcatggtggcgggtgctgtaatcccagctactcaggaggctgaggcaggagaatcacttgaacccaggaggcggaggttgcagtgagctgagaccgcagcattgcactccagcctgggtgacagagtgacactcagtttcaaaaacaaacaaacaaacaacaacaacaaaaaaaaacagggatgggaggtggggagcaatttgggagtctcagatggagacttggtcttagaactcagaaatccccaccttgaggaacccacgcaccctgagccagcagcctcatcagcctcgaagcatttattgagcactgcctgtacatccacaggagggtgatgacaggattggcacagtgaccstcctgtccccttgttgggggtctctcctcttccccctctaggagctgagggagctgaggagcggcatgagggacagggagggggcggcagagcttcctggggcctcaaggacaatcctttcctgtmcccattcttcagatggggaaactgaggccatggaggmgttaggacgccctgagtcacccagcagggactgaaggggttctgggtggaggttaggacatcttaggctcagtgcccggggatcacgtactcctcttcatccattgrggcctggcccagtgactgcaggttayagtagacaggctgggaagccaggtcgatgtccttgtagttgatgtaaaagtcattgtcctctgaagggtgagccctggggggacagacagaccaggggtaagtgtgggasggggaggactcaggggacaggcacatgagctttgagaaagtccagagygggccaggtgctctgactcacgcctgtaatccagcactttgggaggctgaggtgggtggatcacctgagatcakgagttcaagaccagcctggacaacatgatgaaacctcgtctctactaaaaatacaaaaattatccaggcatggtggcacaggcctgtagtcccagctactcgggagtctgaggcaggagaatcacttgaacccaggaggtagaggttgtagtgagccgagatcgtgccattgcacttcagcctgggagacagagcaagactctatctcagaaggaaaaaaaaaaagaaagcttcagagtggctcagtccaccccgartatttacatatggggaaactggcacgggctagcgttctgactcctagccaaccccacctctctctgaggaggctgcgggagggcagtgatttagggaaggttctgtgggtgtaacgctgcggtctgaggaccctgaaccctttttccttccttaaaaatgagatagcggccaggcgcggtgactcatgcctgtaatcccagcactttgggaggccaaggcagaaggtctgcttgaggccaggagtttgagaccatcctgagcaacagggtgagaccccatctctacaaaaaattaaaaaattattcaggcgtggtgacgtgtgcctggagtcccatctcctcgggaggctgaggtgggaggaccgcttgagcccaggaggtcgagcctacagtgagccgttatcacaccactgcactgcagcctggatgacagagggagaccccgtctcaaaaaaaacagaaattgaggtagctgttcattattacattaaaatctaaatttttgtttcctcttgaaaaatcggaagctctggccacgtcagtcacatgcacacaagtggctgcacccacactctgtgctccttccgatgggaaatgttttcaccactgaagcaactgactttgtggccctcatatataaaagcaagtctctgagcctcagtttctgcatctatagaattggtcaaggagcaggtagctacttaggaatatttgttatggtcagcaagacctccagagaattttcctgcctcctgaacattctaattccaacccagctcctcttgtaaaaagggccactgggccaggtgcggtggctcacgcctataatcccagcactttgagaggccaaggtgggcagatcacctgaggtcaggagttcaagaccagcctggccaacatggcaaaaccccgtctctactaaaattagccgggtgtgatggtgggcgcctgtaatcccagctactcgggaggctgaggcaggaggcaggagaatcacttgaacccgggaggtgaaggttgcagtgagccgagatcatgccattgcactctagcctgggcgacagagcgggaaaaaaaaaaaggcaaaagggctactttgtgttaacagcatctatcagtcaattatactctagtacgaattgcccaccaacccctaagtggttgtagggggacgaacaggtctgggacgcagggtttgtgtcctgccttttttgactggctatgtgaccttggacaagtcatttccctgcctcccagagcctccatgtctgtaactgtaagatgcagggtggaaatgacacagtcaattctaaacacagtgtttctggaggccagtacataaaggaggctgatccggaagcctcggggacagggaggccaagatgaacatcagagcacaagctgcttttgcgagtccagtgtcttcaacaccctgcctcagaccatttctgcttttgagccatgttgacatctgctttgcatattttctcctttctcaccaacagccttccgatagcctccccacctcctggcacggactctgctgcccaaacacagccatggccgcggccccttcctgcttggccctccctgttcccctcaggcctcagctttcaagtcatcccttctcaaaaaccattcacagcaaattctctgttctttcccacctctgggtctctgcccctgagggtcccaccccttgaaattccctccattcccttttccaacctagaaaagcttttcttttctttttttctttctttctttctttttttttttttttgagacggagtctcgctctgtcgcccaggctggggtgcagtggtgcgatctgggctcactgcaacctccacctcctgggttcaagtgattcttcttgcctcagcctcccaagtagctgggattacaggcacccacgaccatgcccggctaatttttgtatttttagtagagacagggtttcaccatattggccaggctggtctcgaactcctgacctcgkgatcctcctgccttggcctcccaaagtgttgggattacaggcatgagccaccgtgcccggcctaatttttgtattttttagtagaaacagggttccaccatgttggtcaggctggtcttgaggtcctgaccacaggtgatctgacctcgccttggcctcraaaagtgctgggattataggcatgagccaccgcaccccacaccaacctagaaaagttcaactcatttgtctaagcccagcaaaatcatccagaagccggtggcggtggctcacacccataatgccagcactttgggaggctaagacatgaggatcacttgaggccaagagtttgagaccagcctgagaaatatagcaagacccccgtctctatgaaaaatacaaaaattagttgggtgcggcggcatgtgcctgtggtcccaactactctggagactgaggcaggaggatcacttgaggccaggagcttgaggctgcagtgatctgtgatggtgccactgcactccagccagggcgacagaatgacactgtctcaaaaaaaaatgtcggctgggcgcggtggctcacacctgtaatcccagcacttaaggaggctgaggtgggcggatcacgaggtcaggagatcgagaccatc

SEQ ID NO: 1647 - DNA, 16213 bp, Homo sapiens
tgtttatatatggaaaagctttaattaattggtttaacaataagaattgcttaaatcaaacattttatcagaaaagtaaaaagtggaataccctttatttagttcatgtgacttaagtaatctttgggaaataaawacagttttaaagattattggtaaaataaaaaatcttcaaaaatgtaaacattttgtccgggtgcggtggctcatgcttgtaatctcagcactttgggaggccaaggcgggcagatcatttgagctcaggatttcgagaccagcctggccaacatggtgaaaccccatctctactaaaaatacaaaaattaggtgtagtggtgcaagcctgtagtcccagctacttgggaggctgagggaggagaattgcttgaacccgggaggcagaggctgcagtgagccgagattgagcgactgcactccagcctgggtgatggagcgagactctgactaaaaagaaacaaacaaacaaamaaaaaaaaatgtaaacatttggtctaaattatacaggtcagatattaagtttgctaaattctttaaggtcataagctgcttctttgactattaaaaattgttcaattttaggctgggtgcagtagctcacgcctgtaattccagcactttgggaggctgaggcaggcagatcacaaggtcaggagttcaagactaacctggccaacatggtgaaaccccatctctactaaaaataccaaaaaattagccaggcatggtggtgcgcrcctgtaattccagctactcaggaggctgaggcagtagaatcacttgaacccaggaggcagaggttgcagtgagccgagatcatgccattgcactccagcctgggcaacagagggagactctgtcttaaaaaaacaaaaaaacccaaaaaacaaaaaacaacaacaacaaaaaaaattgttcagtttatctactttggagcattagattaaatgtgttattggtacatgttccaaaattatgagaaattcctataattctaatatgacttagcgtatgttattaataattgttacataaaattttgtatgcaacagaagtaaccaaaayttcctagttaattgtggctttactagtggctgtcctaagactttttttttttttttttttgagacagattcttgctctgtcacccaggctggagtgcagtggcacgatctcagctcactgcaacctctgcctcctgggttcaagcacttcctctgcttcagcctcctgagtagctgggattatgggcacctgccctatgcggctaatttttggatttttggtggtgacggggtttcaccatgttggccaggctggtctcaaactcctgacctcaaatgttccacctgcctccgcctcccaaagtgctgggattacagatgtgaaccactgcrcctggccctaagactttttatcatccacagacaattgttgtcttgttttgatcttctttagaaggtagtttataatcagccataggactttaacaggtgcacttaaatgcaggtttctgataactttggagattgtgacattagaatagaggaaacaactttcagaactctcatggggagctgaaatgttcatagatatcaaacaaaagttaactgcataaactaaagaagactaaagcaatctttttgcctttgcttaaaacattgctgatcctttgttttattttttagagtcaaggcaacttttcttttcagatatttacagcttttaataatygagtaaagtatactcctgtgaacaaaatttggagtatatgcatctctctacttgatttctccagaatttggaaattatttgtgtgtattcttaatttatggcaatgcagttatttgcataagggtaataagaatctgttttcttttgcaacaggacacaattggagaaattgtttattttatgaagggtttgactggaatggtgtgctttccattaaggaatcaaacttgacttgtaaagcctataaaagccacttagcgacctgggctcataaccttgcctacacagtccctgtacagggtttctgacctgtggtaagtaaagaatgtcaccttctaaaaggtccaggagccccaagttatctggggacctcaaaaggagaggaagaatttacccaactcaaaggtatttgagggcacaaacccatggcagggctcagctttaaaaagtcttatccaagattctttctatggaacagagttccatcaaagccaattttaaaagcctacgtgamaaataattattcttgctgcactttatacaatcatcaggccaagtataataaagcacattggtcttaccataaaaatggtctttcataaaaatgggaaactggaragagaaaaattatgtttcaagaactatgatacacttgttattaaattccagtctcatcagttgtctttaagtttgtttctgcaatttaggctaaccctgcttagtcctgtgaaccaaccagtggcctctgactgctgctcagaagaaacaagagggatgggtaatgtaaaaatctgcatcaatattctaattctgggcatgtactggaatcatctagcaacctcatatcagcgtggttccaacagttcctcagttcatggaaagccttctagtttagtttacttgggataattttacttattttgctttatggttgtggaatgtatagctgttgtaatctttgtataggaatggaggacaagcttactgaatgtttccttaaactgaacacttatgaatcttccagagtatcaccttttgtcagaactcatgagttatgaatggccctcaagataccaatgctttttcttcccttcccttcccttcccttcttttcttttctttcagatggagtttcattctttcaggctggagtgcaatggcacagtcttggctcactgcaacctccrcctcccaggttcaagagattctcctgcctcagcctcctgagtagctagggttacaggcacccgccaccacatctggctattttttttgtattttttagtagagacagtgttgcaccatgttggccaggctggtctgaactcctgacctcaggtgatccgcctgcctcagcctcccaaagtgttgggattacaggcatgagccatcccgcctggcccataccaacactttccaactgagctcctctctaccacgaatatgagagattctaagagttaggcaaaaatatcatcgcccctattcatcctgaagaacttasagaagatggaccttcgtccctctgcaacccttaggattagtgcttctcttataaaaggaaggggggaaatgtcagaggcacgtgaaccagagcaagtctattttgaacaagagctgagtaaaatgagaatgagacttactgggctgcattcccagatggttaaagcattctaagttacagaatgagataggaggttgccataagatacaggtcatggccgggcatggtggctcatgccatgacagtttataaatgccatgacaatgacaggaagttaccctatatggtctaaaaaggggaggcatgaataatccacctcttgtttagcatatcatcaagaaacaaccataaacatgggcaaccagcagccctcggggctgctctgtctatggagtagccattsttttattcctttactttcctaataaacttgctttcactttactctatggactcgccctgaattctttttttcttttttttgaggcggagtctcgttctgtcacccaggctggagtgyagtggtgcgatctyggctcactgcaacctccacctcccgggttcatgccattctcctgcctcagcctcccaagtagctgggactacaggcgcccaccaccatgcccggctaatttttttgtatttttaatggagacggggtttcaccatgttagccaggatggtctcaatctcctgactttgtgatyccgccttggcctcccaaagtgctaggattacaggcatgagccgccgcactcagcctgaattatttctagtgtgagatccaagaaccctctcttgggatctggattcagacccctttcctgtaacaagattaggcaccaggagaaactgacacacatggrtgatataacagatgcctaaatggatcctatgggggaactggagctggaacagccctttagagttgtcgcaaagtgaggcaaagaggctagacttttatatccctccatcaatcagtgtttgacatgggccccataggagggcatgtaaccttcggtgaggcatctttctgacttgaagggcattgcccaatgagggaggtagctatgtggtatcagcagctggtatttcctacatgtagygaatgggcatattggctcccaagggggaatctgggtggagcactatagtatccattaaacctagtaaagaaatattatttctttactagtcacacagatgtgcccaggacagtggtagagcccacagggttacataaatcataatggtagccctcaagaacttcataaactgtatatggtattttaaaaagttgcatattgtytgtttccacctactagaacataagctctagragggcagagactatgttttgttcaccactgtttctccagtgtctagacgtagattctttgaatgcatttaattggagccttgagatatgaagaagtaggatgcggttacttcatgcagagcaagagtrgcatgcacccagagaaggccaggtggarctcagcatgagtgtgaaggcctcatgtcaagccatgtcaggggacacaaagatggagtattctctaacctatgtgacactcggcataagggaagtacaagcactcaatatgtgagtttcattcccacagtctgtggtctttagcccagtcyttccagatgcctattgagttcttcaagcatccaaatggtttggggwaaggcttcaggttctaaatgagaggctttgtgggttaccagctggagagtcagaaaatctggatttgaattcactcagccatgaaataattgtgtgatcttgggccgggcacggtggctcacgcttgtaatcccagcactttgggaggccaaggaaggtgaatcactagaggtcaggagtttgagaccagcctggccaacatggtgaaaccccgkcttttttttttttttttttttttttttgagacaaagtctcgctctgttgccaggctggagtgcagtggcacaatctcggctcactgcaacctccgcctccctggttcaagtgattcccctgcctcagcctcccgagtagctgggactacaggcgtgcaccaccacgctaatttttttgtattttagtagagatggagtttcaccatgttggccaggatagtcttgawctcctgacctcgtgatctgcctgcctcggcctcccgagaaaccaagtctttactaaaaaatatcaaaattagccaggtgtgatggacctgtagtcccatctacttgggargctgaggcaggagaattgcttgaacctgggaggtggaggttgcagtaagctgagatggtgccactgcactccagcctgggggacagagcaaractctctctcagaaaaaaaaaaaaaaaaagtttgatcttggggagttctaaggcccactagcctcatctgtagaatggaagcaatagtactactttgcagagctgacttcaggaccaagagatctaatgtctatgaagcggggtacttccttctatttgtcaggatgggggaggctagtcctgtgatgactgggaatgaagggtaaaagagacagaggttgggtaaactccaggctctgtgttcatarcctgctcccagacattctcttgttatctctctgtttcctagcctacacacgtgcacagacacgtagctgctgttcaggaactgagctaatggttttaaagtctgttccttatctttgctggaggcaggcagtagctgtgcagtgacagtgtgcctatgcagacagagggagcagtgaatagcaatagggtgtttccaccatggtcttcactcaggccccggctgaaatcatgggccacctccrgatacgcagcctcctggcccggcagtgcctggcagagtttctgggtgtgtttgtactcatggtaggtaggatcactgcgggaaggaaagaagggggttgggcaaaagttcctggctccttctgttgtccttatctctttctcttggtgtcccccttcctctcaactccctatcacttttcgtttttatcctctcgtctctcctaatctcctttcctctcctacttcatcatttttattcttgtcattttwattctttctttaataacaagtgtatcatagttcttgaaacataatttttctctcttcagtttcccatttttatgaaagaccattttcatggtaagaccaatgtgctttattatacttggcctgatgattgtataaagtgcagcaagaataattatttttcacataggcttttaaaattggctttgatggaactcttccatagaaagaatcttagataagactttttaaagctgagccctgccatgggtttgtaccctcaaatgcctatgagttgggtaaattcttttcttttttcccacattctttccctttcttcttcctccactttccccatytcttttcccttccctccttctgcttttctccttcccttgcttgtcttctgtgctcattcatctccttggctgctcccctggccttcccaacctttctccctgttggtctcctgggctccctgttcctcatctctcctcttctcagcagctcctcacccaaggagctgtggcccaggctgtcaccagtggagaaaccaaaggcaacttcttcaccatgtttctggctggctctctggccgttacgatagccatctacgtgggtggtaacgtctcaggtgaggagggtggggtctggtcatcagagcacgtgggatgtgcatgccagtttgtctgtctggtgatggtggaaacgcaaatccttctgtgactcgtggacattatccccttgaacagtgycccagactgaaataagcctttggccccaccagcccctcctctttctgtatctctccatcctgcttcctcacactaatgcttggctcacctagacagaaatcaatggcagggcacgaagggcagctgctatcctcttgtatcccccaccygaagtcctctgggggctcatctccactcaggacctctcctgtttgtaccccagatacacactgcatcggtgtgcttgggtggagccttgagacatagtgtgttgctgtggaaaaagcagacagacctaggttccaactttggattcacagtgtcttcttcttytttttttttttttttttttctttttttttgagatggagtttcactctgttgcccaggctggagagcagtggtgtgatgtctgttcactgcaacctctgcccctgggttcacgcrattctcctgcstcagcatcccgaatagctgattttacaggcacctgctaccacgcctggmtaatatttgtgtttttagtggaaacggggtttcaccatgttggccaggctggtctggaattcctgacctcaagtgatccactgcctcggcctcccaaagtgctgggattacaggcgtgagccactgtgcctggcccacagtgtgactttgctaagtcacttaacatctgtaacatctggagcctcaatttcctaagctgtgtgatgagaattacactatctgccttaagagctataggaaggagcagtagtgttgtctggtgacaatgcctggcagtgacacttaatagatgctctttttctttccttgatacttgaaggggcccacctgaatccagccttctccctggccatgtgcatcgttggacgcctcccctgggtcaagctccccatttacatcttggtgcagttgctgtctgctttctgtgcttcgggagccacctatgttctctacyayggtgacagagggaacagagggagctgtgccttgagagcacctgtgggtgggcaggggtgcctcagaatggttttggatgaatgagcaaagagggaaatcctgggtgttcccttcctccacagatgccctacagaactatacaggtgggaacctgacagtgactggccccaaggagacagcctccatttttgccacctatcctgccccctatctgtccctgaacaatggcttcctggatcaggtaagtgtgagggggagacctggggacactactttggtcctgttcctcggcaccccagcctattgttcagtctctgggtggagtgtgggttgggtctatcttggcactccccaccatccccaactgcctgtgttgcacaaagccagatgacatggaatatttggatgagagagggcagatggagcacctggcagctgacagggaaccctctgcctctgttgactccaaggttctgggcacygggatgctgattgtggggctcttggccatcctggacagacggaacaagggagtccctgcgggtctggagcctgtggtggtggggatgctgatcctggccctcgggttatccatgggtgccaactgcgggattccactcaaccctgcccgggacctgggcccacgtctcttcacctacgtggctggctggggtcctgaagtcttcaggtgggagacagactctcctggtgctggcctccactcaccttcctctgctaagggctctgtccctgggtccacagcactctgcctttaaaatagctctcttggcttcttaggacagtgttctttctccaagtcatattctccccctttctcccttgcttccctcccaacttttcactgaaacagtaagatttagaggttgtgttcttaggcatgccacattacttccatgcacattagtgacttcatcagcaaaattaatatattcagataattccctaaggcaagaggctggaccaagctctcctggggttccctcttctaaatactatgctttggtgacaaggcaatcctcttcctggtgtctaccaccctgggaacaactttagggcactctcttgttactgccccccgtccttggagaggggaaggctaagggagtcactcctgataccttcccactgtccttcttttgcagtgctggtaatggctggtggtgggtgcctgtggtggcccctctggtgggggccaccgttggcacagccacttaccagctgttggtggctctgcaccaccctgagggcccagagccagctcaggatctggtgtctgctcaacacaaagcctcagagttggaaactcctgcctcagctcagatgctggagtgtaagctatgattaggacaaccctcacttcactcatggaccctggagccagccactgaccccgcctgggaacaacagwcattcttcctctttgttaatgtgccagaacctgggaggcttctctgtttatctgtttggcatcccttcctcctaaactaagaaggatcctggacagggagaagtggaggaggataaggtaccaggactcaggcttctcatcccctcctcccgcaaagcggttttctgaccctcagggcctctcggaatgtagttgctcgaggtaaccgctagagggtgcgcacctggatgctggatggggacggctgcgggcatctgcagggtggagggggccaccatccagtgtagggcacaaccctggggactgccctccatagcctgtcccgactgccgactcctagctctcatcgcctcggcgcctcccaccttcaccctctcggggatgcctccccaagagggtagttaggggtggggaagccgcctccacccagggggcgtggtgggggcggagggaaggagggcggcggggcacagagacagagagcaaggctgtgaaactgaggcaccgttcctagacatctcggtgctgtgtcgttcattcaaggagagttgagatacagtgaaatgagccagggcgaggagggagggtgaaggaacggagggcgggcggctccgaggagcgagagtcgggctgagggcaacctggcgccagggaaaattctggttattcaccacttctacagctctcctgccgctccctgcagaggatgctcgttttgcagagaaggcagtgttcctctattcccttcttccgaattaaaaataccccctcagagcgatctagcctcccgaattgttttttcttttaagatgcggatggacgtacgtgtgggggcatcccagcccagccacgccgaggctcggaagggctaagaccctcccactgccccgcacaaagatggctgctccctcctccccgctccttctcccctccccaaaaccccctcccgccccccggcccccgccgccggctccgtcacttccgccccgccgtggccgaaactgacacaaagtagcgggccgaggccccgggggagcggggccgcagctgggggggcgggagcccgtggggagccgagccgagcgccccccgccccagcccccggcatgggcagtacggggccgccggggcgggcgccgagcgctgagcgctgaggtgaggcgaggcgaggcgaagcgggggcgcccgggagcgcggggccaggagggcagagggagatgcggccgcagccgcggggctggaggggccggggagcgggtgtagactggggagcaccgggggccaagatttgggagctgcggccagacggggcggggatggcggccgactggagacgaggggctgtcgggtkcccggggacggggcagagcgggggtctgcgtacaggatgggaggatggggtgccgaaggggcgcgtggagagcaggagagcggcrcragtgccaaggagaagctcgtgcagccttggccaggggagacccgcccagagagttgttgggcgagaggagtaaccgggacccgagggtttggtgcctggagaagggagtttgggctggtaggctttgtctcagtaaggtggaggtctatgcctgaggaaaactgagggtgtcaggaaggggcagtagctctgggagatgatagctgtgccgggagccctgagttctgtccttggtgagggaaggtggcccgagctcgtgttggtggccagtgagctggaggtctcgagttccatttcctcctgtttccctgacctgccatcctcctctgaaagaagtggccagcctttggggctcttgcttgtaagggagcagggaccggacctataggaggagctgttttcctccatggagcattgcctgcttgccggggctggctatttttatcccaaatgtggccgagagggggctggggctgggtgacggggcagggcaacgtggctgatgggcctgacctgctcagaaaacccaggctgtgtgagactaagaaggaaaagtgagaggggatccsagttcccaggtctcycctctcttccccttggaatgatggcccccccagaggggatgaggtctggggccaagcctgcttccagtctccccagggtctcagaggtagaacaactttcctggtccatatccagactcctgactcctgatggcgtgtgcagctcctacattaactctttcatgggactcaaactcagatgtttaggctgatagtgtttcttgatcccttcctccccaagggcggggctgcctgtagaacttgtgatgcccactcttgcatcctttaacctctccctgtgctccccaccctcccgtgactcatactcagactgggtggagaccctggctgggggccctggaggagggcttggcatctctaaaatatggatgaggtttttcttcctgagccaggcaccctggactgccatagttggagaaggtcagggatgaaaaggacttctggctttcaggattgcctgacttggtgtaagggcgggatctgagctagcgaagggagaactggtgtgggtgactgggttgtggccagaatctgtaattatagagcttagccagacaggcaattagtatctcttggggctgacaggttggtggggtgtgcctggtaggctaaaggcagagggaaccaaagaggatgaggaggtgaaaggccttccacccagacaaggaaagaggaggtgactgactggcagtttcctttgggccaggctggggagtaaggatgaggctctgccttgtaaggccaggccttgaaccttttaggagaaaggacatgggaaggcggaagcaggcagaggcttgtctcactggtgctccctaagcctgcaccctgtgccatactgactggactaggcttggggtgggagggagggaggggcaaactccccaccagggttgggaagacccctctgccagcccagaagggtggctgacccaggctgaggggaagctgtttagggactgtctgtgcagaaagtgagggccatgcctctaatgtgagctcccctggaggaggtgataatggaagccctagtaatggggggtggggatggcagggaacttataagcctttcgagaagggtggagcctgcccaccctgtttcctgatgccctgccaggtgtttcctggctcatgttccctccaccccaccctttggggaaactgctttctagtaagcacaagcactactcattgccgccagaacacatgagagcctccattgtccctgggatggataccttgagagctgttccccttttttcaatatctggcctcttctcctttccctacaggcatgggcttctgtaaagtctcagccccccatgtcacccaaggcaggggcatgatgggaggtggtggggaagtcccctctttcccaggaacccatcatggcagtaagaggagagactgggagaaggaggctgggggaggggcagggtcagagctggagaagagggtcttcaaaagaggtctcatgaggggagggaagggttatcctcagcttcctgacctcattcrtctgtcacttcttgcagggtctcccatgggattgctgggatcttgctgggtgagatggcagtgtgygcaaaaaagcgccccccaggtaagacaggcaaggaggggagatcccgggaaccatcaagagtgggtgttgttatggctcagggagcaaaagsaaaagggacaactggtatgggtytgagggagggtagcttacagcagcccctacccagcttgggggcagcctaggaaaccgaattcttccgcttgatcccaaarctgggttatctgccaggacagcgcagagcaccagccccacgccccgaaacacctgcagtcttatcttcgggcacctgcagctcctgctttctggcctagggagctgtgttctcatctctgcttggtcctctcaccccttccctgctcccctcgtttttccatctaccggttctcctggtttttccgcgggcgggggtgtgtgtgtgtgaaagcggttgcccccgacaacgccggcagtccgctcacccgcattggcccggcccgggggtgggaggggaggcggggctcgcgcgcgagctttcgcctacgcggcgcgctggcaggctgcggctcctgcagtcggggagcgggcgggggcggaaccctgggcgtgctcggcgtgtccggggccactcagcgcacgctggcatccgccggggggmatggggggcggcggcggcggcgcagctgagctcgcggtgtccccgagcgccggcggccgggaggatggcctgggctgcgggtggggcgcgcgcccgacggctggggctcccctctgagcggctgcggctcctgcacctccccggggagccgccccgtcgatgccactaaggccaaggacatatagacggtctgccctcccccactcaaaccgggatcatgacggtccccaaggagatgcccgagaagtgggcccgggcccaggcgcctccctcttggagccgaaagaagccctcttgggggacaggtaacgggaggcagcgcctggcagctctcccgcacccattatttcccccctccaatccctacattcacttgtccccagcctccccctacctgccttgatcctctttccagacccagagatcctggctccgaaggatccagtccctaccttcttcgtttgcatggtctttggtgattgcgcaggggacttggcccaagagagcccctctagggaagtttatgggagtgaagtggcttggtaggcagggggcactgtggcctgggttttgttactgcagtgtgctctgcaggggtcctggggtgtgtagaaagggttctggaatgctgtctttggctcccggacaggcttaaggcattaggtttgctgcctaaccaagttacccctttttgcagcatgaggtcatggtgacccccggggagacgggctggggaatctattataggacagctccttgttctgggacatgaatttgatgcctgcagtcccagacctgcagaggtttcagataggtttagctagataggtgtcactaactgagtgacagatgagccctttaaagctaaatgtgtgcagatggtacaaggaaggtccagttagagagcaactgtttcaattacatttcattcctccctcctctatctctatctcagtctgcatgacccatatccctgaaacgcaccccccacacctttttctacttgaagatgagctttgaaataaggtgatgtcatttcgggccagtcagaagcagttgctggtgacatgtgacaaccagaggctcctgtaggggggactgcacatggggctgggatgctcccgcagagcagctccagggcacagggagcctccttcttgccacctaccccactctctaaataagggagagagcagtaccgcgactagatctgcagtggtccccagggggaaggaagctttgcgttttcagcgctactccttgattatgacaatgtatgcattagtaatagcagcaaaaggggctggggaatcccaggactgtcagtggctcagattcctctggagtgggggtgggggagacaaactgggtgcttccagtggaagaccttgaagtttggtggtgaggaaaagagaacatgtcctgtcctgtgaatgtaacctggagagccgtgtggtcaggctgctggtgagaggtggactggagggaagaatttgatgaccccctcagttgtggagctaactccttaaaatgatattctgtggaaaaaaacagggaaccccccagcaaagtgttggtcyagacctcagtttgctcctcctgactgcagcatcattttgttgcagaagaagaaaggagggcgcgggsyaatgaccgagaatacaatgagaaattccagtatgcggtaagcgactctagaccacctgttccctctctctgtttggagaggggaatggggcaaggacaacctaccgttgggactgagggctgcctgggaagagtgcttgggggaggggaagcaacctcctcagccactctccatctgctatcgtgctgaatttttcatgccttcacctgtcagtgaagcagaatacattgacccccttgagactcccttctctcctcctctttccccctcccayacctgtgtttgctagcttttggggtagaggtctggggaagtataaagatgggggaggcagcctcagtctggttctsggttgggactggagactgctcattatcttctctcctactgccatagagtaactgcatcaagacctccaagtacaatattctcaccttcctgcctgtcaacctctttgagcagttccaggaagttgccaacacttacttcctgttcctcctcattctgcaggtaggtgacccatagtagattttttgcagytccccaaactgaataaagccaaggaagaggaaagggaatgaaggcatcagatggggcctcagaggcatacttctctttctttttttcagttgatcccccagatctcttccctgtcctggttcaccaccattgtgcctttggttcttgtcctcaccatcacagctgttaaagatgccactgatgactatgtgagtggttttcattcttctattttgtcccagtcacccacccctactcccagccccacccccatctcatggccaccttcattcagcacaatttcttggtgaccttgacatcccttacccggtccagctagatccatgatgtctttttgctgagcgtggggagagggaatcagggagt

SEQ ID NO: 1648 - DNA, 36634 bp, Homo sapiens
aaatattatttctttactagtcacacagatgtgcccaggacagtggtagagcccacagggttacataaatcataatggtagccctcaagaacttcataaactgtatatggtattttaaaaagttgcatattgtytgtttccacctactagaacataagctctagragggcagagactatgttttgttcaccactgtttctccagtgtctagacgtagattctttgaatgcatttaattggagccttgagatatgaagaagtaggatgcggttacttcatgcagagcaagagtrgcatgcacccagagaaggccaggtggarctcagcatgagtgtgaaggcctcatgtcaagccatgtcaggggacacaaagatggagtattctctaacctatgtgacactcggcataagggaagtacaagcactcaatatgtgagtttcattcccacagtctgtggtctttagcccagtcyttccagatgcctattgagttcttcaagcatccaaatggtttggggwaaggcttcaggttctaaatgagaggctttgtgggttaccagctggagagtcagaaaatctggatttgaattcactcagccatgaaataattgtgtgatcttgggccgggcacggtggctcacgcttgtaatcccagcactttgggaggccaaggaaggtgaatcactagaggtcaggagtttgagaccagcctggccaacatggtgaaaccccgkcttttttttttttttttttttttttttgagacaaagtctcgctctgttgccaggctggagtgcagtggcacaatctcggctcactgcaacctccgcctccctggttcaagtgattcccctgcctcagcctcccgagtagctgggactacaggcgtgcaccaccacgctaatttttttgtattttagtagagatggagtttcaccatgttggccaggatagtcttgawctcctgacctcgtgatctgcctgcctcggcctcccgagaaaccaagtctttactaaaaaatatcaaaattagccaggtgtgatggacctgtagtcccatctacttgggargctgaggcaggagaattgcttgaacctgggaggtggaggttgcagtaagctgagatggtgccactgcactccagcctgggggacagagcaaractctctctcagaaaaaaaaaaaaaaaaagtttgatcttggggagttctaaggcccactagcctcatctgtagaatggaagcaatagtactactttgcagagctgacttcaggaccaagagatctaatgtctatgaagcggggtacttccttctatttgtcaggatgggggaggctagtcctgtgatgactgggaatgaagggtaaaagagacagaggttgggtaaactccaggctctgtgttcatarcctgctcccagacattctcttgttatctctctgtttcctagcctacacacgtgcacagacacgtagctgctgttcaggaactgagctaatggttttaaagtctgttccttatctttgctggaggcaggcagtagctgtgcagtgacagtgtgcctatgcagacagagggagcagtgaatagcaatagggtgtttccaccatggtcttcactcaggccccggctgaaatcatgggccacctccrgatacgcagcctcctggcccggcagtgcctggcagagtttctgggtgtgtttgtactcatggtaggtaggatcactgcgggaaggaaagaagggggttgggcaaaagttcctggctccttctgttgtccttatctctttctcttggtgtcccccttcctctcaactccctatcacttttcgtttttatcctctcgtctctcctaatctcctttcctctcctacttcatcatttttattcttgtcattttwattctttctttaataacaagtgtatcatagttcttgaaacataatttttctctcttcagtttcccatttttatgaaagaccattttcatggtaagaccaatgtgctttattatacttggcctgatgattgtataaagtgcagcaagaataattatttttcacataggcttttaaaattggctttgatggaactcttccatagaaagaatcttagataagactttttaaagctgagccctgccatgggtttgtaccctcaaatgcctatgagttgggtaaattcttttcttttttcccacattctttccctttcttcttcctccactttccccatytcttttcccttccctccttctgcttttctccttcccttgcttgtcttctgtgctcattcatctccttggctgctcccctggccttcccaacctttctccctgttggtctcctgggctccctgttcctcatctctcctcttctcagcagctcctcacccaaggagctgtggcccaggctgtcaccagtggagaaaccaaaggcaacttcttcaccatgtttctggctggctctctggccgttacgatagccatctacgtgggtggtaacgtctcaggtgaggagggtggggtctggtcatcagagcacgtgggatgtgcatgccagtttgtctgtctggtgatggtggaaacgcaaatccttctgtgactcgtggacattatccccttgaacagtgycccagactgaaataagcctttggccccaccagcccctcctctttctgtatctctccatcctgcttcctcacactaatgcttggctcacctagacagaaatcaatggcagggcacgaagggcagctgctatcctcttgtatcccccaccygaagtcctctgggggctcatctccactcaggacctctcctgtttgtaccccagatacacactgcatcggtgtgcttgggtggagccttgagacatagtgtgttgctgtggaaaaagcagacagacctaggttccaactttggattcacagtgtcttcttcttytttttttttttttttttttctttttttttgagatggagtttcactctgttgcccaggctggagagcagtggtgtgatgtctgttcactgcaacctctgcccctgggttcacgcrattctcctgcstcagcatcccgaatagctgattttacaggcacctgctaccacgcctggmtaatatttgtgtttttagtggaaacggggtttcaccatgttggccaggctggtctggaattcctgacctcaagtgatccactgcctcggcctcccaaagtgctgggattacaggcgtgagccactgtgcctggcccacagtgtgactttgctaagtcacttaacatctgtaacatctggagcctcaatttcctaagctgtgtgatgagaattacactatctgccttaagagctataggaaggagcagtagtgttgtctggtgacaatgcctggcagtgacacttaatagatgctctttttctttccttgatacttgaaggggcccacctgaatccagccttctccctggccatgtgcatcgttggacgcctcccctgggtcaagctccccatttacatcttggtgcagttgctgtctgctttctgtgcttcgggagccacctatgttctctacyayggtgacagagggaacagagggagctgtgccttgagagcacctgtgggtgggcaggggtgcctcagaatggttttggatgaatgagcaaagagggaaatcctgggtgttcccttcctccacagatgccctacagaactatacaggtgggaacctgacagtgactggccccaaggagacagcctccatttttgccacctatcctgccccctatctgtccctgaacaatggcttcctggatcaggtaagtgtgagggggagacctggggacactactttggtcctgttcctcggcaccccagcctattgttcagtctctgggtggagtgtgggttgggtctatcttggcactccccaccatccccaactgcctgtgttgcacaaagccagatgacatggaatatttggatgagagagggcagatggagcacctggcagctgacagggaaccctctgcctctgttgactccaaggttctgggcacygggatgctgattgtggggctcttggccatcctggacagacggaacaagggagtccctgcgggtctggagcctgtggtggtggggatgctgatcctggccctcgggttatccatgggtgccaactgcgggattccactcaaccctgcccgggacctgggcccacgtctcttcacctacgtggctggctggggtcctgaagtcttcaggtgggagacagactctcctggtgctggcctccactcaccttcctctgctaagggctctgtccctgggtccacagcactctgcctttaaaatagctctcttggcttcttaggacagtgttctttctccaagtcatattctccccctttctcccttgcttccctcccaacttttcactgaaacagtaagatttagaggttgtgttcttaggcatgccacattacttccatgcacattagtgacttcatcagcaaaattaatatattcagataattccctaaggcaagaggctggaccaagctctcctggggttccctcttctaaatactatgctttggtgacaaggcaatcctcttcctggtgtctaccaccctgggaacaactttagggcactctcttgttactgccccccgtccttggagaggggaaggctaagggagtcactcctgataccttcccactgtccttcttttgcagtgctggtaatggctggtggtgggtgcctgtggtggcccctctggtgggggccaccgttggcacagccacttaccagctgttggtggctctgcaccaccctgagggcccagagccagctcaggatctggtgtctgctcaacacaaagcctcagagttggaaactcctgcctcagctcagatgctggagtgtaagctatgattaggacaaccctcacttcactcatggaccctggagccagccactgaccccgcctgggaacaacagwcattcttcctctttgttaatgtgccagaacctgggaggcttctctgtttatctgtttggcatcccttcctcctaaactaagaaggatcctggacagggagaagtggaggaggataaggtaccaggactcaggcttctcatcccctcctcccgcaaagcggttttctgaccctcagggcctctcggaatgtagttgctcgaggtaaccgctagagggtgcgcacctggatgctggatggggacggctgcgggcatctgcagggtggagggggccaccatccagtgtagggcacaaccctggggactgccctccatagcctgtcccgactgccgactcctagctctcatcgcctcggcgcctcccaccttcaccctctcggggatgcctccccaagagggtagttaggggtggggaagccgcctccacccagggggcgtggtgggggcggagggaaggagggcggcggggcacagagacagagagcaaggctgtgaaactgaggcaccgttcctagacatctcggtgctgtgtcgttcattcaaggagagttgagatacagtgaaatgagccagggcgaggagggagggtgaaggaacggagggcgggcggctccgaggagcgagagtcgggctgagggcaacctggcgccagggaaaattctggttattcaccacttctacagctctcctgccgctccctgcagaggatgctcgttttgcagagaaggcagtgttcctctattcccttcttccgaattaaaaataccccctcagagcgatctagcctcccgaattgttttttcttttaagatgcggatggacgtacgtgtgggggcatcccagcccagccacgccgaggctcggaagggctaagaccctcccactgccccgcacaaagatggctgctccctcctccccgctccttctcccctccccaaaaccccctcccgccccccggcccccgccgccggctccgtcacttccgccccgccgtggccgaaactgacacaaagtagcgggccgaggccccgggggagcggggccgcagctgggggggcgggagcccgtggggagccgagccgagcgccccccgccccagcccccggcatgggcagtacggggccgccggggcgggcgccgagcgctgagcgctgaggtgaggcgaggcgaggcgaagcgggggcgcccgggagcgcggggccaggagggcagagggagatgcggccgcagccgcggggctggaggggccggggagcgggtgtagactggggagcaccgggggccaagatttgggagctgcggccagacggggcggggatggcggccgactggagacgaggggctgtcgggtkcccggggacggggcagagcgggggtctgcgtacaggatgggaggatggggtgccgaaggggcgcgtggagagcaggagagcggcrcragtgccaaggagaagctcgtgcagccttggccaggggagacccgcccagagagttgttgggcgagaggagtaaccgggacccgagggtttggtgcctggagaagggagtttgggctggtaggctttgtctcagtaaggtggaggtctatgcctgaggaaaactgagggtgtcaggaaggggcagtagctctgggagatgatagctgtgccgggagccctgagttctgtccttggtgagggaaggtggcccgagctcgtgttggtggccagtgagctggaggtctcgagttccatttcctcctgtttccctgacctgccatcctcctctgaaagaagtggccagcctttggggctcttgcttgtaagggagcagggaccggacctataggaggagctgttttcctccatggagcattgcctgcttgccggggctggctatttttatcccaaatgtggccgagagggggctggggctgggtgacggggcagggcaacgtggctgatgggcctgacctgctcagaaaacccaggctgtgtgagactaagaaggaaaagtgagaggggatccsagttcccaggtctcycctctcttccccttggaatgatggcccccccagaggggatgaggtctggggccaagcctgcttccagtctccccagggtctcagaggtagaacaactttcctggtccatatccagactcctgactcctgatggcgtgtgcagctcctacattaactctttcatgggactcaaactcagatgtttaggctgatagtgtttcttgatcccttcctccccaagggcggggctgcctgtagaacttgtgatgcccactcttgcatcctttaacctctccctgtgctccccaccctcccgtgactcatactcagactgggtggagaccctggctgggggccctggaggagggcttggcatctctaaaatatggatgaggtttttcttcctgagccaggcaccctggactgccatagttggagaaggtcagggatgaaaaggacttctggctttcaggattgcctgacttggtgtaagggcgggatctgagctagcgaagggagaactggtgtgggtgactgggttgtggccagaatctgtaattatagagcttagccagacaggcaattagtatctcttggggctgacaggttggtggggtgtgcctggtaggctaaaggcagagggaaccaaagaggatgaggaggtgaaaggccttccacccagacaaggaaagaggaggtgactgactggcagtttcctttgggccaggctggggagtaaggatgaggctctgccttgtaaggccaggccttgaaccttttaggagaaaggacatgggaaggcggaagcaggcagaggcttgtctcactggtgctccctaagcctgcaccctgtgccatactgactggactaggcttggggtgggagggagggaggggcaaactccccaccagggttgggaagacccctctgccagcccagaagggtggctgacccaggctgaggggaagctgtttagggactgtctgtgcagaaagtgagggccatgcctctaatgtgagctcccctggaggaggtgataatggaagccctagtaatggggggtggggatggcagggaacttataagcctttcgagaagggtggagcctgcccaccctgtttcctgatgccctgccaggtgtttcctggctcatgttccctccaccccaccctttggggaaactgctttctagtaagcacaagcactactcattgccgccagaacacatgagagcctccattgtccctgggatggataccttgagagctgttccccttttttcaatatctggcctcttctcctttccctacaggcatgggcttctgtaaagtctcagccccccatgtcacccaaggcaggggcatgatgggaggtggtggggaagtcccctctttcccaggaacccatcatggcagtaagaggagagactgggagaaggaggctgggggaggggcagggtcagagctggagaagagggtcttcaaaagaggtctcatgaggggagggaagggttatcctcagcttcctgacctcattcrtctgtcacttcttgcagggtctcccatgggattgctgggatcttgctgggtgagatggcagtgtgygcaaaaaagcgccccccaggtaagacaggcaaggaggggagatcccgggaaccatcaagagtgggtgttgttatggctcagggagcaaaagsaaaagggacaactggtatgggtytgagggagggtagcttacagcagcccctacccagcttgggggcagcctaggaaaccgaattcttccgcttgatcccaaarctgggttatctgccaggacagcgcagagcaccagccccacgccccgaaacacctgcagtcttatcttcgggcacctgcagctcctgctttctggcctagggagctgtgttctcatctctgcttggtcctctcaccccttccctgctcccctcgtttttccatctaccggttctcctggtttttccgcgggcgggggtgtgtgtgtgtgaaagcggttgcccccgacaacgccggcagtccgctcacccgcattggcccggcccgggggtgggaggggaggcggggctcgcgcgcgagctttcgcctacgcggcgcgctggcaggctgcggctcctgcagtcggggagcgggcgggggcggaaccctgggcgtgctcggcgtgtccggggccactcagcgcacgctggcatccgccggggggmatggggggcggcggcggcggcgcagctgagctcgcggtgtccccgagcgccggcggccgggaggatggcctgggctgcgggtggggcgcgcgcccgacggctggggctcccctctgagcggctgcggctcctgcacctccccggggagccgccccgtcgatgccactaaggccaaggacatatagacggtctgccctcccccactcaaaccgggatcatgacggtccccaaggagatgcccgagaagtgggcccgggcccaggcgcctccctcttggagccgaaagaagccctcttgggggacaggtaacgggaggcagcgcctggcagctctcccgcacccattatttcccccctccaatccctacattcacttgtccccagcctccccctacctgccttgatcctctttccagacccagagatcctggctccgaaggatccagtccctaccttcttcgtttgcatggtctttggtgattgcgcaggggacttggcccaagagagcccctctagggaagtttatgggagtgaagtggcttggtaggcagggggcactgtggcctgggttttgttactgcagtgtgctctgcaggggtcctggggtgtgtagaaagggttctggaatgctgtctttggctcccggacaggcttaaggcattaggtttgctgcctaaccaagttacccctttttgcagcatgaggtcatggtgacccccggggagacgggctggggaatctattataggacagctccttgttctgggacatgaatttgatgcctgcagtcccagacctgcagaggtttcagataggtttagctagataggtgtcactaactgagtgacagatgagccctttaaagctaaatgtgtgcagatggtacaaggaaggtccagttagagagcaactgtttcaattacatttcattcctccctcctctatctctatctcagtctgcatgacccatatccctgaaacgcaccccccacacctttttctacttgaagatgagctttgaaataaggtgatgtcatttcgggccagtcagaagcagttgctggtgacatgtgacaaccagaggctcctgtaggggggactgcacatggggctgggatgctcccgcagagcagctccagggcacagggagcctccttcttgccacctaccccactctctaaataagggagagagcagtaccgcgactagatctgcagtggtccccagggggaaggaagctttgcgttttcagcgctactccttgattatgacaatgtatgcattagtaatagcagcaaaaggggctggggaatcccaggactgtcagtggctcagattcctctggagtgggggtgggggagacaaactgggtgcttccagtggaagaccttgaagtttggtggtgaggaaaagagaacatgtcctgtcctgtgaatgtaacctggagagccgtgtggtcaggctgctggtgagaggtggactggagggaagaatttgatgaccccctcagttgtggagctaactccttaaaatgatattctgtggaaaaaaacagggaaccccccagcaaagtgttggtcyagacctcagtttgctcctcctgactgcagcatcattttgttgcagaagaagaaaggagggcgcgggsyaatgaccgagaatacaatgagaaattccagtatgcggtaagcgactctagaccacctgttccctctctctgtttggagaggggaatggggcaaggacaacctaccgttgggactgagggctgcctgggaagagtgcttgggggaggggaagcaacctcctcagccactctccatctgctatcgtgctgaatttttcatgccttcacctgtcagtgaagcagaatacattgacccccttgagactcccttctctcctcctctttccccctcccayacctgtgtttgctagcttttggggtagaggtctggggaagtataaagatgggggaggcagcctcagtctggttctsggttgggactggagactgctcattatcttctctcctactgccatagagtaactgcatcaagacctccaagtacaatattctcaccttcctgcctgtcaacctctttgagcagttccaggaagttgccaacacttacttcctgttcctcctcattctgcaggtaggtgacccatagtagattttttgcagytccccaaactgaataaagccaaggaagaggaaagggaatgaaggcatcagatggggcctcagaggcatacttctctttctttttttcagttgatcccccagatctcttccctgtcctggttcaccaccattgtgcctttggttcttgtcctcaccatcacagctgttaaagatgccactgatgactatgtgagtggttttcattcttctattttgtcccagtcacccacccctactcccagccccacccccatctcatggccaccttcatycagcacaatttcttggtgaccttgacatcccttacccggtccagctagatccatgatgtctttttgctgagcgtggggagagggaatcagggagtgaactggtttgtgatggggtgtgtatgaggcgttaaccagcatgctctgagttctactgatcaacgaattccttcgaggcgggggaaggtgtcttacctttcagttttcttcttttcagttccgccacaagagcgataaccaggtgaataaccgccagtctcrggtgctgatcaayggaatgtgagtgcctgttggagacaagagctctggggacgaagggggtcccttaggaacctctttagctcctgacagcctcttcactgtcttctcgttgcctcagcctccagcaggagcagtggatgaatgtctgtgttggtgatattatcaagctagaaaataaccagtttgtggcggtaagggacagggtacccctctaggcctgtaggttcttcctcttctttgtgagaaaaggatgaatctttcctgatttactgttgcctcttaaacacccgtggcaggaatctttctcacaccaggggcttctgtgtcatgctgatatgcctggaactagccatttatgcacctggaactaagcaaaccaagaatgcttagtggaaggagccaccattacagcccactgggggtggaggtttgcatatttggacttctcattagtttttctctctaggcggatctcctcctcctttccagcagtgagccccatgggctgtgttacatagagacagcagaacttgatgggtaagtggcatgctcagtgtcagccctctccttctgtctctttggaggtaaaaagattgtctttgaatgaggttctcaggcctgggctctgtctgaatttggaaaaattaggggtaagaaaggctttggatgggatgtgtgaagtgttattcaaccagtatttgctgggctgagcagttatgcaccatgcttaggtgtcaccaggtagaatttagaggatggggagaggtgggcatggtgactcactcctgtaaatcccagcactttgggaggccagtgtgggaggattgcttgaggccaggagtttgagaccagcctgggcaagatggtgagacttcatctctataaaacaaacaaacaaaaaatttaaaaagtttaaaacttagctgggtatggtggttttaatgcctataatcccagccacttgggaggctgaggcgggaggattgtttgagcccaggagttcgaggctttagtgagctatgattgtgcgactgcactccagcctgrgcagcagagcgagaccccatctgtgaaaaaaaacatttagaggatgaggagggagcggggactcagagatactgtccttccagcgagaccaacatgaaagtacgtcaggcgattccagtcacctcagaattgggagacatcagtaagcttgccaagtttgacggtgagtaattttggagsagcagcctgaaggtagaggagtggggttgggttttgtttgggggcgttaaattatacattttcctttgggctttttgttgttattatgcaactccctggactgttttggggaggggagtgtttgtaatgtcatgtggctccctcttggttttgagtttataattatttcaaggggactttgtggctgatagctccccacttgctatgcatgttgagagaaattcagcttattcttttagcttattagctcagaataataatatgtgttccttataagacaaaccatacagagtgtataagaaaaagtgaatagaggtcggtaccatggctcacgcctgtaatcccagcactttgggaggccgaggtgggyggattgcctgaggccaggagttcgagaccagtctggwcaacatggtgaaaccctgtctctattaaaaatacaaaaattattagctgggcgtggtgctgcatgcctgtaatcccagctattcaggaagctgaggcaggtgaatcccttgaacctgggaggcggaggttgcagggaggcggaggttgcagtgagctaagatcgtgccactgcactccagcctgggtgacaagagcgaaactctgtctcaaaaagaaaaaaaaaatacaaaaattagccgggcgtcgtggtgtgcatctgtagtcccagctacttgagaggctgaggcatgagagttgcttgaacctgggaggtggaggttgcagtgagccgagatcgggccactgcactccagcgtgggcaacacagtgagacactgtctcaaaaaaaaaaaagaagaagaaaatagctcttccttcctcttctaccctgctgaagtagccacattaattgacagtcagtgtgtgctcatccacacttttcatacatgtttgtacaaacaaatattaggtcatgctgcagctttttttttttttttttwaatactcctgcccaggttggagtgtagtggtgcgatctcrgctcactgcatcctctacctcccaggttcaagcgatcctcgtgcctcagcctcccgattagctagaattacaggctcccaccaccacacccggctaatttttgtatttttagtagagacagggtttcaccatgttggccaggctggtctcaaactcctgacctcagctgatccacccgccttagcctcccaaagtgctgggattacaggcatgagctgccgcgcccggcctgcttcattattttcctgaagagttgcatcagctcacactcctcccagcagcatatggatgggcccttgcccttgcatcctcttcgctcagctcattttctctttgttttattgtcttgtggttaggctgtagactggaccttaagcagtggaattcttgtctcctgttcaggtgaagtgatctgtgaacctcccaacaacaaactggacaaattcagcggaaccctstactggaaggaaaataagttccctctgagcaaccagaacatgctgctgcggggctgtgtgctgcgaaacaccgagtggtgcttcgggctggtcatctttgcaggtgagcctcctagcatccaaagaaagaagggtaagagtgactcagccagccctcactcaggagtatgggatgaggtgggagaatacctaaggtaaaaaacctccagctgtgtatacaggcttcttatctagccagtatctctattccaccctggtgtcctgcagtctggggatcagggcagaagcccagaggcagatgtgttatttggctttcccagcccttcccattcttttccaggtcccgacactaagctgatgcaaaacagcggcagaacaaagttcaaaagaacgagtatcgatcgcctaatgaataccctggtgctctgggtgaggcgccccacatctggctccctgcccctgccctctcttctccttgggtgctccttttcctttcctctttcttctttggtcagtagacttcaggtttggctttaaagctgctagcaggtcagctacacaaaggcagtgtttattttaggctccttttagttggaagatgttatttaaaaaaacttcaggaacgtgcatgaatcaacaacttaaagctaaaacaaatcatcccttctctgattccagttatgatgatgactttgtgaagcatgtgaccttctgtttgcttttgccagggacaaggaggccttcatggggatggagagggaattaaaagaaaaatttccatttggaagaggttggcagggtcttttccccccaacttctaagaacgaaggatcccaaaggaaaagtttctgtttaagtttttggcagttcctgaatccttctcttgtttagctagaaatctgaactccttgttgggctctcctccccttcctgtgccccgactgtctgctgcctgcccgccacatgccagcttgtgaaggctggggctagcytctggtgagcttgtttccgccctggctttaaagrgtgtgcggaaacccagcctggtgggcgaggttgtctatcacataagggctccagtcgccccctggtggccattgggcaccaatctcctattttgtttcaaagcctaaacagcggaggcagctttggaaatagatgtaggaaattggacagtggcctggttttttaccagtctctccagagactccaaaatttataagatttttgactaatcaggaaatctagaccaggagtggtggctcacacctgtaatcccagcactttgggagaccaaggtgggaggatcatttgagcctaggagttcgaaaacagcctggacaccatagtgagaccctgtctttacaaaaaactgaaaaattagccaggtttggtggcatgcacctgtggtcccagttactctggaggctgaggcggggggattgcttggcctgggagattgaggctgcgttgagctaggatcatgccactgcactccagcctgggcaacaaagcaagaccctgtttcaaaaaagaaatctacgtttatgaagataagtttgtttcccaagtttaaaaaaaaaaaaggcaatcttagccaggtgcagtggctcacgcctgtaatcccagcactttgggagaccgaggtgggtggatcacgaggtcaagagatcaagaccatcctgaccaacatggtgaaaccccatctctactaaaaatacaaaaaaatagctgggcgtggtggcgggcacctgtagtcccagctacttgggaggttgaggcaggaaaatggcgtgaacccgggaggtggagcttgcagcagtgagccgaggtcgcgccactgcactccagcctgggcgacagarcaagrctccatctcaaaaaaaaaaaaaaaaggccatctatgtgagatagtgaacattaccgtggcttggcatttttgttggcttgtacctagcccaggtgaatagattatttacagtaagttttctggtatgttaaamgtagctcatccccactcttaccaactttgaggactctgraaggtttcaaggtgccagattgagagctaatcaactatttcagtttcttcatcatatagatgaaataatggtcagacagaaggccacatgataattggtgacagactagaacctgtcaccagttctgagctttttccactagagcagtggtgtccaatattttggcatccctgggccacattggaagaagaattgtcttgggccacacataaaatacactaacattaacaatagctgataagcttagaaaaaaaaaaattgcaaaaaaaatctcataaatttttttttttttttttgagacggagtctcactctgtcactaggctggagtgtagtgcaatggcattatctcggctcactgcaacctctgcctctcgggttcacgtgattctcctgcctcagcctccctagtagctgggattacaggtgcccgccrccacacccggctaatttttttgtatttttagtagagatgagagatggggtttcaccatgttggccagactggtctcgaactcctgacctcatgatctgcccgccttggcctcccaaagtgctgggattataggtgtgagtcactgcacctggccttttttttttttttttgagacaggttcttgctctgttgcccaggctgggatgcagtggcatgatcttggctcactgcaatgtctgcctcccgggttcaagcaattctcatgccttggactcctgagtagctgagactacaggcaagtgccaycaggactggctaattttttwaatgtttttagtagagacggggtttcaccrtgttggccaggctggtctcaaactcctgacctcaggtgatccatccgcctcaacctcccaaaatgctgggattacaggcttgagccactgcgcccagcccataatagttttttttttttttwtaattatttttcatttaacattcagctgttaccaaaatctcatagtgttttaagaaagtttatgaatctgtgttgggccacatgtggcccagagaccatgggttggacaagcttgcactagagcatctgagcttttgagggctcaagggatgaatacatcacagatgcacttggttttgagggcttcctacatgtcagcctcrcctgtgcttctcattcctccccagatttttggattcctggtttgcatgggggtgatcctggccattggcaatgccatctgggagcacgaggtggggatgcgtttccaggtctacctgccgtgggatgaggcagtggacagtgccttcttctctggcttcctctccttctggtcctacatcatcatcctcaacaccgttgtgcccatttcactctatgtcaggtatgtgccttctctgacctggggtctstccagggagtcaggcggtcccatagaacttttcttttctatgaagatgaagtccttgagaagtaacgagaagtcctcttcttcctgtactgtaaacatttgatgttatctgtttatctttgtgggcagagcaaactttttaccacagtttcctggtacttgggactgtattagagaaaaaaaaaatattgatttattcagcacctatttattacatgcctactgtgtacaaagaagtgtgctaggtgccatcacaaataaaagatgaattaggaatggatctccttccttctaggagcttacgtctagtaaaggaaggaaaatctaaacacattataaaacaaaataggaaccagtgctgtagaattcgacctagagtcttctatgtgaagcttggggatacagagatgtataaggtggcctctgcctttagcagcagcagatggatmggtcgaggaggggagatctggacagtgtcagactgagataccatgtgggaggcacagggtgcccggggactgggagagtgtcgctccctaagcaggtaggcagagagggagagatggcatttgctctgggctttgagtggtgactgggctggatgaaggtggagccacaatggagaggaggmtgagagggctggaagcaaaggtgtggagatgggagcctgggaatggcctatggaaatagttggccagggtcttgggccaagagcaagagctggaaacatagcttgctcctgattgtggaggcttttgaatatttgcctgtggactttgtatttactaaccattaaaagttattgaaaagactgggcacggtggctcacacctgtaatcccagcactttgggaagccaaggtgggcggataacgaggtcaggaattcgagaccagcctggccaacatgttgaaaccccgtctctactaaaaatacaaaaaytagccaggtgtggtggtggttgcctgtaatcccagctacttgggaggctaaggtaggagaatcgcttgaaaccggaaggtggaggtagcagtgagccaagatcacgccactgcactctagcctgggcaacgagcgaaactgtgtctcaaaaaacaaygaaacaaacaaacaaacaaaaaagtttttgaagaaagtcaaaagaatgtattctgtattctaaaaatgcattctaagtgttacagctcttttagaatttgtctagcaggttttccagttttcmctggaacccctcccccacaaaaagaaaaaaatgcattctaaaaaaaaactaaagaatgctttaggaagtattgactggcagtagtgtacagcatgaataggatcaaggcaacatgtaggatgtttgaggtaaagagaatgttagcagggacaggccagtgagaatgaaggggaggatcggaggaagacgaggcaggaggaatggccaggggaaaggaactttcttgcttagtgccttgcacttgagataagggaacctgtgacatttttaaggaaatgttttatggaggtgctgaaaacttgtcctgtctcccatcttttgttcatacagattccccaaatagccctcaactctctcccagcccccaatcttactgctggtgataataaatagaagatacagcatttctgtgctgagagaatatagttwaggcttttccagggtgtgaagaggagagttgggaggttctgggtttagtcctgcctcctcactggccatgtgacctcaggaaaatccacggtcactcagggcctcacttgatcttagttttcccacgtgaaacaggaacaggagtacttgtctcaccttttaataggatgtcttgatataagatattggcttagaagatacattttaaacttaartgactgtacagttactgggtggtagcctgctcattgtgactgttgccactcccttctgcattactatttaaatgcctttgtgcttacaacctaattttgttttcccacctatgggctttgctatctgtgttttgtatctcagttcacttgaagcccttgggagcagctaaagcagttttctttctgagtctcatcaggtcacagtgtgtatgtttcgggaggctaagagggggttgaagagctgtgtgaggaaaaggccctttggaatgtgaagacattcccatttgcctggtaatgggatcctgataggtgccttagtcaggtgggaagcagggctctcgatagggccccattgctcggctgcactggacctaaacatggccctttctggaaatgctaacagtgcatatgattagcaaagaagaggatacgaacagacctggagatgttaaaggcactataggggccaggcatggtggctgtcgcctgtaatcccagcactttgggcggtggaggcgggaggatctcttgagttcaggaattcaagaccagtgtgggcaacacagcgagatcccatctctacaaaaaatgaaaattagccaggtgtggtggtgtgcacctgtagtcccagctactagggaggctgaggtgggaggattgcttgagcccaggagtttgaggctacagtgagctatgattacactactgcactccagcttgggtgacagagaccctagctcaaaaaacaaacaagcaaacaacaaccaccacaatgcgctgtgccattgtgaagtggtggtgttctgcagatgcccagggccctctccctctggagtcagcacctcagccctgcccggtgttcagaatcaggaatgtagtgccccaagcccagggtggaaggagcgcacccagcctgtggtgggacagtgacgagtgggcttcaagccttctccatttcccctccccggtgccacccctctttgaggtggcgtctgtgttgctgtggcatgcacagcaccctcattatttctctctctcttttctctcccctccctctggcactttctcttgtttttctctgcatggtttctgtattattagtcctgaggtaagaactggccgagtgccttgtctacagccccttttcctcctttgctgtctgtcctgcccacccaggccctttgcaccttcttgtctggagagcatcaggagggtcgggtcggggcgttcctctgctggctgtgtgcagccggctccaccttcaggctctccttgccctttcccacccaggtttctgtgcccaggtgtcttctccgttctygtctctccccaggcggagggcctgcagcgaaggcccatgtgggtggggcacctcctcttcttccygacccaagcctcacctcttgtcccctgtgcagtgtggaggtcatccgtctgggccacagctacttcatcaactgggataagaagatgttctgcatgaagaagcggacgcctgcagaagcccgcaccaccaccctaaaygaggagctgggccaggtggagtacatcttctccgacaagacgggcaccctcacccagaacatcatggttttcaacaagtgctccatcaatggccacagctatggtatggtggcaccactggggactgggggcttgcacctcgcctggaaggacagtggaactggggccccacagtttccttaacattggttttttcttccttcctagttgggtctgaggggcctagaagaaagggtccatcctggccaggcacrgtggctcatgcctatagtcatagcactttgggaggctgaggtgggaggattgctcgagcccaggaatgcgagacmagcctgggcaacatagtgagaccacatccctacaaaaaatttaaaaattagccaggtatggtggcatgcacctgtggtctcagctggccagtgactcaggaggctgagatgggaggatcacttgagcctgggaggtcaaggctgcagtgagccatgatcttccactgcactccagcctgggcgacagaatgaggccctgtctctcgagaaaaatccacacacaaagaagaggtccattctgtgtcccatgtcaagaagcagatcctggctgggcgcagtggatcacctgaggtcargtgttcgagaccagcttggccaacatggtgaaactccgtctctactaaaaatacaaaaaatagctgggcgtggtggcaggtgcctgttttcccagctactcggggggctgaggcaggagaattgcttgaatccaggaggtggaggttacagtgagccgagtttgygccattgtactccagcctgggcgacaagagtgaaagtctatcaaaaaaaaaaaaaaattagattctgagagtcctccccttgtcctctcctgatgccctgaccctggtctcagctccaggaattaggggagctccttggctgtttgaagtgagacactggcctctgggcatcctggccaggyggaaccctgctagactctcccctgttgctgctcagggtccttgtgagtctgtggaatgtggctgtggttggacttcccagtgtggcccgtggctgtgctgctgggatggcctggggcagcatgtggggctgacttttatgcagagtgtggacccctcttgtgactgctttctgtactgactgatgcctttcggtcagtgtctgagccttgtctgctgctcaggtctaatgggtgcaaggaggcctgggaggtgtggaattggagctgccctgaggggggtgccgcctagggtagagacagggatggtgagcagtgggtgccggggctctttcatggccaggccttggggttctggaatctagggtgcctgatgcctcctatcccgcgagtcagcaatgtgactgagtgactcacactgtgacagctgctcagcgattagggttgaggggctcagtgcctacggggattctgcattggagatgtttttccatgctctggagctctctggctctgacattgcttctttttctgccctggctgtatgtaggtgatgtgtttgacgtcctgggacacaaagctgaattgggagaggtaagattcagtctccctaattctatgtgccagtgaaacagggtgcctggccagtaacagtgtagtcaggagtgatgtgttgtctggataggaaatggaagctgcttggagaaatgggtgttttaaggcagaactggtgatgacggaagtggaaattttgaggtccaccgtggacaggagcctactgagagttgggagggcagggatgaacccttccccgggatgcagcctggcactctagcctttcctaagagccttcttatgtgtttcagaggcctgaacctgttgacttctccttcaatcctctggctgacaagaagttcttattttgggaccccagcctgctggaggctgtcaagatcggggacccccacacgcatgagttcttccgcctcctttccctgtgtcatactgtcatgtcagaagaaaagaacgaaggtgggccgaggagccggctcgcactctcctgacctgactctgcccttgggctctgctctgctctgcaatgcggctgggctggggcttcctgggcggggcacgtggctgagggaagccacttatatcacgtgtattcttcctccccacccaggagagctgtactacaaagctcagtccccagatgagggggccctggtcaccgcagccaggaactttggttttgttttccgctctcgcacccccaaaacaatcaccgtccatgagatgggcacagccatcacctaccagctgctggccatcctggacttcaacaacatccgcaagcggatgtcggtcataggtgaggccaggcctggggtgctggggcgtttggggacagcattcaggcctggaatgggtgaagtgtgccgggtgactcttgatgtgtttatgttgggggtctttgcctgtctgaatttttctggcactttcttcacctgccccattcatagkgcggaatccagaggggaagatccgactctactgcaaaggggctgacactatcctactggacagactgcaccactccactcaagagctgctcaacaccaccatggaccaccttaatgtgggtgtgaggagaggaggggccagcctggggggttctactcttagtgtgggggaggcgacttaagtttgttttattgtgtaaatttaaggtctacaacgtgatgttttgatgtgtatatatagtgaagtgattactacagtcagacaacttaacacatcagccagctcccatagttacctctttttatgtatgtggtgacagtccctaactgtggaatgtggcacacacccagtctacagtgcaggattattcattgtcgccctcacgctgtccattagctctccagacttacccaggtgtgcctttccactctgcctccaggagtacgcaggggaagggctgaggaccctggtgctggcctacaaggatctggatgaagagtactaygaggagtgggctgagcgacgcctccaggccagcctggcccaggacagccgggaggacaggctggctagcatctatgaggaggttgagaacaacatgatggtacgggctgcgggacgggccaaggatgggcacggagggctcatgcctgcaattcttgtgccaggaatccttgtggtattttcagctgctgggtgcaacggccattgaggacaaacttcagcaaggggttccagagaccattgccctcctgacactggccaacatcaagatttgggtgctaaccggagacaagcaaggtgagagcccagcagggcagagccagttgcaactgacagtagccctgttggacccttgcatggagccgaggacatcaggcaggcaagtgtgctgaccttgttgggtgcctgtccgtagctcctgcgttctctcttggtagagacggctgtgaacatcggctattcctgcaagatgctgacggatgacatgactgaggttttcatagtcactggccatactgtcctggaggtgcgggaggagctcaggtaaacaagaagcccagggraggcggtgctgtgcgttgtgcccagggctcaggtgggggtttctggaccatttagacttgaatccctgctccccactgccrttctggaagaccacaaccgtatcatttccacctcgacaggaaagcccgggagaagatgatggactcatcccgctcygtaggcaacggcttcacctatcaggacaagctttcttcttccaagctaacttctgtcctggaggccgttgctggggagtacgccctggtcataaatggtcacagcctggtaggcatcgctatccttarcttgggcagtatctttccagtgagcacttctgtccagggcttttatatcttgttctaatttcccctgatttcagagaagactggtctcaaaggggactgggaggagctgagactcccaggtgtctcctggaaagacyggctctctcaggtttctctgtgctccaggcccacgcactggaggcagacatggagctggagtttctggagacagcgtgtgcctgcaaagctgtcatctgctgccgggtgacccccttgcagaaggcacaggtggtagaactggtcaagaagtacaagaaggctgtgacgcttgccattggagacggagccaatgatgtcagcatgatcaaaagtgagtgtgggctgtgcaggtgtgtaggctgggcttgaggctggggaggggcccactgaggtctctggactgcagaagaatgacgggaagggggttgtaacttggtaggctctaaagtgtgtggccggtggccatcttcaccctcttgtcatctcttgtctctgcagcggctcacattggtgtggggatcagtgggcaggaagggatccaggctgtcttggcctccgattactccttctcccagttcaagttcctgcagcgcctcctgctggtgcatgggcgctggtcctacctgcgaatgtgcaagtttctttgctatttcttctacaaaaactttgctttcaccatggtccacttctggtttggcttcttctgtggcttctcagcccaggtaataaatgttcccagtccactgttgtgcaaatctgtaaacctgagggcagaggttctgtcttgtttatcactcagtcccccagggcctagctattttctggtacatactcttaaaaaatgcttattaaaggaggagagaaggagcctcrgaaaatttcttagggttctctgtatgtgacatcagctgtcttcctgtgcctgatgtgtagcaaagaaaggttgcatgctcccttgctccctgttctcttccagaccgtctatgaccagtatttcatcaccctgtataacatcgtgtacacctccctgccagtcctggctatgggggtctttgatcaggtatgggggagtttgatgatcagatgggatgcggggaaggtcactgcttgaaggagtcacatagacgtggtgtgtgacacttgtgcccatttcctgtggccactgggaaggcagttctttcagccggggaaggtgtggctggttctccctcctggctgcagctgatctagaactctcttgggttgctgaactaagttagtctggrggtagctggcttgaggttggttctagctgccaaagactttggaaaggaggaggcagggacagagtcagagtctgcccttggtcatccagggtcaaaacggcaacctctgaggccccctatgctacatggtcctcccacacaggatgtccccgagcagcggagcatggagtaccctaagctgtatgagccgggccagctgaaccttctcttcaacaagcgggagttcttcatctgcatcgcccagggcatctacacctccgtgctcatgttcttcattccctatggggtgtttgctgatgccacccgggatgatggcactcagctggctgactaccagtcctttgcagtcactgtggccacatccttggtcattgtggttagcgtgcaggtatgaggccatccaggaactcccctcttctctggaaggagtgagccttctgtccctggggctgccctgggcaccacagttctgtttctgggggaaggggcttttagggcrtgcgcctgcctgactatgcctactttctgcagattgggctcgacacaggctactggacggccatcaaccacttcttcatctggggaagccttgctgtttactttgccatcctctttgccatgcacagcaatgggctcttcgacatgtttcccaaccagttccggtttgtgggtaagtccccgtggcctccttgaatcggtgaggaatcacagctgttctgggactaacaggaccatcagctaatctgcacattcaacatttcttatgtgccaagtattctgtttattttatttatttatttatttattttcgagaaggagtcttgcccaggctggagtgcagtggtgcgatctcggctcactgcagccttcgactcactgcagcctctgcctcccgggttcaagcgattctcatgcctcagcctcctgagtagctgggattacaggcacacgccaccaagcctggctaatttttgtatttttagtagagatagggtttcaccatgttggccaggctggtcttgaactcctgacctcaggtgatccactcacctcggcctcccaaagtgctgggattacaggtgtgagccaccgtgcccagctagcacagagaaatctgaataaagrgaaagggagcctgccatgtggctctctgggaactgtcaatccaggaagaggaaacagcaatataaakgccttcagccctggcctgggaggaggtcttctgcacgtggagctggggaggagtggaggaaatgagttggagggtgggggtgtggaatgagtcaggattatttaagcccttatgggtcagaggaagaactttgagtttttgaattttaatctaaatgtgagaggaagccattggagggctttgagcagagaaataccagaagcttacttatgtttttaaagggccgctcttacagtttcgtggataataaagtgtagggggcaagggtggaaatgggagactaggaggtgagagcagtcaccaggtgagcctaatgagggctcggaatagagtaaaaggccgtgagattccagagatgttttgaaaatggaaacaacaggccgggcgcggtggctcaagcctataatcccagtactttgggaggccgaggtaggcggatyacctgaggttgggagttcaagaccagcctgacccacatggagaaaccccatctctactaaaaatacaaaattagccggacttggtggcacatgcctgtaatcccagctacttgggaaggctgaggcaggagaatcgcttgaacctgggaggtggaggttgtggtgagccgagatcgcgccattgcactccagcctgggcaagagcaaaactctgtctcaaaaaaaaaaaaaaaaaatggaaccaatagattgaatgtggggtccaaagaagagagagaaatgaatcaagataaaaaacaacaaaaaarcagaaattaaaaaaaaatttttacagaaatgaatcaagatccattgcagggtttttagttggagcaactgaatgggttgtggcatttcctgagttgagaaagaccaggatcagatttggggaaaggaaacaatagttgagtttgggccacgggaaattcaagatgcctggtatgtcaagtctggcagttgaagcagcaggtctggagctttgggggagtttggagctaaatttggagatttacatttggagggtgagcctggagaagcgggaagccagaggtgacttaggctttgagagtagggaagtggagctgccagaaatgggaacggggaatgtctgcctcgtgactcccaaggccactgactcctcttcatccccagggaatgcccagaacaccttggcccagcccacggtgtggctgaccattgtgctcaccacrgtcgtctgcatcatgcccgtggttgccttccgattcctcaggctcaacctgaagccggatctctccgacacggtgagaagccaggctacctgctgtgggaggcagagatggggtggctggaaaggcctcrtgtgaacactgkggggctctgtggggccatgtggctgttcagtgtgttggtgctyatctgttcttcctggggacagacaccctgtgcagctggccacagaggcctctgcgtcagcctggtcccaggtgctgtgggtcggaggcctctgtgtcagcctggtcccgggtgctgtgggtcccttctccttggcgatatctgacacctccacgctgacagagggctcttccctgtgcccctctgcaggtccgctacacacagctcgtgaggaagaagcagaaggcccagcaccgctgcatgcggcgggttggccgcactggctcccggcgctccggctatgccttctcccatcaggagggcttcggggagctcatcatgtctggcaagaacatgcggctgagctctctcgcgctctccagcttcaccacccgctccagctccagctggattgagagcctgcgcaggaagaagagtgacagtgccagtagccccagtggcggtgccgacaagcccctcaagggctgaaggccgaggatggatgccctgtgccagtgaccagagcacccagggctggccagtcactgagggaacagygtctcggaactgctggtcctcattccttgcttcccgtccccccggtagactctgtcctgctggtcccaccacacatggctgggacatctgttcccagctgtaggcccttccaccagctggggagctagagggagcaggyccaagggcagagcagaggctgaggcacggggagccagccccactcggggaccagaagtggaaccaaaaacaagaaaaaactgtgagagattgtgtctgcccctgccctgcctgggacccacagggagactataatctccttatttttttactcctactccccagaggggccctagtgcctctgttcctgaattacataagaatgtaccatgccgggaagccagagacctgcaggggcctcggcccctcacatcgtgtatgtctctccttgatttgtgttgtgtccagtttggttttgtctttttttatttggcaagtggaggaggcttttatgtgacttttatgttgtggttggtgtcttaactctcctgggaaaaggaggctggcacacactgggatgccgcagcctggccggctgtggggtggtttgggaggatccatgtcggctctgcctgcagtgaccagtgctctgtggggcagaggagctgaccagggagggaggtacccatgagcagagggtagtgggagagtgtaaaggagggtttggtcctgtctgcttcctcaccttgagagtaaagtgctgccctctgcccccaacacacacacatatcaattcctggattccttagtcctgctggccttgggctggagcctaggaaagtggcccccaaatccttagtgagctaaagctgggtctgaaatttggtcagtggggaggggtagttttcttttcttttttctttttctttttttctttttttttttgagatggagtctcactcttgtcacctaggcaagagtgcaatggcacaatctcagctcactgcaacctccacctcctgggttcaagcgattctcctgcctcagcctcctgagtagctgggattacaggcacacaccaccacgcttggttaatttttgtatttttagtagagatgtttcaccatgttggccaggctagtcttgaattcctgacctcctgacctgcccacctcaacctcccaaagtgctgagattacaggcgtgagccaccacacccagctcagggaggcgtagttttctttaattttaaatttaaacccaagtttattggcagactcccttttgacctccctttgcctccccatctggtgctttcttgcatctacaccccagggccctgtggtggggctgcagggggaagctgtgcacctgagatgaggctggaacgggaattggcctmtctgctcccttcttcagtaagcaaggagccccgcccctcaggcccagcctctggcaagaggtggtggaatccttgtgccgggtagtagaggaggataagggcaaaaccaggcccaggccagtgcctggcttggtctggatgggacactgtcagagtttggccacagcctgtcctttacttcatccacacctatgaagctattccctaaataaggcatttcccaagttagtcgctacctaatcagccttgagaagaatcctttcctcttctttgatagtgggtcgggggattcttcaggaatggtttggagctgggagtgggtagggggattttaaatgttccatatgggagccccaaaggaactggatgggctgcagtgaggtgggggcgggtgggcagggaatgggagaggggaagtcttggcagggaaatcccttttggccacacagtttacaaacccagtatcatgtctgtctgtgtgtctctcaaggtgagagtctgatttttataccaaagaggaaatgattttttttcatattttgtttgtctatattatataaatatatatatacagttatatatatatatwttattttttggttctctctcgttttttagggagggaagaaagtaccaagttgcattgagctgtaattaaggaacattataatttatgacacatttctatacttgcaaaaattatatcattttatggatataagagaaaaatgcctttttataaaatttcratttctgagaagtgtgtaatttgtctcttttctgatgtttaaccaagactggtggtgaaagtaaagacagaaactgtctcttaaatgtaattgagtgggtagatctgggatatcttggacaaattggaatctgactggtgtgggatagcacctcatccatttgcagacctcccgggatctgagtttcagctgaagatgaagacggggcagtgggtggtactgagcggcatatcgtatggactttggctgggtgcctaggaccttgagctgtttacctttctccaaacgcaggccaacctgtcatccctaacacacgccagatggatgtgtgtgtagggaaagtacctggtaaatattgtaaggttttgttttttaactctgcgcttttccgcatgcctcacatcttcctggcttctcaagtgagtatcaaggaagctaaagtcttatattaaagggagctttcctccagggaagggagggcggatgaggatggggtcctaggagtcagggccagggttagtgctggcctgaggagaaagaagtatagcttcctccgccgatggccaatatcagcatgatccagccccacccgcaggctaatttccccctgasccagccagtcttcagttatggaacaatccttctcaaaaacgtagactgggtgtggtggctcaatgcctgtaatcccagcattttgcgaggctgaggcaggaggatcacttgagcccagcccaggagttcaagaccagcctgggcaacatggggagaccccgcctgtattaaaaaaaaaaaaaaaaagggtgggggagcggagggtgtatggggggaagatgtgaagataagatctgtttccctcttcaggagaaacggcccctggcgggaatcccgccacagaccgccaggaacaccacctgacacccacctccacccagggagaggctgtccagtccacacaagcctttctttggggtctgtctggaaccctgagctttgggcagcaagtggcatctggcttcagtgcccccacccccgaaacacagaaagaagccttaatcccttgaggctggtgaggccccaagtccacccctcccacaagacaggtcttcagcactgcgctggcctcccrttgggggtctgttcagccactgggaatgtcttccttggctcctctcgctgaccctggctctcctgcacccaggatcctattatgtgtgtctgaggggcagggccaatgtcattttaactttcattgcctcttggggacgcgttttctccgtcgcgatatagacacacgcctccacggaggctccgggcactcgggctccccgttttctcccctctgccgcaggcatccctggtcttccttccctgcgctgmctgagcacctgggctcctgtgggagtggcttccagcccctaggtccccatcgtcctagtgccttttctgagtgcgtggaggtgaagtctgtccgataccgcagctttgttccactgagcctgcttatctccaagggcgttcctctccactccrctaaagcagcacacacccatgggcgcccactgccgtcgggaggagctccacctctgaactctcacaattcattcagcatttggccatccatattcttcagttcttcccgcttccatctgtgctcccagcgaaaactacggcccctccctttcctcctggtcgcttgcttccatatgtgaacccttacttgcttcccaatccagcccggagcccgtggtctggtactcgtcgctttgccccggaacattccagccttgggtcagcccagcgtctcccagggtgagctgtggaatgctgaagggcagcacacaaccacggagcaagaggagcggcagctgcccgggctccctccgcaggcgcctctgcacggcgaggagacgctgggaacctcattctcctgcccctccctcaactcctgccaccgcctcccaccctgccctcagcagatggtgctgcctcctacttcacggagcaaataacttctgcggctttcctctcaactacaaatctcactgcgcacaggcacgccggcyttcccctttcctttcccctgcctggggaggctggactctcctgtcccgctccctgtggccccgcccctcccctcctcccaccactgcaccttccattgtccttcaccaggaccttctcttgaccctgccttcatttccctctccgttgattctttccttccccaaattagcctgctcagttttcttccccctcacctgacccctaacccctatcaactctgttgtggtctgtgtccctcccattagcctctctgttatctcttccactgcctgtaatctggcatctccttcaccagtccctgaaatgctttcactaaaatcacctttgaccttcatgttggccaagtccagaaggcatttccaggtctgatctgacttgcaatctcttagtcatttgactgtgttggctgccttctccttgaaactctgccctctgctgacttkgttccactttctcttggtttaactgctgcctctctggttgatccttctgtctccttccttggagctccttcctctgttcttcttccyaccatgccccaggactccatacttggctctaagcttttctcttctgtgcagggtccttgaaggtccccatgcaaacccatggtttaaataagatttgtttaaacaartaagatttaacaattaaatggagagtcaccattgttcacctctagattggacttcttccttccactccacgctccagacccttgtattcaattatccattggacctctccamtaggacgacccaccaccacctgttattcaacataccccacactgaacattgtttttcccaacacctgttgctcctcccgcatcctctatttcagtgagcagcacgcgatctcaccagtcaccaaagccagacacacatgtcctggagaaaaccctacaacctctgctctggggccaccacactgtaaatcatatatttcatcttctttgatgtggagcatgaaatgattaagctgcaatgtcctgagccactgtttcccagtgattgtgacccaggcagggtcacgacagccatatttctgtccccaaagcggggccatctaggttgggactcaaaacacaaagaaattctgccacaaaggttcaatgtcactttccttggccccaaaagagaaactggagagaycagagtgctcagattaggtaggcagctgcagcctcccactgtagccaccctgcagagcatgagggagggactcactgataaagcaccaggactacccactgcagtctctacttcagaggaagcaagccattgatggagatgtactaaacactgggctctgcggctgaaggaaggagctgagttctcctgcttatctctgctccagtgtcctatcttgaaggactgtgtcctgaccccagtgagaaacatgacctrtctgaccctcccaacccttcctggaaactttccagttctcagtgagttgctgggagctgccctgctggacacccgcctggggagggtgtagacttatcttgccgggctgagagagggaagtctttcccaatactagtctattaaaacacacactgggctgggcgcagtggctcaygcctgtaatcccagcactttgggaggccaaggcgggtggatcatctgaggtcaggagttcgagaccagcctgactaaaatggcttcaccctgtctatacgaaaaatacaacaaattagctgggcatgggggcagacgcctgtaatcccagctactcaggaggctgaggcaggagaattacttgaacctgggaggcggaggttgcattgagctaagatcaggccgttgcactctagcctgggcaacaagagcgaaactccatctaaaaaaacacacacacacacacacacacacacacacacacacacacacacacacacacagtggcccggcatggtggctcatgcctgtaaccccagcactttgggaggycaaggtgggcagatcgcctgaggccaggagttcgagaccagtctggccaacatggtgaaaccctgtctctactaaaaatacaaaaattagctgggtgtcctggcgtgcccctgtaatctcggctactcaggaggctgaggcaggagaatggcttgaacccaggaggcagaggttgcagtgagcagagatcgcgccactatactccagcctgggcgacagagtaagtctccttctaaaaaaataaaataacaaaacaaaacacacacacactttccctctctctctctctccaaaacgtgatggagtgtctcctcttaagaaaggagtgtttttggacacagaaagagggagttcctccagcctagcacagcctgagtttggcctgggctggaaattctgcagaaatcttccatcctgccactgggaataggacagggaggcctaagccgtgttttcggccccccggggcccagcagggacatgtgtgggttccaggactggggcaaggaggagaggatgcccaggtttactcaagggcaggcaggaggtgaggagggggtgacaggtggaaggaaaggaccatgtcccactctccactccttcctcatgggccactcttcatttcactcgcagccccgcagtgcacagctacaagctgggggttcayctcttcctggtcccctactaccttgggtgcagcwcttctgccaraaccttctgggcgcctgctgctgtgcctgggctcyccacgcagggagggacacccctggggcggaaggcaggcagctgcatagctgagtggctgcttctacaacacctggagaaccgctggggctagaagcaaacatgcagcagtttgggcct

SEQ ID NO: 1649 - DNA, 22870 bp, Homo sapiens
  misc_feature (1)...(22870): n = A,T,C or G, or insertion/deletion polymorphism (see Tables 1-2)
tgctacactcccccagcgccatgacagtttgcaaatgccatggcaatgataggaagttatcctatatggtcttaaaagaggaggcatgaataatccaccccttgtttaacctataatcaagaaataaccataaaaataggcaaccaggctgggcgcggtggctcacgcctgtaatcccagcactttgggaggccgaggcggaaggatcacctgaggtcaggagtttgacaccagcctggccaacatggtgaatccctatctctactaaaaatacaaaaaattaggccaggcacrgtggctcacgcctgtaatcccagcactttgggaggccgagtcgagtggatcacgaggtcaggagattgagaccatcctggctaacacggtgaaaccctgtctttactaaaaaaaaaaaaaaaaaaaaaatacaaaaaattagccgggtatagtggtgggcgcctgtagtcccagctactcgggaggctgaggcaagagcatggcatgaaccagggaggcggagcttgcagtgagtggagatggcgccactgcactccagcctggacgacagagcgagactccgtctcaaaaaaaaaaaaaatagccaggtgtggtggcacatgcctgtaatcccagctactcaggaggctgagtcaggagaatcgcttgaacccaggaggcagaggttgcagtgagccgagatcatgtcattgcacttcagcttggtcaacaagagcaaaactccgtctgaaaaaaaaaaaaggcagccagcagctatcagggctgctctgcctatggagcagtcattctttattccttcactttcctaataaacttgctttcactttactctgtggactcaccctgaattctttcttgcgcgagatccaagaaccctctcttggggtctggatcgggaccccattcctgtaacagtagtagcgagcggggtcttcattattagcatcattagtgccaccatagtgaacgctgtcgactctgacgttgagcccaagcccagccctgccccaagttccttctcctctggcctcatcccagccttgcttaagatcyagggccagaggctctgcctatctgtgccaatgctacaactcatgagagccggccctgctccataatcagtggmtactcttgtgacccctctagtctctctgcagcctggaggggccttgatttttttwkttttttttttttttgagacagagttttgcttttgttgcccaggatggagtgcaatggcgcgatctcagctcaccgcaacctctgcctcccgggttcaagcaattctcctgtctcagcctcctgagtagctgggattacaggtgcatgccaccacaccagctaatttttgtatttttagtagagacggggtttcatcatattggtcaggctggtcttgaactcctgacctcaggtgatctgcccgccttggcctcccaaagtgctgggattacaggcgtgagccaccgcacccggccaaggggccttgatttatcctgacaagtgggcctcctgaggttgaaggaaacctggggtagaggtgattcattgtgggatttccagccttcyttctgcctcccaggcccagcccagccctgatgcattggtgtgtgagtgcctgaatgtgggtgtacatgtgtgtgtttcagatcctgaccccaaactggccccacatcattcatcaggctttttgtgcatttagcaatccctccctgacactcacttggtcttgagtctgtgctgggcacttctggacagccccaaaaactcagcatctcctagatttggggagacaaaactggacaaagaaccttccagcactgtaagcacagcctaggttgaagggaagaacagcaggtcagggagctgggaggagtaaggggagcaaggggtaaccacagaggctccctggaggaagggtcctgccccagaaggtcacaaatcctacatagaccctaaggaaagagcctgccatccatgacatgcccctggcttaaaacaaggcagtctctgccccaactccaagctttaaagggaaatcaggtggggtgcagtggctcacgcctgtcatcccaacactttgggaggccaaggcaggtggattacctggggtcatgagttcaagaccagtttagccaatgtggtaaaactccatctccactaaaaatagaaaacttagctagccttggtggtgcatgcctgtagtcccagctactctggaggctgaggcgagrgaatcacctgaacctgggaaaaaagaagagttactaagaaaatcrtatggaagaggaagtatgtttactattcattaagtagaagtgtgtcatcataaaggtcttcatcttcatcgtcttcatgttgaataggctgagggggaggaagggaaggggttggtcttgctgtctgaggggtggcagaggtggaagaggtggaggaggtggaaggggagagaggagaggcagacayactccatgtaacttattgraaaaaatccacgagccaggtgcagtggctcatgcctgtaatcccagcactttgggaggctgaggtggatggatcacctgaggtcaggagttcgagatcagcctgcccaacatggtgaaaccccatctctactaaaaatacaaaaattatccgggcatagtggcaggtacctgtaatcccagctactcaggaggctgaggcaggagaatcgcttgaacccaggagatggaagctgcagtgagctgagattacgccactgtactccagcctgggggacagaatgagactctgccagaaagaaagagaaaaagagaaagaaagagaagaaagagaaagaaagaaagaaagaaagaaagaaagaaagaaagaaagaaagaaagaaagaargaaggaaggaaggaaggaaggaaggaaggaaggaaggaaggaaggaaggaagraagaaagaaagaaagaaagaaaggaagaaagaaagaaagaaaaaagaaagaaaggagggagggaggaaggggggagggagggaaggaaggaaggaaggagaagggaagaaaggagaaggaagagaaggaagaaaatatggaagaggaagtatatttactattcattaagtagagaatcatcataaaggtcttcatcctcaccgtcttcatgttgagtaggctgaggaggaggaagaggaggggtcttgctgtctcaggggtggcagaggtggaagaggaggaaggggagaggagaggcaggcacagtccatgtaatttttattgaaacaaatccagatataagttgaccctcacaggtcaaacccatgttgttcaagggtcaactgtactccgtatgacactctagtggtggacatatgtcattatacatttgtccaaacccatagaatgtacaccaccaagagcaaaccctaatggaaatgatgaactttgggtgataatgatgtgtcagtgaaggttcatcgattgtaacagatataccattctggtgctggatagtgataatacgagagtctgtgcatgtgtcaaggcagggagtagaactctctgtaacttctgctcaattttgtcacgaacctaaaactgctctaggccaggcatggtggctcacgcctgtaatcccagcactttgggaagctaaggcaggaggatcccttgagtccaggagatgagaccagcctggccaacatagcgagaccctcatctctataaaaaattaaaaatagaggccgatgcgggtggatcacctgaggtcaggagttcaagaccagcctggccaacatggtgaaactacatctgtactaaaagtacaaaaatcagccgggagtggtgacggggacctgtaatcccagctactcgggaggctgaggcaggagaatagcttgaacctgggaggcagaggctgcagtgagccaagattgtgccactacactgcagcctaggcaacagagcgagactctgtctcaaaaaaaaaaaaaaaaaaaaaaaaagcctgtaatcccagcactttgagaggccaagacrggtggatcacccragrttgggagtttgagaccagcctggccaacatgctgaaatcccgtctctactaaaaatacaaaaattaactggaagtggtggacgggcacctgtaatctcagctccttgggaggctgaggcagragaatcacttgaacctgggaagcagggctgcagtaagccaagattgcaccactacactccagcctgggtgacagagggagaccctgcctcaaaaaataataataawaaaataaaaaataaagctgggtgcagtggctcacrcctgtaatcctagcatttcgggaggccgaggcaggaggattgcttgaggccaagagtttaagaccaacctggccagcatatcaagactccatctttaaaaataataataataataaaactgttctaaaaaagtcttaaaattatttatcggccgggcatggtggctcacgcttgtaatcccagcaatttggtaggccaagttgggtggatcacctgagtcaggggttcaagaccagcctggcctacgtggcaaaaccccgtctctactaaaaatacaaaaattagccaggcatggtggcgcatgcctgtaacctgagctacttggtaggctgaggcagggaggcaggagaattgcttgaatctgggaggtggaggttgtagtgagctgagatcgtgccattgcactccagcctgggtgacagagcgagactccgtctcaaaaaaaaaaaaagttattgatgacttagattttcaacactgccttaaattttgcggcaaagaggatgcctcaacctagtccctgcctcagcccacaaccttcatatggttctaccaggcaaagctcctatccccaaatcctgggaaacgagcttggaggaggacattgtctcttactcccatgggaagtgtcccccattcactctatcacttagcaccctacatcctgagcttccactaygtgcccagcttttttctgggaggtccccagaaagaggacacctgaggaggccccaggggtggcccccaggggaatcccaggcctggctcaggctggacattcccaggcctgccctggctgagtctccagctggtgggtctcctggaaactccccgggctggttttgaggtgggagccccacagggaagcaatttacatacacaacagcccagtcatgtcaacctgccccatctgatgccagaataaaggggagatgggtccattctgcaggtctcagtcaygggcacccggagaagaggaaggacatttcactgtcagcccaggtgagtccagaagccagctcctggaacaatgccagggtcctgaacactcaagctcaacccctgctctcagctactgctggtggcttgaaatcaagggctggaactggatgagaggtgacagcccctggtccccatgggctcagagcaggcctcagcaaacactgtcctcggcccctgcacccatgctctgcctgagcctgaagtgttggttgcaaaaaaaagcaggaggcagtgccaacttcaggcctcagcaaacactgtcctcagcccccgcaccgatgctgtgcctgagcctgaagtgttggttgcaaaaaaaagcagaaggcagtgccaacttcaggcctctgcttctctcctctccctcaacacagccggtcttaccagtacagcaggcggcagctgagagtcccctctggtggccagcagcggctacagagccgtcactatggggagggacaggacttgaggggttgcctcggtccacctcactggagaatgggcagagtttatggagtctgaaccacctggtctccaggcccctctggggatgggcctggcttactgaccactgacctcagcctaggagggacagaagagactgggggagaccaggatgcccagatgaccttgacccagggtacgctgccccatgtccctgctgcctcccgcccacagctctacgagaggcaggtctgtcattcgccgctggactttgacagtggtcaaaggctctgctcagttctctgtgcctgtctccctccagcactgccgaggttctctgccgaggccaaccagaaataccccttggaagctggaatcctgcaacaatggcccagggtgtcctctggatcctactcggattgctactgtggtcagacccagggacaggtgagtcagggggcagagtcctgggaccaaacctcttggctctgcagaaggcgtactgctgtcccrtctatgtcttgccctgcatggagtgaggctggagactcaagctctcaaagaagctccagcatggggacatagatattcccagctccacagagtcaaggcaaggataagggaaggaatctggggcctggagagcaaaagtagggaaggcttcttggaggaggagacataagagctaggctaggaagaaagagaaatgatttkggggagaagccagaaagggcattttttgcagagaagagcaaagctacacaggttaggtggtggactggagaagaacctagattctagaccaggagagtgtgtcgagtaagacttcctggattcaaattctactactggccaggcctgtaatccmagcactttgggagatcaaggcgggcagatcacttgagatcaggagatcgagaccagcctggccaacatggtgaaaccccatctctactaaaaataccaaaaattagccaggcgtggtggcaggcacctgtaatcccagctacccaggaggctgaggccagaaaattgcttgaactcaggaggttgcagtgagctgagcactactgcactccagcctggatgatagagcaagactccgtctcaaaaaaaaaaaaaaaaaacaaaggcaaatcctgcctctgccacttccttcctgtgtgaccttaggcaggtaacttaacctctctgtgcttcagatgcctcatctgtaaagggacaccatcttagtccctttrtgcttctatataggccagggtacctgaaactgagtaaatttgtaaagaagagaaatttactttcttgcagttctgcaggctaggaagtcccaaatgccagtgctttgatcttggacttcccagcctctagaactatgagaaataaatgtctgttctttttttttgttttttagacagagtctgactctgtcgcccaggctggagtgcagcagcatgatctcagctcactgcaacctccacctcccgggttcaacagatcctcctgcctcagccccccaagtagctgggattacaggtgcccgccaccgcacccggctaacttttgtatttttagtagaaacggggtttcaccatgttggccaggctggtctcaaactcctgacctcaagtgatccgcctgcctcggcctcccaaagtgctgggattacaggcatgtgccagcacacctggccaaatttctgtttttcataaattacccaacctcagagatctgttatagcagcaccaatgtactaagacaggggctaaaaggacctacctcacaagagttgtgaagactaactgcgttaaattattaatatataagtcacctagactagtagctagcacatagtaaatgtttactgaaagttagctattatttgataacccatctctgaaccagctctgagcctaacttagcatttctaggtttgcagttcagccactgacatttccccaacatggcacaagcccatcctgctcttccccctgcctcccaggctattttattttattttattttattttattttattttattttaattttattttattttatttattttattttatgatggagtctcactctgtcacccaggctggaatgcagtggggggttcttggctcactgcaacctccrcctcctgggttcaagcagttctcctgcctcagcctcctgagtagctggggttacaggtgtgtgccaccatgcccagctaatttttgtatttttagtagtgacggagtctcgccatgttgatccggctggtcctgagctcccgacctcaggtgatccacccgcctctgcctcctaaagtgctgggattacaggcgtgagccactgcgtctggcatttttttttttttttttttttttgagacaaagtctcactctgtcacccaggctggagtgcagtggcgcaatctcggctcactgcaacctccacctcccatgttcaagtgattctcccgtctcagcctcccaagtagctgggattacaggcacacaccaccatgcctggstaatttttgtatttttattagagatggggtttcacggtgttggccaggctggccttgaactcctgatctcaggtgatccactcacctcggcctccsaaagtgctgggattacaggcctaagccaccacagccagtcccaggcatctttcaaaatacctttccctctaacatccccaatttttaacttcaattcatcacaaaagaccatccatctctccctctcacgatctggggactcttccacttttgtccactgcaatgtcactacctaccttctgccaccttcatctctcacctccacactgtctccccttttctatcctggcaccccaaaaatccatttccttatggcagccaaacaaatctaagcctaagaaaggagtcttagaatgccaggttcgtcacacctctgtcctgctcataaatctgccatggctccccagtactcacagacagtctgagctccttaaccaacaggcaatagtctgtgtacctcactttcctcatctacacaaggatagtgttgggggtcatggggttatcagatggagggctgggagcattgggtagatgtggaatcaatacraggaggctcaggaatgggtggggctgggctaacacattctttcctcctgcagcctccctgcccctgctcatggactctgtcatccaggccctggctgagctggagcagaaagtgccagctgccaagrccagacacacagcttctgcgtggctgatgtcagctccaaactctggcccccacaatcgcctctaccacttcctgctgggggcatggagcctcaatgctacagagttggatccctgcccactaagcccagagctgttaggcctgaccaaggaggtggcccracatgacgtacgagaagggaaggaatatggggtggtgctggcacctgatggctcgaccgtggctgtggagcctctgctggcrgggctggaggcagggctgcaagggcgcagggtcatwaatttgcccttggacagcatggctgccccttgggagactggagatacctttccagatgttgtggccattgctccagatgtaagagccacctcctccccaggactcagggatggctctccagatgtcaccactgcagatattggagccaacactccagatgctacaaaaggctgtccagatgtccaagcttccttgccagatgccaaagccaagtccccaccgaccatggtggacagcctcctggcagtcaccctggctggaaacctgggcctgaccttcctccgaggttcccagacccagagccatccagacctgggaactgagggctgctgggaccagctctctgcccctcggamctttacgcttttggaccccaaggcatctctgttaaccawggccttcctcaatggcgccctggatggggtcatccttggagactacctgagccggactcctgagccccggccatccctcagccacttgctgagccagtactatggggctggggtggccagagacccmgggttccgcagcaacttccgacggcagaacggtgctgctctgacttcagcctccatsctggcccagcaggtgtggggaacccttgtccttctacagaggctggagccagtacacctccagcttcagtgcatgagccaagaacagctggcccaggtggctrccaatgctaccaaggaattcactgaggccttcctgggtgaggaagttccccacaccctgtgatccttcccattacagacacagacgcccccaccccgtatattcagggaagttgaggactaggagagtccagagggggcaataagggatctggtcgggggtgggtgggacagctgcacaggtgaggaaatgccagagttgggccttgaaggatgaataggagttcatctcattttgttttgcttcattatatttatttgcattaatttatggggtacaagtgtaaccttgtttctcgcatagattgcrtagtggtcaagtctgggcttttaggtacccatcactccaataacatacatccacccattaagcaatctgtcatcatcctccctcctctctctccctcacccttctgaatctccactatctatctttccacaygctacatccatgcatacacattatttagctcccatttataagtgagaacttacggyatttgtctttctgtgtttgacttgtttcacttgagataatggcctccagttccatccatgttgctgcaaaagacattctttctttttttttttttttgagtctctctctgtcgcccaggctggagtgcagtggcacgatctcagctcactgcaacctccgcctcctgggttcaagcaattctcctgtctcagcctcctgagtagctgggactacaggcatgtgccaccatgtctgggtaattttttgtatttttagtagagacggagtttcatcattttatcagggtggtctcgatctcctgacctcgtgatccacccaccttggcctcccaaagtgctaggattacgggcgtgagccaccatgcccagccaacattatgtcattttttacagctgagtagtattccatttcctgccgaccactgtagacaacctcctggcaatcaccctagctggaaacctgggcctgaccttcgtccagggctctcagacccagagccatccaggcctgtaatatatatcatattttctttatccaattctcttttgatggacagttaagttaatttcttacctttgctattgtgaatagtgccctgatcaacatgtgaatgcaggtatctttttaatataatgatttattttcctttgggtagatatccagtagtgggattgctggattgaatgatagttccaatttattattattttttttgttttgttttgttttgttttgtttttagacagagtttcactcttgtctcccaggctggagtgcaatggcacaatctcggctcactgcaacctccacttcctgggttcaagcgtttctcctgcctcagcctcctaagtagctgggattacaggtgcctgccaccatgctcggctaatttttgtatttttagtagagacagagtttcaccatgttggcccaggctggtctcaaactcctaacctcaggtgatccacccacctcagcctcccaaagtgctggggttacagtcgtgagccatcacccggcttttctgtctttttaataatagctattctgattagagtaagatgatatctcattgtggttttaatttgcatttctctgatgattggtgatgttgagcatgttttcctttgcctattggccatgtgtatatcttcttttgaaaaatgtctattaatgtcttttgcccgctttttagtgggtttctttctttctttctttttctttctttctttctttttctttctttctttctttcttttctttcttgaattgtttgagttccttgtaaattctgggtattagtcccataccagtgcatagtttgcaaatattttctcccattctgaaggttgtctgttcgttctgttgattatatctttggtgtgcagaagctttttggtttaattaagtcccatttgtctactttgtttcttttgctctgtgcttttgaggtcttagtcatgaattctttgcctagcccaatgttcagaagcgttttccttaggttttcttctggtattttagagtttcaggtcttacatgtaagtctttaatctatcttgagcaatttttttttttttttttttttttttttttttttttttttgagacagagtttttgctctgttgcccaggctggagtgcaaagatgtgatctcagctcactgcaacctctgcctcctgggttcaagcgattctcctgcctcagcctcccacatagctgggattacaggtacctaccaccatgcccggctaatttttgtatttttagtagagayggggtttcaccatgttggccaggctggtctcaaactcttgatctcaggtgatccacccacctcagcctccaaaattgctgggattacaggcgtgagctagcgcatctgtccttgagttaatttttgtatatggtaagagttaggggtccagtttcattcttctgcatatggttggccagttgtcccagcaccattagcaccatttactgaataggcagtccttttcccattgcttatttttgtcgacttagttgaaaattattgtttgtaggtgtgcagctttacttctgggttctctatttcattccattggtctatgtgtctatttttgtaacagtaccatgctgttttggttactatagtattgtagtataatttgaagtcaggtaatgtgataccaggctcgttttgcttagaattgcttttgctatttgggctcatttttggttccttgcgaatttcaggrtagttttgtctaattctgtgaaaaatgactttgatattttgatagagattgcattgaatctgtagattgctttgggaaatcngatttctctttttctagaaaatgaggtctcactatgttgcccaggctggtcttgaactcctgggctcaagcaatccacccacctcgcctcccaaagtgtgggattgattacaggagtgagccaccatgcctgcccccaccyccaatttttttttgggggggacagagtcttgctctgtcacccaggctggtgtgcaatagcacaatctcggctcactgcaacctccacctcccaggctcaagcaagttgtctcatgcctcagcttcccaagtagctgggattacaggcatgtgccaccatgcctggttgatttttgtatttttagtagagaccgggtttcaccatgttggccaggctggtctcaaactcctgacctcaagtgatccacccacctcgtcctcccaaactgctgggactacaggtgagacccactacgtccggcccacccccaattttttttaataaaaataaaatagatttagttgagtatagttagttggtccccagggaggaccaatgtggggtgagactggaccctttccaaatctgagaggaggctgagggatggtctgtatgtgcgctttaatgmgggtggaggaacaggcagagaaacagttcctgaccccagccttcaacccccttgcctgtaggatgcccggccatccacccccgctgccgctggggagcggcgccttatcrgggccgcccgaagctgctgcagctgccgctgggattcttgtacgtgcatcacacctacgtgcctgcaccaccctgcacggacttcacgcgctgcgcagccaacatgcgctccatgcagcgctaccaccaggacacgcaaggctggggagacatcggctacaggtaggaggggcccgaccggggagggggcggggcccacgttcggggatggggtctgagtgggcggagcctgatgcaggggaccgggcttgaacccgaggaaagctggcaagaccaaggaggagtcctgataggtagagcaaagttggagaggtggcgtggcttaggctaggggcggggccttaatagggaccgggaatagctaaatcatgggactcsagtcagggtagagaactagtacaggaggcgggatctgggagaggagcgggacctgtggcagagtctgggtctggggccaggcagagatggcctaaaacagacaaggaggcctggtgcggwggctcccgcctgtaatctcaccactttgggaggctgagaagagaggatcgctggagcccaggagttcgagaccagcctgagcaatataggaagacacccccccacaccacccatctctacaaacaaaaaaaacttaaaaaggccaggcgcagtggctcacgcctgtaatcccagcactttgggaggccgaggcgggaggatcacsaggtcagaagattgrgaccatcctggctaacacggtgaaaccccgtctctactaaaaaatacaaaaaaattagccaggcgtgatggcgggtgcctgtagtcccagctacttgggaggctgaggcaggagaatggcgtgaacccggaaggcggagcctgcagtgagccgagatcgcgccattgcactccagcctgggcgacagagcgagactccgtctcaaaaaaaaaaaaaaaaaaaaaaaagctgggcatggtgttgcgcgcctgtagtcccagctactcggcaggctaaggtgggaggatcgctggagcccaggagttcgaggcttgagtgagttatgatcgcatctctgcactctagcctgagtgacagagcgagaacccgtctcgaaaagaagaaggaggccgggagcggtggctaacgcctgtaatcccagcactttgggaggctgaggcgggtggatcacctgaggtcgggagttccagaccagcctggccaacatggagaaaccccgtctctactaaaaatacaaaattagccgggcgtggtggtgcatgcctgtaatcccagctagtcgggaggctgagacgggagaatcacttgaacctgggaagcggaggttgcagtgagccgagatcgcgtcgttgcactccagcctgggctacaagagcgaaactccgtctccaaaagggaagggaagggaagggaagaagggaggggtggcgaggggaggggagaaggctgggcacagtggctcacgcctgtaatcccagcactttgggaggccgaggagggcagataacctgaggtcaggagttcgagaccagcctggccaacatggcgaaacaccgtctctactaaaaataaaaattwaaaaaaaaattagatgggcgtggtggcgggygcctgtaatcccagctactccggaggctgaggcaggagaatcgcttgaacccgggaggtggaggtggcagtgagccgagatcgcgcccttgcacttcagcctcagcgacaagagtgaaactccatcaaaaaaagaaagaaagaaagaaggaaggaaggaaggaaggaaggaaggaaggaaggaaggaaggaaggaaggaaggaaagaaaaaaaacccaaaaacagaaaagctctctgaattgggcaagaactgggcttgagaaaaggcagaggtggggaggagaagggcagaaaggggcgtgccagtactgaagggcggatccagagaaaccgaacggtcctggagtggcagctggtgtgagagtggaacagagctggatgggacacaggcagcgcgaccgcgcgggtcttggggtcggtggcccttggcacaccaacagaatcggggaggggagcggataagggcccgggtccccctcacgccgcatggtgcttgcttctccctcccctctgcagtttcgtggtgggctcggacggctacgtgtacgagggacgcggctggyactgggtgggcgcccacacgctcggccacaactccyggggcttcggcgtggccatagtgggcaactacaccgcggcgctgcccaccgaggccgctctgcgcacggtgcgcgacacgctcccgagttgtgcggtgcgcgccggcctcctgcggccagactacgcgctgctgggccaccgccagctggtgcgcaccgactgccccggcgacgcgctcttcgacctgctgcgcacctggccgcacttcaccgcggtgagtcttcgcagcctgcactacacggcccgccgcccctccgtctacacaagctccacgaggcccctgccccctgcctgtaacagctgtgcccgcacagcctcagccaggcccccaacttcccggcggcacgtctattcaggaaacctaggyccagcctttgcgggtcactctgcgggcaacatccctgatcctgtgacttctgcctatgcagcctcagctcagccccagacccagccagcctgtcctttycccagctcctaatacctctacctttccagccaaggcatggaccctgacacctgccaacagcccctctgccctcacaacctcagcctggccttcatgacttctctacscaagtcacaacctgtcaggctgcaccacctcatcctggcccgccgaaccttgacctcacccctgcccctacccgaaggccctctgtccacacaacatgaacctaggctgtgaccttttgccttcacaacctctgtccagtccttaatcctgtgttgcaattctctgtccagacaatctcaactctgaggttgcttgtttcgtccctgactccttaacccctgatgacaactcttatgccagcacaactttgacctgatgacctcatcccagcccttgatcgccatcactaaaacaattttagaatcacacctggacaatctcgtgctacctacatactgccactccatttcattaagctattgactagcacatccatctcggcctatagttggctttgtcctcactctctcactttgggccactgtcccctccctgatccagggttccaccaccaggagggcagacccagccacataccacaaccacccccaagcctcacactcccttgtctttttccagactgttaagccaagacctgccaggagtgtctctaagagatccaggagggagccacccccaaggaccctgccagccacagacctccaataaagacagcatggaaacaaagtctctgttcatgcatcatcatgcattgtcttagtttgggtcttcccaaaagcagaccttaagacaataattccagtacaagtagtttattgagaggagatcccagggcagggcacggcagctcacatctgtaatcccagcactttgggaggctgaggcgaggggatcacctgagctcaggagttcgaaaacaacctgggcaatagagtgaaatctcatctctgcaaaaaaaaattttcaaattatccaggcatagccaggcacggtggctcatgcctgtaatcccagcattttgggatgctgaggagggtggatcgcctgagctcaggagttcaagaccagcctggccaacatgacaaaaccccgtctctaacaaaaatacaaaaaattagccaggagtggtgccacacacttgaggtaggaggatcacttgggcctaggaggcagaggttgccgtgagctgaaatcacaccactgcactccagcctgggagacagagcaagaccctgtctcaaaaaaagaaaaaattatccaggtacaatgttgtgtgcctgcagtcccagctactccggaggctgaggtgggaggattgcttgggctgggaggtcgaggctgcagtgaaccatgattgcgtcactgtacagcagcctggagaagagagtgagagcttgtctcaaagaaaaaaaaagaaagaaaggaagaaagaaagaacgaaagaaagaggaargaaggragaaagggaggaagggaggaaggaaggaaggaaggaaggaaggaaggaaggaaggaaggaaggaaggaaaaaaaaaaaaaaaraaaaagaawaaatagagaggtgaacaacccaggtaccgatgcagggaactggaggcagccagggaataatgtgttttcaagcaagtttccactgtaggcaagagagctcagtctcacttcgaagccctgagggagagcataggacacatacctgagtcatcccacacaagggttgagggagctggggtatttatacactaattcccaccagttattatgtgagggctgctctcagggacatgttaattcactggcacttttggaatgcttgttacacagacatagtggactccatctgctagatacaaatggctgcaaatgtcacctcctcagggaagtcctccctgatttttccagctcaaagagtggcatttttgctcagcattcactgcagcctatttccttctaggtcctccttaccagctagaaatgtctcatgtatgagtttaggatcttatctacctccatcatctgtgagctccaggaaggcagaaaccaagtttggttagttctctgcggcctctccagcacctagcatgtaataggcactcgggaaacatttgttgactagacaaaggcttacatgaatcttttgaaactgatattatcgtcttgtacaaataaggaaaacgaggctcagagagaggaaatgacttgtctgaggtcacacagagggagaggggccagctggtactcggctcctggaccggatttatgctgactcatttattcctcagaatggcatttacttacctctggctttcaagtaaacatctgtggaagcctaacagagatacaagaaagtgctcccaagggcacagcttgatgaattttcacaacagcacacagccatgtaaccaggacccagctcaagaaatagaacatgttaagccaagcgtggtggcacacatctgcagtcccagccactacagaggctgaagcaggaggactgcctgagcccaggagtaggagaccagcctgggcaacatagtgagaccctgtctctttacaaaaaaaaaaaaattaaaattagccaggcatggtggcatgcacctgcagtcccagctactcaggaggctgaggcaggaggattgcctgagcccaggaattcaaggttgcagtgacccacaatcatgcctgggaatagccactgtactcctgcctgggtgacagaacaaggcttcgtctctctgggcacagaggctgatgctattcctgtattcccagcactttgggaggctgaggcatgaggattgcttgagcccaggagttcaagacaagcatgggcaacatagtgaggccccatctctacaaaaamcaaacaaacaaaaagttaaaaattagtcaggtagcatgcacctgtagtcccagctactcgagagcctgaggtaggaggatcgcttgagcccaggaggttgagaatgcagtgagctgtgattgtgccactgcactccagcytggccaacagagcaagaccctgtctcaaaaaaaaatcttattaaaaaaaaaagaacaygctaaatttgtgttatatgaattttacctcaattaaaaaaaaaataggccaggcrtggtagcatgtgcctattatcccagctacttagggggctgaggtgggaggatcacttgaggccaggagttcaagaacagcctgggcaacaaagcaagaccctcatctcaacaacaacaaaaaaattgtttttaataagccaggtgtggtggcatgcagctgtagtcccagctactcaggaggctaaggcgagaggatctcttgagcccaggagttagaggttacagagagctatgatggcaccactgcaytccagcctggatgacagacctcatctacaaaaaataataatattcatattatgtataatgtaatattatttatattactatgtaatataaatattatatttttattttatgagatctatattatttttatagacctcatttataaataataataayaataagggccrggcacggtggcttacgcctataataccagcactttgggaggccaaggcgggcagatcatttcaggtcaggagttcaagaccagcctgaccaacatggtgaaaccccgtctctactaaaaatacaaaaaaattaggcaggcatggtggtgaatacctgtagtcccagctactcaggaggctgagtagggagaatcacttgaatccgggaggcagagattgcagtgagccaagatcgtgccactgcacaccagcctgggasacagagcgaaactccttctcgataaataaatyaattaataataataagagtaataataaatcttgccatcttccagaagccccccttgtaccctcttcccagccaccagtgcctccaaaagaaactgataccctgcttgttagacatggttttgcctgctttaggactttatgtaaatggaatcacaaagtgtatactcttcattgttttggggtttttaaatttatttattattgctttttagagatggggtctcccgagggcagggaggggaaaaagaaaaaaaaaagttagatatgaggtctccctatgtcacccagactggagtgcactgcctattcacaggcrtgatcacagctcactgcagcctcgaactcctggcctcaagcgatcctcctccctcagcctcctgaatagctcagattactggcattttatggctttggttttggttttggctcaacattgtttgtgattcacccaagttaaatcattctttagtttgttctcactgctgtatgatattctgctgtgcgaagagatcacaatttattccttctcccactaatgggtacttaggctgcttccartgtggggctattatgcattgtgctgggggggcatatctattggacgtctacctagcaatggaattgctgagtcagagaagatccagctagtagtgttagtagatcctgccaaaccgtttcccaacatgagtgaatgggtctacactccggccaactgtggattagagttctaggtgctttgtattctcgccagcatttgttcagcctgtactcattttgcagagaaggcaacggaggctcagagagaggggcaagtgctgcctccccgtcagggaggcagtctgggtccttcttgctagaagcctggtaacccacctcctctcttctcctccctcgaacctccagcaacctgcccgcactgtgccctcccagcctggctgtggggtggggtgggacagagagggtcacgtggagttgggttccgagggaggaagccaggcggggtgcagacggctgctgattctggggctggtcaggaaaccaaggtaagggagggagtggaggtgggggcagggggattcctggaggcagagctgagggtggggagggggccgagatgagggcagtatgtggacagacactgggcactactgtcactctctcgtcccccaggagacccccccccccaaccatggacccaccgtcgccaagccggacctcccaaacccagcccacagccacctctccgctgacttcctaccgctggcacacagggggcggtggggagaaggcggctggagggttccgctggggccgctttgctggctggggcagggccctgagccaccaggagcccatggtcagcacccagccagcccctcgctcgatattccgtcgggtcctatctgcgcctcccaaggagtcacggaccagtcgccttcgactctccaaggccctctgggggaggcataagaacccaccgccggagccagacccggagccggagcaggaggccccaggtacatggttcccccaccctgagcttgggccgggctgggaagccggatgcttgggttttgtctgcctccggagcatcaaccatacagacacaggaagttgtggggagtgcaaaagcccagcaggaagccgctggggcccagctaccctgttccctctttccccctaaagagggtaggaggagttgccggggtcctgtgggcagagggtccatctgaggaaggaacagtgaatgtaaacccgtgatagtattgtccagaggctaaacggctcttggccccaacgggtctctccttcaatggctcaggcccatcctttcctacctggatatccatcttcagcctgcctcctactctcctaccttctagcttccgtgtctttgttctgagcccttaagcctcagcctctccatcagttcagtgagaataatgatctccattttggagagtatataattttatttgctcatattcattcatttattcaagcagaggtttgttgagcttctattgtatgtgccaggccctgatttaggcactgaggacacactagtgaaagagacagatgaccctccctgccccatggagctcacagtgtagtggaattgacaggaaatccatcaacaagaaaatgacagatgggccaggcatgatggctcacacctgtaatcccagcactttgggaggccaaggtgggtggatcacctgagctcaggagttcgagaccagcctggccaacatggcaaaaccctgtttctactaaaaatacaaaaaaaaaaaagtatctrggcatggtggcacatacctgtactcccagctactcaggaggctgaggcaggataatcgcttgaacccgggaggtggaggttgcagtgagctgagattgcactactgcactcccgcctgggcgacagagggagactccatctcaatggaagaaaaaaaaaaaaaagaaagaaaaaaaatgacagatggtgctaagtgtcacacagggggatctagaagagtaatggatatcacaagaattagggctcaggaatgtaacactagcctagggcccagcattttttttattttttttttgagatggagtctcgctctgttgcccaggctggagtgcagtggcgcgatctcggctcaccgcaagctccgcctcctgggttcacgccattctcctgcctcagcctccygagcagctgggactacaggaacccgccaccatgcccagctaattgttgtatttctagtagagacagggtttcactgtgttaaccagaatggtctcgatctcctgacctcatgatccgcccgcctcagcctcccaaagtgctgggattacaggcgtgagccaccgcgcccggccccaggcccaacatattttaagtgat

SEQ ID NO: 1650 - DNA, 16914 bp, Homo sapiens
atttaagactgaaagtttaacatgcttattttgttaccagccttctgtgagcccaagggctatttgctttatattgatcctatttggatccttctgcgaagcttaaaatggccatgagacacgggttargtcatggtgaaaatggtaagaagccactttagtttcttcctgccaaccttccttcttgaatcagacactttaatttcaattgctatgagatcacatagtggaaacatgtattcccagagggtgatacagtgcaatactatccttaacaggcaaatccaaggcatagccagtcccaagttgatcactagtgcaaatcataaaatacctaagtaacttttaggtgactttctcataaacaccagaatgacaygggttttcttaacaaaatatcactggtttgagacctaggatgcttctaaaacattgttattgctcccagatttcctttctcagagaattaggagagaaacaaaggtttgttgaggacctgttatctataagttgtttcaggtgggtgctttatgtaatttgttcataaaatatacatatcaggtattattattgtcttcattttattgatgagaaaactgaggctcagagagattgagtaagtaatgtgaygaagattctgcagagtaatgtatgtttagtcagcactgaaacccaagtcaatgggtcttgtttctaaaacacatgttcttttcactctaccatacgtytatttcagtgaccagatacatgtagttttctgacctagaaakaaagattggattcattatccataggcttctgagttcacaaatcaccacagccagtcaactacctgagagactgttgagtcctcagctttaaacaaagttttctacttccctccaagttgaaagtgtaatagagacayaaaaaacccttcaaaaaatcaatgaattctggagctggttttttgaaaagatcaacaaaattgatrgaccactagcaagactaataaagaagaaaagagagaagaatcaaatggatgcaataaaaaatgataaaggggataccacyaccaatcccacagaaatacaaactaccatcagagaatactayaaacacctctacgcaaataaactagaaaatctagaagaaatrgataaattcctcggcacaygcatcctcccaagactaaaccaggaagaagttgaatmtctgaatagaccagtaacaggytcckaaattgaggcaataattaatagcttaccaaccaaaaaaagtccaggaccagatggattcacagccaaattctaccagaggtacaaggaggagctggtaccattccttctgaaactattccaaacaatagaaaaagagggaatcctccctaactcatttcatgaggccagcatcatcctgataccaaagcctgtcagagacacaacaaaaaaagagattttagaccaatatccctgatgaacatcgatgcaaaaatcctcaataaaayactggcaaaccaactccagcagcacatcaaaaagtttatccaccatgatcaagtgggcttcatccctgggatgcaaggctggttcaacatacacaaatcaataaatgtaatccagcatataaacagaaccaacaacaaaaaccacatgattatctcaatagatgcagaaaaggcctttgacaaaattcaacaaccttcatgctaaaaactctcaatatattaggtattgatgggacrtatctcaaaataataagagctatctatgataaacccacagccaatatcatactgaatgggcaaaaactggaagcattccctttsaaaactggcacaagacagggatgccctctctcaccactcctattcaacatagtgttggaagttctggccagggcaatcaggcaggagaaggaaataaaggacattcaaytaggaaaagaggaagycaaattgtccctgtttgcagatgacatgattgtatatctagaaaaccccatygtctcagcccaaaatctccttaagctgataggcaacttcagcaaagtctcaggatacaaaatcaatgtgcaaaaatcacaaacattcttatacaccaataacagacaaacwgagagccaaatcatgagtgaastcccattcacaattgcttcaaagagaataaaatacccagaaatccaacttacatgggatatgaaggacgtcttcaaggagaactacaaaccactgctcaatgaaataaaagaggatacaaacaaatggaakaacattccatgctcatgggtaggaagaatcaatatcgtgaaaatggccatcctcccaaagtaatttatagattcaatgccatccccatcaagctaccaatgactttcttcacagaattggaaaaaactacttgaaagttcatatggaaccaaaaaagcccacattgccaagtcaatcctaagccaaaagaacaaagctggaggcatcacgctacctgacttcaaactatactacaaggctacagtaaccaaaacagcatagtactggtaccaaaatagagatatagaccaatggaacagaacagagccctcagaaataatgctgcttatctacaacgatctgatctttgacaaacctgacaaaaacaagaaatggagaaaggattccctgtttaataaatggtgctgggaaaactggctagccatatgtagaaagctgaaactggatcccttccttacaccttatacaaaaattaattcaagatagattaaagacttaaatgttagacctaaaaccacaaaaaccctagaagaaaacctaggcaataccattcaggacataggcatgggcaagtacttcatgactaaaaacaccaaaagcaatggcaacaaaagccaaaattgacaaatgagatctaattaaactaaagagcttctgcacagcaaaagaaactaccatcagggtgaacaggcaacctacagaatgggmgaaaatttttgcaatctactcatctgacaaagggctaatatccagaatctacaatgaactcaaacaaatttacargaaaaaaayaaacaaccmcatcaamaagtgggygaaggatatgaacagacacttctcaaaagaagacatttatgcagccaaaaracacatgaaaaaatgctcatcatcactggccatcagagaaatgcaaatcaaaaccacaatgagataccatctcacaccagttagaatgkcratcattaaaaagtcaggaaacaacaggtgctggagaggatgtggagarataggaacacttttacactgttgakgggactgtaaactagttcaacccttgtggaagtcagtgtggcgattcctcagggatctagaactagaaataccatttgacccagccatcccattactgggtatataaccaaaggattataaaacatgctgctataaagacacatgcacacatatgtttataggggcactattcacaatagcaaagacttggaaccaacccaaatgtccaacaatgatagactggattaagaaaatgtggcacatatacaccatggaatactatgcagccataaaaaatgrtgagtycatgtcctttgtagggacatggatgaagctggaagccatcattctcagcaaactatcgcaaggacaaaaaaccaaagaccgcatgttctcacttataggtgggaattgaacaatgagaacacttagacacaggaaggggaacatcacacaccggggcctgttatggggtggggrgagggggtagggatagcattaggaggtatacctaatgttaaatgacgagttaatgggtgcagcacaccaacatggcacatgtgtacatatgtaacaaacctgcacgttgtgcacatgtgccctaaaacttaaagtgtaataaaaaaagaaagaaagtgtattaggttgatagctcccaagtgatacagttttaattctttgaaaaaagattaaaaaatcacaatgtacctaattttgaaagtaaagctaaattatgaatgtaaaggacttcccattatgacctttgtccccaactcatgagtgtgtatatgtgttttctttccttttttgacatttaaaaaattatttattttttagagatgggatctctctgttgcccaggctggagtgtactggcatgatcacaactcattgcaatctccaactcctgggatcaagagatcttcccgccttagcctcccaagtagctgggactacaggcatgtgccattacacctggctaatttattttattataattgttacagccaggctctccctatgttgcttaggctggcctcaaactgctggtttcgaactcctggcctgaagtgattctcctgcctcagcctctctaatagctgggattacaggcaagaaccactgcaccaggcaactctttttcttttttgtttttttttgttttttgtttttttgtttttttgtttttttgttttttgagacrgagtctcgctctgtcgcccaggctggagtgcagtggcacgatctcggctcactgcaagctccgcctcccgggttcacgccattctcctgcctcagcctcccgagcagctgggactacaggcgcccaccaccacgcccggctaattttttttgcatttttagtagagacggggtttcaccgtgttagccaggatggtctcgatctcctgacctcgtgatccgcccgcctcggcctcccaaagtgctgggattacaggcgcgagccaccgcgcccggcctctttttcttttttaatgaaataatagagctagtagaaaatagtttgctttttaaagtgcttacttaataaaataaaaagtgggcaactcraaataaaaaatcaaacaatatctaamatgtttaaaagatttttaaaaatcaaaatataaaataatatcaaaatttaaaaactgggattctgttccccaaagttctgttcaaatctgttagatttatcttcccttgaccctaagtaatatcttgggcaagccctagagcttctttcctgacccttagttaataagatgttatctggtcacattcagtcacaataatagactcattttagtaataaacatcttaagactagtaattaaaactctttacttcacaccaagtttcctccccaagcttggcctgttcctggctggcagcctgaagtagggaaaggagagatayggtgaccttttctttgtacctttctagctaccctctataccctgacccyacatacataattgagctgtggcttctgactctactgggtttggggatgagaggcaktgagagtaaaatgaaggrgtggttttaattaatggcacagctaaaactggattttgttctctctgcacatggcagatgtttaaagctcattctttcttttatgcaagtttttacaccatccagcctcatttgtacctcttgaatttttgctcagtggcctatcaccattcaggatcaagacaaaaatcaatgagcacttattgtgtgtcatgcaccctacaaagtgccaggatatttatccaaactcctggcaatgctaaacacaatgcaaaaagacatattagaaaacgaatcttattaactttarcttttcaactgtatttcatcataaagtcttactttacaagataattgctgttgtgaaaaagggaaaggtcatggtctcatttcccagatgttatttgatatatgctataaattatattrcctccaacatagtctgcactttgaacttagaaaaacaatcttcagacggcatgcattctaattcttgaaataagtatgcccacaaactgtartttaagacagaataggtatgcttctcatgttttaattcagttgaatttcagaagatctcaggaatgtacagaacgagaattaagaattaatwadaataagaattaattaattgcttgacatagagtagttaggtgatttcctgaactttaagcttccacatcacartatgaagttggttyaagataagaaatataataaattctcgcccaaggacagacctgaatctctagctgcctagaggctgactcaactgaaatcatggcgtttgacagcacttggaaggtagaccggagtgaaaactatgacaagttcatggaaaaaatgggtaaagactttatttctttgtggctcattctttgctttcttacaaacatttttctttctaactcctaaatctctaggagattacagatagcttacagatagctcctgatgtggtagagaggatccagaagatgttcagaggagggaaaccatattytcccttcttacattaggaagaatccactatctcactaatggaagaaaagattctttgagtgctgttctctgaaacacaccaaaaagatccagaaatgtttccttcmctctttaactgaaaaatgactttttttgttgtttacagtaagaaaatggcagcgtgtaatgataacttccagatctgaaaatgttaaattctaggagatggaaaaacaaagaccatataagaaagtaatggaaaargttctcttaaaatttatagckctgaataagttagatttaattctgatttcttctaacttaaaaaagttttggaataatcttgagaagctgtgtagttttctccagggcgtttaatttaactgatttataatttgataccaatactctggcagcccatatactatacaagataggcaaacaaatttgtgtcattcccctaaaagaaaaatctgcatcaattatagcttacagtttaggaactctaagtttaaatttataaaagttgtagattcttatagtgattttggcttaatatttgctaattttctcatttttgtgtcagaaagaaatgccacaagaagcaaatagaactataaagttcaaaatgttaaagccactaagaaaaacaaaggggcatttaagaaaaaagaatactgtatatgtggaattaaagatgtgcttccttataaatatatgaatatacattttaatccttcatttratatttctagaatttgatttacttaacactgaaatgaacagtttgttaatcttattaaggttgctcagctctaagattctataattctgtactctacttaatttttctcaagttatggaaaaacaactttaatcagttctcttgatckgattgaacctgaacttctrtagaagcaatctgaatgttcttgtgcaaaggcaatgctaccgagttttcttcccaccctcaaaataaacaaacaaaacataacttggaaaaataaacacttcctatgggatttgactttattttctccattgtcttaccttttacaggtgttaatatagtgaaaaggaagcttgcagctcatgacaatttgaagctgacaattacacaagaaggaaataaattcacagtcaaagaatcaagcrcttttcgaaacattgaagttgtttttgaacttggtgtcacctttaattacaayctagcagacggaactgaactcagggtaagaatttttttttttatgagcaatgcattcttgatttttctacccaatattaaaatgatttctgctctatttcattggatggtttaattaatgcagktctccttcactaactgaagaagccaatgaagtttgtctacattatatattrcacaaattggcaggrtatttaaatatgyttttatttttatacgcatctgtgaagaatctgaattgaacagtaagaattagaaaactatcttttgaatgactgaatatagacctattcataaagaaatttaaaactgtgtttttaaacagtacagcaaaagaagcctttagagttaatatgtaacttaactgtaatgtttaacatgttgaaataataaaagaaatgaatagatgaacaaatgagtgagttaccaaatggaaagatttgatgtattgtaggtcattgggagtgtaccttttcatgtttaagataacacattttaggaagtcatcattttcaacaaattttttaaaaactttttttagcctcaacatttttctatttaaattacatgtttgtaatgacaatttaactactgaatgttttatcrtaagttatgtctttcyttaattagtaccacaatcacacaaattaaaacaagcacagagttrttaacatctccrtgaaactaattttaaccatgactatatttctggacacgtaacatgaaagattcagaaagaagtgctgctcatctgccttaaaattcagcgtatggaaattattgaagagaacaagcataatggttatcaacacatactctgtagcccaatggcctaggttcaatcctcactctgtgactttaggtgaatcactgtgccattttacagtctcctcttctgcaaagtagagatartagtatcagtttcatagggtcaccatgaagattaaatgaaaaagtgtgtctacagaactcagaacagtgcctgacatgtgtaagaccctaataaatgccattattattattattattattattattattattatgtaggggacctggagccttgagggaaataaacttattggaaaattcaaacggacagacaatggaaacgaactgaatactgtccgagaaattataggtgatgaactagtccaggtgagttgtcaaatttatagctattttcaaaaggcaaaaattactacaaaacaataatttttgtcactgctgagccagatcttcagtaaactgactacttcttttctcataaatcttactgattttaaaaatattgtatagctattttctgatgcctatttactaaagacaacttatatatgtcaaataatcaatgcctattttaactgaaaatataaatgactacaaaccaacatgtgttttaaaatggctgtatcccatatctgtataaatcttgctatcaagtacaagaaaaaattgtataaactcatactcatataatatatatgaatatataatataaaaatagtataaactcatatagtataaaactataatactactttttcttaacttagatgtaaaccttaaagataaattcttctgtttgttaacacctttcagacttatgtrtatgaaggagtagaagccaaaaggatctttaaaaaggattgagcattattcttggcrcacagtccaaaatacaaattggacagaagatctatattgtaccagaactrtttatttcaccccatcaagtataaggttactgattgattggtccttttataaacattggtatatttccattcatgccaaagcaaaagaagtaaaagctaattaggatttaatttgttttatattctctaagatatatatttactaaaagaatttgtgacattttaaaaaacaaaaataaatattgcrtccatgttgctttatatgtagccttgccttttaaaagaaaaagtatgtgaatatgaattgacagaytgttttcgtagagagagggtcttactctttcactcaggctggaatgyagtggagagatcatagctcactgtaacctcaaactcctggactcatgcaatcttcctgcctcaggcttctgagtagctaggactatgggtacattccacagtgcccagctaatttttgttttgttttctttttattttttttagagatggggtcttgctatattgcccaggctggtcttgaacccctggcctcaagcaatcctcctgcctcagcctctcaagttgttttttttctttacatttgataaactaaaagcataggctgcatatgagtctttaacatcttgaactggttgtgaataattttctggcactggttgtaagtaatatctattattataaaaataatatatgctcaaccagaaaacttagaaataagaaacacaaatgtaaaataagtatttccataactcataatccagagataattgccattctgattttgatagatatcctctcagctctcttccctgggggcagatatttcccaatacataccactttgaataggatgataggaaataaatgatgtactacattaaattaaattattgtattacatttttgtacacatcagtcattcccasgcttggctgaaaatcaggatcatctgagaaacttaaacaatttctgcattcttaatctccactgttattctattatatcagaatcgctaatagaaccaagaattctagaaaatttcctggtgattctgatgcagcctgtccactaacttgtctttgagaacaatggagayatcagttatcaatgttatttttaaccacccccttcttttttgttgttgtgggttttttcacataaacacatacattgccaattttccagggctcaaaaagtttccttttattcatattttcacatgacgtaaaattttatgtgcttcacataattktattttagcagggtacatattaggggatggagaggggktamaatttttaagcatttgcagctgcaactctatagacttttgacaaattctttttcacactgatgtagataacagcttaacatttacatagttcttackacttgccacacactgttctaagtggtatatacatatgacatatatattaaaatgtaggaagaaaaatgtttgagtacctgatgaaaatgaatagagagtatgtaatctttgaaagstgaatactgygtgttctcacttataagtgggagctaaataatgtatacacatggacacaccagagtgtagaataatagacactggagacttggaagagttggagggttggcagggggcgatgataatttacttaatgggtacaatgtacattattcagggggtgatggttacagcccagactttaccactatgcaatatatcaatgtaacaaaactatacttgtactccttaaatttatataaaaataccttaaatctatgttcattttataatttcataaaaatcttcacataggaaatagtaattatttagattttcacatgcttctcttcataaaagctcaatgtatttttatccctctaatcttatgtgtctaccatatatgaatcaggaaaaggcaggtattaatctcaatacaaaaactgagagagacaaaggcacaaagaagtttattagcttgtctaatattgtacaaagtccatgatgaacagaagaattaaatgtaggtcttgactttcagcctagatcattatgatctatgctattactcagcctgttataaacaaaaatatattaagaaaaaaaatgtccttaattcctcagtggcacccaagaatagcactctaaatgagtcaggtcagactgtaaaataatggtgttgagtgattagacacttatctatttctagtctcattgcaggctgacttttttcaccatttatatcctttctagaattaaatttccactatttattagtattggagarcagcctattatttgttaagtgacttccatttcaacaaccgtttttygggaaaaccaaccttgtcattacaccaccctgcttggccaaaagagggtccctgacccaagagcagccaatctaccacaatttggccagatcatgagctctgtgtagaaggaaaaatgacaactaactgaacctgcaagaacctctttytagggagtttgaatttgagaagtacacagttagtagttgatagcaaggaaaaaggcttaaagaggacaaatagagcagacaataagtagaagtcatgagtacctgaaactatgaacaagcagtaaccrtagggtagayagcagaatgtcggggcagtcagaagcagttggagtagtagaagctgaaatatttacacatgcaatatggtatctgggwtwtgcttcaaattgctttctccccaatctaggrttggggaggaagattgatacaagttggcaattcttgcagctgttgcaaagtgcctgacacataataacatatgataggttcactgaataggaacacaggaattcattatattcatctctgtacttctgtatgtatttgagattttccataacaagaagttaaaaatatagtacttacatacacatataactccagaatccaaccacttcccatcacttccactgctatcaccttagtatgagccaccattatctttttcctggattactgttacaactctctaaaaagcccaagaacttctaccttccctactccacccctttagtctctttttctacacagcagccagaaggatcctttaaaaatctaaatctgatcacatcgcttatctgctcaaactgctgcaatggcttccattttcactcagaggaaaaagccaatgttcttacaatgacctgtaagaccctatatgatcagatgccctgttacctctccaacacgtggtcctgtttttcatgaaatatctgggggaagagtgtttcaagcagaggaaacaccctggagcaaagacaccaaggcagtagcaaacctggtaaatttgaagaacatagcctggaaagagtccccaaatcacccagagctgaccaaaaacaagaccaatgttcaggaaacacaggctgactcagctttcctaaaatttaggaatgatgtggtgaaaaagaatgggttttagaatcacagacttgcccaaattcttgtctgcccatttactgactaaaattcaagttctgattctctatttttctcatttgaaaaatggggwaaatgtaatgattttctgagcttgttgcaattgaggtattatgtataaaacatcgagtgtaatgcctggcatatacctggtactcaaatgtaacataaacatgtacccttctcctctagagaaaatggggcaaagtatatcctgagtagatgggaaaactmttttcttaaaatacctctcatggagtctgcgtgagagagtgagccttggcctggtagatgagaatacttagttccagtccagtctgtgacataactagctggggactttgggagagtctcttcatctctttggaatgtagtttaatcatctttaaaatgagaggattgaactagatctccaaattttctttcagtgctaagattctatgatgtctgaatracayttagtgattccttcctttcttaagcagcctttttggtgtgggtcacaggggacaggacattagaacaatggaaggtaggatgggaagagggaaatatttacattataaagtatggctggtttcatgggtgtatggcttgtgyrggctcagagggccctgtgcttggtttaatgctcttttcttactgtcctaaaattctcaatactttttgaacaacttctgcattttcattttacacagggccckgaaaattatgtggcttgtcctatttctatggattgactattaataagtacaaaagatattttcctatgagcaactagagagaatggtagcaagayatctcyaggcacctaaagaagggtgaatggatggatggaaaagatagttgcctgggataaaatggaagtgagataaggttatgtggtgatggggaagggaaaaaggaggtagatggtcacttcatcattaagaagtgcttctttaccttttgctacttgctttctctaaactatagtataagaatgccatctgctggccaaggatacagactctttcrgaggtttccaatgcagtgtctttgccgcatttcagtgtctagggagtgttccagaaaggtctgatataccgtagtctacactttaaaatgttaattattaaatgcttcttcagttccaaactccacactaaacaaagctaatacaaagactcctcttgaaccgatccactaaaactgctttcatttattgaacaaaaaataatttwaaaaaagcactatgtgccagacagcaagtatttaatgatgaacactattggtagagatatttaggtgattaagaatttcctcaaatggatacaaactctcaggctcatcttgggtctgaatcgaaataccaagaatagcatcatcatcttcagcattggatggtcatctagagtagggttatactctcactcagtgggtgctaatatgcagggtggtgtatattgccttcaggcccgatgaccaaccttcaagctattgtctggaacagattttactggagaattgactggaaaagaagagtatgcaagacagtggcagaagatgaaagtttgaagcaaatggtggaaatcaatrgtcatggataaagcatagtgttccagagggcttctctcatccatatatatcctcattgaagattccattagaatgatggattgcgagaagtcctccctgccatgtaatcaagatttccaggaatgaaagagggagcttaaacaattagtagttaggactgctgtgaaatgaaggagtagtagaactctgaaggaggacaggcaaggaagtgctccctaaatgtcagcccagtttcaaagccacatctctcagattacaggtagtgtaactgttcttatcaaatgattctggcacactcactatattcactggagaaaacacctgaaagtcaaagaacagtactcttcctaaacttgaaaacaaaatgtcttttaggtaaaggagtatatgctcaatgccytcactkggttttaatttagaaacttttaaacaagattttttttaaaaaaaggatactgaagggcatcattgtgacacagaacttcctctctttaacatatacttggaacagagaaacctcagtaaagatggaggttatttcacaatcccagtccagactgagtgtttgtcctgcatgttcccatggcacaaagtgttcaactccagcaataccattactctatattcaatctgcttgcctgcctcctctagtttgtgagctatatgagggcaaggatagggtcttatatctataccccacactgtatccctctaacacatagyaaatattaatgattgtaatttggggcatgctgggcagccccagcctcagaaagccagctttccccattctttcttaaacccagaagatctactgagggaataagtccttgttgttctttacaaacagataaacttattctgaaccagatcaccctagccatatctgattaggtcaaaaatggccacctgacccaagggcagtcaatttctatacttgagagcagccaatgataggagaactctgtccaagaccaataattctcattaattaaaaccaggtagggtctctgttgagaatttgacttcaatacacagagaaagtcattagctagtaatgatgggcaaaagttaagatacagatggaaaagcaaacaacagatgccatgaggtaaaagcagtcatgatgagttctagtaaacaaaaaccggatagaagaaaagaggggtgagataacatttttagatgtggaagtaatgaattcttgcttctggtggataaaaagataacttgttcagtataggctcctcgtattctgagtagccaagaatacatattcctttaaccaaatatgaaccaagcacctaccatgtgctaaatatgacatgagttttagtggtgaacaagacaaatctattttgttcccatggaactttgaatctgcttagcttagaatctagacatagaagacatattgaataagtaaaaattattgygataagtattataaaggagtaacggtaggctttcatagaaatatatgcratcttgaattatactttccattgaactatttttcataagatgcttaattgtacagactttcttgaattattaaagggcctaactcacacatcagactcctgtcatccttattttcatacaaattggctcctacacacaagggggatatcataaaatctaaataaatgctttatttataaaacatagcactaactcagatacagttaaatgcaactccttctaccactacaagttaacatttattaatacatggtgtttccaatgtgccaggtatttttcaaagtgctttataataccaattcatgttcatcatcacaacaaagtctatataataagaacaattattattagtctcattttacacatgagaaaactgaggcagagagaggttatataacttgcccaaggtcaacagccataagtygctgaaccaggatttggacccaagcagttgtcctagagtccaaattcaattttacttgatgtggttatgtaggtaaattttcattcgaaatatcrtccatcaaaatatatattaagcatgtcttatatgcaggcactatgtgccaggtgctgatctaggtgttacagctacaacaaagaacaagasagacaaaaatccctgtcatcatggaagggatacagataataaacaagagaatgaagtaaaatatatagtacattagatgatataagcgctattgagaaaaataaaaccagaaagagggatgtggagtgtcagaggtgagatcatgggtgcagttttaaatagggagtaagatagcactgaataggtaacatttgagcaacacttgaagggagtgagagaatgagccattctaagtatgttttagtcagaggcctggatttggatccttgagccagtgacagtcttaaagagccttggaattacactgagtgtttctgggctctgtaatatagtgagcctagggctggatacagtagctcacacctgcaatcccagctactcaggaggttgaggcaggaggatcccttgagcccaggaggtcaaggctgcagtgagccatgatcacgccactgcactccaggctggaagagactgtgtctcaaaaaaataaataaagagcctaattagcatagcctatgggggctcaaagttgctagctaaggaagaacagagtaatgtaacaaaataagcaatatgaaacaaacaatagactccttctatgttttgaattggaatttctgaaggat

SEQ ID NO: 1651 - DNA, 22242 bp, Homo sapiens
aggcatagctccttgcttatcagtgctacaatctagataagaagagatttactgaaaacctacatagttgtgaattattcagatgctaggtggtatcaggattcagagaagggaaagatcaaattgggctttgtggaagaagtggggattgacccaggcactgtaggttgggtagaatttgaattggtgaggaggtagaaaggcaggagattcctaacagaataacataagcaaaaggagcatgacaaagggcagaaggagggaggagagatttctgttgggaacttaaggctaaaaataagaagtgaagtctgagagggcctcaaatattaggctaaggacttaaatttataagctgtaaagagttactatgtttgccaggtgcggtggctcatgcctgtaatcccagcactttgggaggccgaggtgggcggatcatttgaggtcaagagtttgagaccagcctggccaacatggtgaaaccgtctctactaaaaaaaaatacaaaaaattagccgggtgtcgtggtgcatgcctgtaatcccagctactccggaggctgaggcaggagaatcgcttgaacccaggaggcagaggttgccatgagccgagatcataccactgcactccagcctgggcaacaagagtgaaactccatctcaaaaaagaaaaataaaaaagagttactgtgttatggctgcgtgaggtggctcatgcctgtaatccaacattttgggaggccaaggtgggaggattgcttgaggccaagagtttctgaccagcttgggcaagaaagctagacaccatctctacaaaaaattattsgaaaattagccagacctggtgatttgcccgtagacccagttactcaggagcctgaggcaggaggatcacttgagctcaggaggttgaggctgccagtgagctatgatcacaccactgcattccagacttggaaatagaacgagactctattaaaaaaagaagttattgtattttgttttttgtttttaagattttgggtttttgtttttgtttttgagacagagtctcgctctgttgctcaggctagagtgcagtggcctgatgatcttggttcactgcaacctctagctcccaggttcaagcgattctcctgcctcaacctcctgagtagctgggattacaggcacacagcaccatgcctggctaatttttttttttttttgagacggagtcttgctctgttgcccaggctggagtgcagtggcgcgctcggctcactgcaacctccgcccctgggttcaagcgactcccctgcttcagcctcccaagtagctgggactacaagcacccaccaccatgtccagctaatttttgtattttcggtagagatggggtttcaccatgttggycaggctggtcttgaattcctaatttcgtgtgatccgcctgcctcagcctcccaagtgctgagattacaggcgtggcccactacacatggccaatttcatgctttttaatggctgcttctcagttcccagttttccccaacatctgctctgtagtctttaaccctgatccttgtgctagaaggacagatgtttgtctaggacctgatctctgccctcatgatttggtttcatgtgatcgttatccacacacsttatgtatgtatatacattcctaccctccccctcagcacgtcatttcccctgtcacagttgcctgtgtccctggagtgttacacagtgcctcctgaagacaacctggccctccttcagctctacttccggaccctggttactggtgcgctccgcccacgttggtgccccgtgctctatgctgtggctgtggctcatgtcaatagcttcatcttctctcaggacccacagagctcagtaagttacatctccatcttcagaggaaggaagggagctagcaattgagctgcctctgggccagctggggaagaggtaagtgtcaagcaaggccagtggtgggtaccagccctcggctcagtgccacctctccctgttctgcttctaggatgaggtcaaagctgcccgcaggagtatgctgcagaaaacatggctgctggcagatgaggtagggtcagggccattaggagggtgggatattagaggatcttgggggacagagaccacaacaggatctcattacccacttcataagttttctttcctttctgcagggtctccggcagcacctcctgcactataagcttcccaattccacgctcccagagggctttgagctctattctcagttgccccctctgcgtcagcactacctccagagactgacttcaacagtgctccaaaatggggtatcagagacctaggatagttgatatagatggaaagatgggtacgttgtcctgtatccagcctttcaacagatgtctggccagacgaagaacattgtgtcctaatggtaggcaggagaccaaggagcagaaggcttgccttcctgggagcaggttgtttgagctgttttagagcagtgagccctaccattacatcctgatatctggggcttctgaaggtctgtrctgggagtgaagagtggcttagctatttacccgctctttggggacagggcaaactaaatgcatcccttcttacctaactcccaacccctgccctgggctgaggcatatgaatgctatagttgtgcattaaaataaatgttttttatctcctggaaatttgatctggactgatttcagccatgttagttcagggttagtatctgggggtgggttatcccaggtgaggagcaggactgctgtgagagagatggggaagaatcataagtgggaggtaaaaactttgtccacatctggagacaacaagaatgtggggcctgccaggcayagtggtacacacctgtagtcccaactacttgggaggctgaggcaggatgatcacttgattccaggaattcaattccagcctagccaacatagtgagaccccatgtctgtctgtctgtckgtcggtcggtckgtctatctatctatctatctatctatctatctatctatctatctatttctgagacagggtcttgctctgttgcccaggctggagtgcagtggcgtgatcatagctcactgcagcctcgacctcctgggctcaagccattctcccacctcagcctcctgagtggctgggaccacaggcaagtgccaccacgcctggctaattttttgtatttgtagagacggagtttcaccatgttgcccaggttggtcttgaattcctgagctcaagcaatccacccacctcagactcccaaagtgctaagattacaggcatgagccgctacacttggcctattttggtagtttctacattgttctttggtctgaattctaaactttaggctttcttagactgtcttttgctgtgtggattacttattgtgtttgcaagtaaccagagtcagagcagtgtgccaaggcctagccctgtcagtaggtagagagaacccagtcttcataaatggagctgctgaacacagaattatccaataggtttttttgggtttttttttttttttttttgacacgaagtcttgctctgttgcccaggctggagtgcagtggggcaatctcagctcaccacaacctccccctccctagttcaagccattctcctgcctcagcctcccaagtagctgggattacaggcgcgtgccaccacgcctggctaatttttgtatttttagtagagatggggttttgccatgttggccaggctggtcttgaactcgaactcctgacctcatgatccgcccrcctcagccttcaaaagtgctggtattacaggcatgagccactgggcccagcctttttttcttttttttttttgagacagagtcttactctgtagcccaagccagagtgtastggcatgatcttggctcactgcaacctccgtttctgaggctcaagtgattctcatgcctcagcctcccgagtagcaggggctacaggcatgcaccaccacaccsrgctagttttttgtatttttattagaagcggtgttttgccatgttgcccagggtggtctcagactcctaagctcaggcaatccgcccacctcagcctcctaaagtgctgggattataagtgtgagccacagcatgtggccccaataggttttattaagcaactactgtatcagcaaataccaatgattctcaaactttgtgacaaaaatcatctggaggatattttaaaacagatcactgggtcctaccaccagaagctgctgattcagtacatctggggtgaaacccaagaatctgcatttctaacaagttcccaggtaatactgatgctgatgttcagaacaaaccacacaaccacaatttgaagagcagtggcttaaagagactttgcaaggtaaattctgtgatctcatagtgtgatatctagtgttaagtagggcatagagaccagggtttttttgttttttgttttttttgagatggagtctcactctgtcacccaggctggagtgtagtggtgcaatctcggctcactgcaacctctgccttccaggttcaagcaattctctgcctcagcctcccaagtagctgggattacaggcacctgccaccacgcacggctaatttttgtatttttagtagagacggggtttcaccatcttagccaggctggtcttgaactcctgaccttgtgatccaccccacccccaccgtccccttggcctcccaaagtgctgggattacaggtgtaagccaccacgcctggctgagaccagactttttacaaaatcactgttctgtttacaccttgaattagactttaccaagtagctaactactataacttctcttttgaagtattttgtattaaacataggtctcagactttcaagttaggattttttttttttttttttttttgagatggggckttgctcttgttgcccaggctggagtgcaatggtgcgatctcgtctctgcaacctctgcctcccaggttcaagccattctcctgcctcagcctccagagtagctgggattacaggcgtgcgctaccacgtgtgtctgattttgtatttttagtagagacgggattttgccatgatggtctagctagtctcgaactcctgacctcaggtgatctgcccgcctcagcctcccaaagtgctaggattacaggcatgaaccaccgcacccggcaaatgatcatttaagcaaatgatcgaagactcaagacacaaaactacctgaagggagtggctcccacatttgtagggtaccttacagagcaatttcccttcatatgattttgcaggtggtggggaaactctcmgggcagttgtggcctgtgctacatcacccattgaccagaggtgccagtactagtgctcaagatcaatygatcgatcggtctacctacctatcatctattgaccttcagtgctactaaaaacactcggatcttctaacgtctggtccagtctttcaccccatcacagtgagaggctgtgcacaggggtaacacaggcaacggaattatatgaggcaaacacagagatccaggtttctgggagtagcaatgaggttcagccttgcagtcacaaaggcaccactaaaaggcacaagtaatggcaggtaatgaggccttacttggagcagtttagagtacttmccacgtgtggtgacgcatgccacacactcaccaccaccaccactgccacaaatgaagtgcacactccactgctcctgtcctcaggaacctggaagcccccacctggtgtccgaggtgtggctcccactttaagcgtggggcacctcctctccggcctcaaacctaccsgagctcccagcaggctgcggcacatctgacggctggaaactagaacccctgggtggggactccttaaggctcctcccggaagcgtagggacctcgctgcccacacgcccctccctttcctcctctggcgtcctggggtctgaggtgggcgtggccagaccagctttaggtccggggagtgtctcgccagcggcagcacacccctgtaagtggtggccagrgctgccgtggcaaaatgagctgtcaactttaggttgacaggggtgtggccgcgaccgcaagggcttttgttgccgggtggacccaacagggatgggctgctggggacagctgctggtgtggttcggagccgcgggtaagtgctatctggcggtcaggggaccgtccagcctgaggcactttcctaggcttgggggtggccggtcaacaggccaggtgtcagtggttcctccagaggcctcgaactctcacagccaaatttctccggtccgtgcttctggagtgcgggccgagaagcgccaagtgcgtgcgaatcccagagtctggatcacgcagcttgggaaggaggaacattctttggggtctcagcaccgccttggggcggggccaccaatctaagttgaggaaagcattggggaggctgcaggaccaaattcattgcggcccctaagttattcactgggaaaggcgctcgaggagagaaactggcagacctatcagcgcgcacccgcggggcttctgcgaccggagtcgggtagtggcttccaggctgagagcgcggctgggccgggtgacgggtgtggccgcgaccgcaagggcagctgttgcggggttctctctttctttcatatcctatttccacccgccttaacgtcctgcgccttctcccaacacctttcaggcgccattctctgctctagcccggggtcccaggagacttttctgcggtcctcgcccctgccgctggcaagtcccagcccccrggacccgaaagtcagcgccccgcctagtatcttggagccagcctccccgctgaattctccgggtgagctttagacgcctccttcctctttcgctcaccataccagacccctctggcccagcyaggggctcgacgacccttgcctcgctccttgctctcaggcaccgaggggtcttggctgttttctacctgcggggccagcggccggcatgggcccacacagacacaatgtgacggggcgtacgcggggaccagcgtggtggtgaccgtgggggccgccgggcagctgagaggcgtgcagctgtggcgcgtgccgggccctggccagtatctgtaagtgcacggcggaggtagggtggacagtgacctgctagttggaggtttcaccctcagggtaacgaagtccacgtgcgcaccgacttgcgtcttggactattccgsggggaggtccaccttgagtgcccttcaaggtggcagtagtcgccaccgagttagccsttacccggaacctcttacaccgagcggaaggcccccaaccagggcrgcgccaaggggtgcttgagcctccccacatttccacgaaccctcctgaaataagtgtaatatctgatttttcggtgtgcaaacctacccttcccatcccgtcagagtcgattgcagcctccaagtccctcagataaaaaataattctggagcctcctctgtcgccaacttctgcccggagcggccggcctgagcaccgaaggccggggactcaccgtccgttccccgcaggatctcagcctacggagccgcgggcggcaaaggcgccaagaaccacctgtcgcgggcgcatggcgtcttcgtctcagcaatcttctccctcggtctcggggagtcgctgtacatcctggtggggcagcagggagaggacgcctgtcccggagtgagcgcagccagtggggatgggscggcgccggcgccgggggcgagggctgcctgggggccgggggagcgtgctttcctcggtgccgggtcaccagcacagcgaggggaggctcccgggccccgccgattccctcccccgctgcccgcagggtagcccggagagccagctcgtctgcctcggggagtctcgagccgttgaagagcacgcggcgatggatgggagcgaaggggtcccggggtcgcggcgctgggcgggaggtggcgggggtggcgggggcgccacctacgttttccgggtacgtgctcccttcggcgctcagcgttggggtcccaatcctctccccaggggcgctcacgcaccggctctccgtccgtcccttggggtccccctatcccygcgctgggctgggctggcctgggctgggctgggggcccctgcccttatccaggccccctgggcgggagccctctcccagtggcagtgcccctggacagctggagggcgcttcctggamcacgccgctggccccacaggtgcgcgctggcgagctggaacygttgctggtggcggccggaggcggcggtcgggcctacctgaggccgcrggaccgaggccggactcaggcctcccccgagaaactggagaaccgctcggaggcgcccgggagcggcgggagaggcggggcggcaggtgagggcgcgggccgcggggagaggcgggcgtgctccccgtgtggctgccaaccttcctgctgtcgctctgcaggtggtgggggcggctggacgtcgcgggctccctctccgcaggccggccgctcactgcaggagggggcggagggcggccagggctgctccgaggcttgggcgacccttggctgggccgcggccggcggcttcgggggcggcggcggggcctgcactgcgggcggaggcggcggcggctacaggggtaggtgcaccgttggagagggcagctgagcaggcccgagggtgaggtgatgttagaacctaagtacaggccggagccctcgggaggataggtgtgggagaggcattaagccctgctcagcagctccaaacaaaaagcaggagctcttagaaaaggaggtcaaatacactgcaaatcagcatgcagacaggactccctagatttccgtttaatccaggatctttcccatcacagcaggtccctgccttgttctgcagcagtcttcagaacttagagctggccgagtgagcaagctgagcaaaggggcagaaaggcaggattgggttaagtcagtggttctcaaagtgtggtccaggaacaggtaatatccccacaacctaagttgttcgaaatgcacattatcagctgggcctggtggctcacgcctgtaattctagcactctgggaggccaaggcaggtggatcacctgaggtcaccagttcgagaccagtctggccaacctgtgaaaccctgtctgtactaaaaatacaaaaattagccgggcgtggtggcgggagcctgtaatcccagctactctggaggctgaggcaggagaattgcttgwacctgggaggcggaggttgcagtgagccgagatcactccattgcacttcagcctgggcgacgagggaaattctgtctcaaagattaaaaaaaaaacaatggaaattatcctgggagttgggggaaggttggggagatgctggtcaaaacaatgcaaaatggcagttaaataggaggaataccttccagaatctactgtactacatggtgactgtagttaatgacgatgtattcttgaaaatygctaagagaggcggggcgcggtggctcacgcctgtaatctcaacactttgggcggcggaggcgggtggatcttgaggtcaggagtttgaggccagcctggccaatatggtgaaacccccatctgtactaaaaatacaaaaattagccgggcgtggtggcatatgcctgtagtcccagctactcgggaagctgagacaggaaaatcgcttgaacccgggaggcggaggttgcagtgagccaagatcgtgccactgcactccagcctgggtgacagagcaagactctgtctcaaaaaaaaagaaaagaaaattggtaagagcgtagattataggtgttcttaccacagaaaataagcatgtgaggtggtgtatatattggtttgcattagccattgcacagtgtgtacatatttcaaaacatcatgctgtatacaataaatatatgaattttttttttagatggagtctggctctgttgcccaggctggagtgcagtagtacaaatctcagctcactgcaacctccgcctcccgggttcaagcaattctcctgcctcagcctcctgagtagctgggattataggcatrygccaccaygcccggctaatttttgtatttttagtasagatggggtttcaccatgttggtcaggctagtctcggactcctgacctcgtaatccgcccatgtcggcctcccaaagtgctgggattacaggcgtgagccaccacacctggccctgaatttttatttttaattaaaaattaatttttaaaaagaaatgcgaattctcagcccttctctaacatactgaatcagaaactgtaagggagagtcccagtcatctgtgttttgatcaaataactagtgtaaatgcctttgtgcctgtctgggctgtactgctcatacatacacacatgatctacattctcacagaaagggactgtgaggacatgggacaggaggggctcaggcaggcaggaggcatcccagccagcctcagmgaggccttcargctccagctgattaccccctcctcacctccttcactcccacttgtgaacagacagcatttgcatcatgatgctggagaagagagggccacactgggatttccaccgggagattccagcttctcccccatcccccatttttgtagtcaaactctccatcactctccacttccagggggcgacgcttcagagactgacaacctctgggctgatggggaagatggagtatccttcatacaccccagcagcgagctcttcctgcagcctctggcaggtattggccccaaccccacctctgagcctggcctggacttcttccgcagtccctgagcccactcctgcactgcactgaagagccacctgcactgtgaataaccttgcatagcacaggattcttgcatagcatagggtcatttgaaaartgggctgtcatcatgccattgcactccagcctgggcgacaagagcaaaactctgtcttaaaaaaaaggaaagtgggctgccagtcgtgctggatggcaatgcagggcatgctgcgtgcttttcaagtacccccttgctatgaattcgcttcaaatacctgggagtgtgcaggcttgacagaagtcccccagcttctctcaccacccttgtaagcttggtgctgctctttgctctaaagtcctgggctagaattaaccatgtggctggaaaaggcatgtatttatttatttatttatttatttatttatttatttatttttatttttgagacagagtctcgctctgtcacccaggctggagtgcagtggtgcgatcttgggtcactgcaacctccgcctcccgggttcaagtgattctgcagcctcagtcgctggagtagctgggattgcaggcgtgcgccaccacacccggctaatttkgtatttttagtagaggcggggttggccaggctggtcttgaacttctgacctccggtgatccgctcaccacggcctcccaaagtgcaatgattataggcgtgtgccactgtacccagccaaaggcatgtatttactatatcccagccctaccacaccatatcatatcagttcttttactcacagtcaccgagaaccacggagaggtagagatccgaaggcacctcaactgcagtcactgccctttgagagactgccaatggcaggcagagctccagctggctgaatgcctgtgcccagaaggcatggagctagctgtggataacgtcacctgcatgggtatgtcctacctttgcccaaggtctggactcctggggtcacagactgggaggagcagtaggccactgggaaagatggtatagagatttgctgtgtgccaggccctgtggtgggtgctgggcaggggattggagattcatcggtgcacagtgcctttcagaggcctgtcgtccagtgtgggaggatgtttagatatagctatgtaaatgtatatctcaagtgacgattgttgtgggaggtataaagtgctttaggggtgttcaagagggagaggttgcttttgcccaggataatgggggaaggcatcatggaaaaattaacacttgagctgagtcttgaagcgtgggtaaaacttgagggtaaaggaacagagaagaccttcccactggaggtgtctctctttctccctagacctgcayaagcccccaggccctctggttctgatggtggctgtggtggcaacctcaacactgagcctccttatggtgtgtggggtcctgattctgggtacgaagcgtctagcaggcacagttgattcaaggctgctcctctccartgagctgggatgggtttctgcggggtcccggggctgacttcaagaccactcaccgcagcagagccgtggtagactcctctgggattctaagataggaaggagctggggaggcctggggaaaacgtttaccttaatgagcatctggaggggtgtcctgggcaggtgggggagggagagttgatgggcaggtggagggtgtgccgttattcttcccacccccagtgaagcagaagaagtggcagggcctgcaggagatgaggctgccgagccctgagcttgagctgagcaagcttcgaacctctgccatcaggacagcccccaatccctattattgccaggtggggcttggcccggcccagtcctggcctctgccaccaggtgtcaccgaggtttccccagccaatgttactctgctcaggtaagtcttctgcctccttctgagaacctatgcactctgaatccccacctctgattctctccctgctgtagtgaattataagtcccagaaaaaatctggcccacatcccttgtgtaagggagagggaggccctgagaagctccagaaggggaagtaacttgctcaatgtcacctctccgtcccagttcttagaatatgatctctcagctgggcrtggtggctcacacctgtaatcccagaactttgggaggtcgaggcaggcaggtcacctgaggtcgggagttcgagaccagcctgaccaacatggagaaaccccatctctactaaaaatacaaaattagctgggcatggtggcgcatgcctgtaatcccagctacgtgggaggctgaggcagaagaatcacttgaacctgggaggcggaggttgtggtgagccgagattgcgccattgcactccagccagggcgacagagtgagactctgtctcaataaaaaaaraatatgatctggcgcctgtaatctcagcactttsggaggccaaggcaggtggatcacctgaggtcaggggttcgagaccagcctggccaacatggtgaaaccctgtgtctactaaaaacacaaaaaatagctgggcgttgtggcgcttgcctgtagtcccagctactcgggagactgaggcrggagaatcacttgaacccgagaggcagaggttgcagtgagccgagatcgcgctattgcactccagcctgcatgacagagtgagacttcgtttaaaaaagaaaaaaaatcatgactcttggagcccaggrattgcctcccgcccagggcgtctgcagggaccagggaagtcctcatcatgcactcccaccttgactctggcccgcatctgccctcttttttgccctggctctatgccagtgagcaccacccttgcagggcttctacctggggacatgccatggtatggagagagtctatatagggtcagctgggcatatggcaggggcaggggaggtaaagggggtactagactctctaggactcttctccaggccgcctgcccactcccttccaacrtgtcttcctgcagagccctgggccatggtgcctttggggaggtgtatgagggactggtaattggccttcctgggractccagtcccctgcaggtagctatcaaggtgagaggagtgggacttctggctgggggtaggagagcggaacaccctgaagggaaggacaatgactagagctagggttaaccccctctcctgaagcgtgcagggcagctcagaaactgtgcccttttcctccccagaccctgccagaactctgctcgcctcaggatgagctggatttcctcatggaggccctcatcatcaggtgcacctgggaccaggggcagggctggaaggcgggaggggaatgcccgggaacagtttctcttcaccctgaggctgaggtagcaagtcaggggacacagagggcctctccagctttgtggagcctaaaacatggtttccgtctccctcctggtaacgggatatgtcccccaccycactcagcaagtttcgccatcagaacattgtgcggtgtgtggggctcagcctcagggccacccctcgcctcattctgctggaactgatgtctggaggggacatgaagagtttcctgaggcacagtcggccacacctggtgagacccttgtcttagccccccccaggcccctctaaagaccctgtccatgtgtctgagacctacatggactgatgccccctctgcctgacccagggccagccatcacctctggtcatgcgggacctgctgcaactggcccaggacatagcccagggctgccactacctggaggaaaatcacttcatccacaggttaggagcagtcctggctcaggggacccccatcccaactccctccccaaggaacagcccttccacacagcttttaaggaaatagatcaggaagagcaagaacttctagrttctggcagtgattttttttgcctactctgtagggatattgccgcccggaactgcctgctgagctgcgctggacccagccgagtggccaagattggggactttgggatggcacgagatatctaccggtgcgggacttgggaggtgggaaggctcttgctccaagggggttttccccgcaccttggtggtgaacaactcatcattcacctcctccctcctgtagggccagttattaccgcaggggggaccgggccttgctcccagtcaagtggatgcccccagaggccttcctggagggcatcttcacatccaagacagattcctrgtgataacacccttcccctccccttccccactgttcccctcccctgaggctaatcctgtcctttccagcmacctcatgtgaggggaggctacacctgacgggcctcacttggttcccccacttgtgatgcaggtcttttggggtgctgctctgggagatcttctcactgggctacatgccctatcctgggcgcaccaaccaggaggtgctggacttcgtcgttggaggaggccggatggaccctcctaggggctgcccagggcctgtgtgagttgagtgctgcccgggaagggaggtccttcacaaccatgggtgggcatgaactcctgcctctccccaggtaccgcatcatgacccagtgttggcagcacgagcctgagctccgccctagctttgccagcatcttggagcgtctgcagtactgcactcaggtgtgcccccgacctaatctaacatcctggtcttgtgggtcwggagggagggccagaaaactctatgcccccctgctccctgactcttccattacaggacccggatgtgctgaattcactcctgccaatggagctggggcccaccccagaggaggaagggacttctgggctggggaacagatctttggagtgcctaagacccccacagccccaggaactgagtccagagaagttgaaaagctggggaggtagccctcttggcccctggctgtcctctggcctcaagcccctcaaatccaggggcctccaacctcagaacctttggaatcccacttatcgctcctgagccccaaggggccctgagggtaaggactgaggcactgagggtccctccctatactcctcaggctcctgggtggcctgttatgccagcggcctctgttccctgcagtctgtgctgtgtgtctgggcctgtctcggggctggcctggcagcgctgcacttgccatgctggaaaccagcccaggcctcccagggaagggcccagccacttccagcttttgatcttggggccagaggccgccttacacacaccccaggtgtccatggggagcactggattgctctcccattatgagcrtccttcatctgggcagaccccccaccctgcagatgcttctaataaaaagctcttctcatcctccagcgatctgtggatgccagggaccggaactgaggaagagggggccggaggagggaggggctgaggcctgaggcacaggaagctgcatcttgtctttgagttttattaggaaggggagtccgtcgtggtgtgagacgttagaccggaaggtctgggcttgctaaataaaatccgcggtctggcacctctggagagggcagagcctcctcagaagagctggcctgaggaagaagccctttgccccctccccttctataagttagtgtcatttggctctgggaacgctggggcccgggtgggcaaaacccctggcatcggcggtgcccccccttagtggctggcacctggtcctgcaggacccggtgaactgccctgcaccgcggggctccagtctcaagccggcatgcacagtggggacaaagctgcaggtccacatgtcaggtgagcggcccgcggggacaggagtccagcctcatctctcagccaggctggccaggatgccaatgagattgtccagccccagcaaatagccgtcctcgcggttgccctcctcccagggccgccggtggtccaggatctggccatcggggaggggcgtggtcttgccgaagtcgatgagccacacgccggcgcgatggcagtgatcgtgcacaaagaggagcgagctgccgatcacctgcgagccccgcaccgtcaggccgcggccctgcccagagacgcccttgccgggttcccgccctagccctcgcggcccgggcacccgggcagccgccgcttacctcgtgcctcctgaagaactcggatacctccagggtgtcccggatctgctgcaggcggttcagataccgcctctgcagagggtggggtgggagaggagggcaaattaactaaacgccaaatgagcccctgctaacgatgaggagccgggacccacgctgtgcttggcaaatgccgccaggaggaggacccagggccccgcccagcgtggcccagaagggaaggagcgtagagcagttgcgagccagcgcggtgagggccatggtggggacacagccgagggcactgggccagatgacaggggcagtcctcggcttcaggctccccaacacctcagggtttgggatcccgctctcaccagcacttcctcatctccttgcacaaactcttcaaagacgcgaagcacctgctctcggcttcgcgtagtcttgaagtcggtgctgcaggagccgtccgctttctggatgtgggacaggagtgtcaggggccccgggcccgccagtggggaagaggacagcgtagagcagcggtacctcccagttgcaggggacggcgaggcggtgggagagggcggaggggcaggcggggcgggagcgggggatcggraaagacagcgcgcagtggggctgcggcggtgccagcgaagcgcgcctgcctcaccttgatgccctcgatgcggaagccgagggtggtgctggagctgatgccttcccgccactgcatgtagcgcggcttggtgacggcgcgctgcgcgtgctcctcctccgtgggagcttcaggatccaccgccagcattttcttgtacatgtccttccgcagcttgggccgctcacgggccttggtcagctcctcctctaggtaagtcctgtgggggcgcaggcagcggccagggcatgagggggcgcacacggagaccccttcgagcactcgccccgggtccccctcaagcagctgtcccggccccggacccctacttgatccccccaaccgacctggcagggcacgcatacctgacgcccattttgcagtcgagcacacaaggtccgtcgaagccatcgagcaggtcctgcagctgcaggtagctttcgccgtcgcgctccaccacgccgtggaaggcaggcacgcagccgcgcagcgcgtcagccatcagccgcgccaggcagtagcgctccggctccgagcagcgcttcaggatcagcccgctggtgcccgccgccttaaaactccctgaggaccggcatccgtcagcgccgcccagccccttcccgtcgcgggcacccgcccacccgccccactgctcaccagtgtgccctgccagctgcacccaggcgtagcgcttcttgaaagggcttatgaccggcagattgaccatggtccggatcttctgccagtggtttttctgaaagcgacagggtcaaggtctgataatcggcgtctcggcaatgcataagccctccctccactgaaacagggtctcgccacgcccccgacccaccggaagcagctggggctggatgagtcattaattcattcattcactctgggaaggtttatttgtgcgcctgwgtggcgggtgctgatacaggcgcagtgaaggtgattccagcgtctccagtgagctgtcaagagcctggacttagcatctgaagcccccggtttgcgctccagctctgccactgaagaacgcgtgggcaggttacgaaaatgctctgtcgaggtttttgaactgttgtgaacatcggaattacctgatggtcacccttgttaaaaattgcagattatcaggcctaccgcagggatgttctaagttggtctagagtagggccatttttttttttttttttttttttttcagatggagtcttgctctgtcacccaggctggagtgcagtggcgcgatctggcctcactgcaacctctacctcccgggttcaggcggttctcttgtttcagcctcccgagtagctgagactacaggtgcacaccactatgcccggctaattttttgtatttttagtagagacagggtttcaccatattggtcaggctggtctccaactcctgatctcaggtgttccacccacctcagcctcccaaactgctgggattacaggtgtgagccaccaggcccggccccccaaatttttattactaccaatgcctcaaaagattccagggcccaagaaacaagcctctgtgcatctgtaagaaaaagatctataaaatgaggaaataactatccttactgggttgctgtgagtagtacataaggcttaagcatgataggcgcccagctcccccatcccattccatggtatgaggcagaagctgaacaaatctcaatcactgattccttcactcaggaccttggttcctctcatttagggagacagacatacacagaaacaaacctgtacacaggcccagggcaggaaggccagcctggcagggcctggagaaagaacagggctggagaaagaaaaggctctccaagcctcycttgctatccctggattctatgcactcattagctggcaaggcccagggcacccttggtttttatctggacctagaaatcttaagccatgaaaataagatgccgggctgggcgaggtggctcatgcctgtaatcccagcactttgggagactgaggtgggcggatcacaaggtcaagagatcaagaccatcctagccaacatggtgaaaccccgtctctactaaaaatacaaaaattagccggacatggtggcatgcrcctgtggtcccagctacttgggaggctgaggcaggagaatcgcttgaatctgggaggtggaggttgcagtgagctgtgatcgagccactgcactctagcctggcagcagagtgagactccgtctcaaaaaaaagaaaaagaaagaaaataaggtgcaaacctgagggcctgtcaacttagacaaacctgggaaggagacgagggttgttttttgttttttgttttttgtttttgtttttttggtgtgccccttatctcttctagcctccagctaatcttgagagcatcccatcctctggacctctcctcttaccacccgcaactyggcagccctgtgtcctctctgaagtacacaggttggctcatgtcaactgtgtctgccgcctccccacagaggcacttgccttttagcacagttacacatgttgtacccccagaggaatacacctccctgacaagagggagttctaagagggagagagagaactgaggaggtggcctaagtagaagagggctgctgaccataaagccctttcccatggggaggagatggaagttatggtagagcactgggtgggaagtcagtagttggttccagtcatggctgtgtcaccttccagctgagtgaacccaaccaagtactgccatctgtgtgggcctgtttcccctgggaggacatagctgctgccgtaacacgaaccatcaaatgctacctgcctattgcatgtcaggcactttctcatcttccatcaggcagcattgctcccactttcctactgaagcccttacatggcacactagggtgtgatcacgtgcccaatccccagggatctgggggtgtagccagaagcagcccactagaagcatgacatcactttcaaaactccttttaaaatctttaaatacacaccaggtttgcattctgctgcataataaatccaagttttattataaaactcaccacctccaaaccctcaagtaaaattccaggaagatgatgtatgtgccatgtatattcagcagcaccatcctgtacccccttctcccacactcagtttgagagccataatgaatgcacatgcatagcaagtgcgtgaagtggtatcattcccattttacagaaggaaatcaaggggagttacatcccctcatgccctgcctccagcctcccaatctctggctgaagctatcagcccatcctccctccccaagttccaactgccccagcaggttccaaagtatccccagcaggatgctaccatcctgcctccctttgggggttaaatgggatgtggcctgagaaagtgctttgtgcrtggtgaagtgatgtgcagcaataaggcagtctgagttttgacttctggggaacactgagacctgcctgggggcccttctctactggatggccacctttgcctttatccaaaagaatgagtttaatggctgtagggacctgctagaagaatttaggggatagtgggaccagaatggacttagtgaagaggaaacttgccttgggttaggcagggtgagggaactgaaccatccttttagaactgtgcagaaacagtgaggagggctggcaggtgggcctggcagaagaggatttgatgtgtgtctaaaaacctgggctactaccatttgattgatggacctgctcccaagcaggggtaaaatggtgtcatcacctactctcttgaccttggttttctgcatctcataagaatcaagagcagcagcaactaaggccagtcctagctagcaggttacaaaatactttttttttttttttttttttgagacaaggtctcactcccattgtccaggctggagtccagtggtrcgatcacagctaactgcatcctggacttccagggttcaggtgatcctcccacctcagcctccagagtagctgggactacagatgtgagtcaccatgcctggttgattttttgtatttttgtatgtatgtatgtacatatttatttgagtggtgcgatctcggctcactgctacctctgtcttccaggtttgagcgattctcctgcctcagtctcctgagtagctgggattataggcgtgcaccaccaacgcctggctaatttttatatttttagtagagacggggtttcatcatgttggccaggctggtctcaaactcctggcctcaagtgatctacctgccatggcctcctaaagtgctgggattgcaagtgtgagccaccgtgacattttttttgtatttttagtagagacaggattttgctatgttgcccaggctggcctcgaactccggggttcaagtgatcctcccgccttggactcccaaagtgctgggattacaagtgtgagccactgctcccagcctacaaaagattttcatacctattatctcatctgagtcctccgtcctaccacctgaggttgctatgacaggatttagcccccctgccagtaatgggtatggc

SEQ ID NO: 1652 - DNA, 39104 bp, Homo sapiens
cccagattcaagggatcctcctgcctcggccttccaagtagctgggttacagacacgtgccaccactggctaatttttttgtgtttttagtggagacaaggtttcagcatgttggccaggctgatctcaaattcctgacctcaggtgatccaccagtcttggcctcccaaagtgttgggattacacacatgagccaccatgccaggcctccaactgaggggcattctacaaaacaccctaccagtattactccaagctgtaaaagtcatcaaaaatataaaaagtctatgaaattgttatagccaagaggcgcctaaggggacttgacaactaaatgtaatgtaggtctggcacagtggctcacaccagtaatcccaacastttggtaggccgagatgggaggatcccttgaggctgggagttcaagaccagcctgggcaagatggcaggactctgtctctacgaaaataaaaataaaaaattagccaagcctgatggcacacacctgtggttccagctacttgggtggctaaggtaggaggatagcttgagcccaggaggttgaagctgtggtaaactgtgattgtgccactgcactccagcctgggcaacagaggagaccctgtctcaaaaataaataaaggcccagcatgatggctcatgcctgcaatcctagcactttgggagcccaaggctggcagatcacttgaggtcaggagttcgaaaccagcctggccaacatggtgaaacgctgtctctacaaaaaatacaaaaattaacaggacatggtgatgggtgcctgtaatctcagctacacaggagactgaggcacgagaatctcttgaacctggaaggtggaggttgcagtgagctgagattgcgccactccattccagcctaggcgacagagcgagactctgtctcaaaaaatacatacatacataaatacatacataaaaataaatgtaatgtggtatctttgatgtgatcctagaaaagaaacaatggccgggcgcagtggctcacgcctgtaatcccagcactttgggaggccgaggcgggtggatcacgaggtcaggagattgagaccatctggctaacacrgtgaaaccccgtctctactaaaaatacaaaaaaattagctggacatggtggcgggcgcctgtagtcccagctactcggaggctgaggcaggagaatggcgtgaacccgggaggcggagcttgcagtgagccgagatcacgccactgcactmcagactgggcgacaaagtgaaaaaaaaaattattcttttgccaggtgcagtggctcactcctgtgatcccagcactttgggaggctgaggcaggcggatcacctgaggtcaggagtttgagaccatcctggacaacatggcgaaaccccgtgtctactaaaagtacaaaaattagctaggcgtggtggtgggcacctgtaatccctgctacttaggaagctaaggcaggcgaatagcttgaacccgggaggtggaggttgcagtgagctgagattgcaccaytgcactccagcctgggcgacatgagcgagactccgtctcaaaaaaaaaaaaattmtttttagcgacaaagtctcattctgtcactgaggctggggtgcagttgtgcaaacagcttgctgcagcctcacattcctgggatcaagctattcccccgccgctgcatcgctaggactataggtgccaccacacccagctaattaaaaaaaattttttttatagaacagggtcttcctacgttgcccgggctggtcttgaattcctggccacaagcaatactcctgcctcagcctaccaaagtgctgagattataagcatgagccaccacacccagtctttgaaacaaaaaaacatagtcttacccaataaaaatttcataaatcctcgctgggtgtggtggcatgcacctgtggtcccagctacttgggaggctgaggtgggaggatcacttgagcctaggaggtcraggctgcagtgagtcatgacagcaccactgcactccagcctcggtgacaaagcaagaccctatctcaaaaaaaaaaaaaagtaaatccttaatatcatacaaaatctagtttatatttagtattccctaacagtctcaaaaaaacagtttcaaaaatgaagatataaacaaagaccgcatttcatatgttatagtctctgcccagtgcagtggcttacacytgtaatcccagcattttgggaggctgaggtgggcaaatcacctgaggtcaggagtttgagaccagcctgaccaacatggtgaaaccctgtctctactaaaaatacaaaaattggctggacgcagtggctcacgcctgtaatcccagcactttgggaggccgaggtgggtagaacacctgaagtcaggagtatgagaccagcctggtcaacatggtgaattgaaaccttgtctctactcaaaatacaaaaattagccgggcatggtggcatgtgcctgtaaccccagctacctgggaggctgaggcaagataatcacttgaacccaggaggcagagtttgcagtgagccgagatcacaccattgccctgcagcttggcaacaagagcgaaactccgtctcaaaaaaaaaagaaaaaagttagccaggtatggtggcacacgcctgtaatcacagctacttaggaggctgaggcaggagaaccacttgaacccaggaggcggaggctgcagtgagccgagatcatgccactgcactccagcctgggcaacagagcaagactccatctcaacaacataaaataaaataaataataaataaatagtctcggctggtgcagtgactcatgcctgtaattccagcattttgggaggctgcggcgggtgagtcactagagcccaggagtttgacaccagactaggtgacatggcaaaaccctgtcactacaaaaaataaaagaattagccacgtttggttcaggcctgtgatcccagctattcaggaggttgaggcaggagaatcgcttgagctcagcaagcagagggaagcagaggttgcagtgagctgaggttgcaccactgcactccagcctgggcaacagagcaagaccctatctcaaaacagtagaaaagattcatcagtaagttcatataatggcaacctgatccatccatataaagtctgcatcaacctttcacctagttgttaaacaatgactgttaaaactattaggtcaaaggttgatgaagactttatatgaggctgggtgtgttttccaaccttagcaggcaccaaaattaagtggaaggcttgttaaaacagaatgctggagctggggatggtggcttatgcctatartcccagcatttgggaggccagatcacctgaggtcaggagttcgtgaccaacctggccaacatggtccaaccgtgtccctactaaaaatacaaaacttagctgggcgtggtggcaccattgccaggagccattatctcgttatttcattgcgaacaattattttctactatcattcattctgcatatttggctccagttcctctcccycatcccgctgcctccataacttctgaccaggtctagtactattttggacctcaagatgactaaatcctagtagccgaaatttacatctgtagttgaagccaagaggattatagatctgctatagtgcgggaccagcagcatcacctagaaacttggtagaaatacaaattytggrgctctattagaaacctactgaatcggctgggcacggtggctcacgcctgtaatcccagcactttgggaggccaaggcgggcagatcacgaggtcaggagatggagaccatcctggctaacacggtgaaaccctgtctctactaaaaatacaaaaaagtagcccggcatggtgacaggtgcctgtagtcccagctactcaggaggctgaggcaggagaatggtgtgaacccgggaggtgcaggttgcagtgagctgagactgcgccagtrcactccagcctgggcgacagagcgagactctgtcacaaaaaaaaaggaaacctactgaaacaggccaggtgcagtagctcatgcctgtaatcccagcactttaggaagctgacgtaggtggatcacctgaggtcaggagctcgagaccagcctggccaacatggtgaaaccccgtctctactaaaaatacaaaaattagctgggcatggtggcgggcgcctgtaatcccagctactcgggaggctgaggcaggagaatcacttgaacccaggaggaggttgcagtgtgccgagatcatgctattgcactccagcctgggcgacaagagcaagactccgtcttaaaaaaaaaaaaagaaagaaaaagaaaaacctactgaatcagaaactcagaggttgaggcccagcaatctgtttcgttttgtttgaaacagagtctggctctgtggcccaatmtggagtgcagtggttccatcttggctcactgcaacctcygcttcccaggttcaagtgattctcctggctcagcctcttgagtagctgggactacagatggacaccaccatgccctgctaatttttatatttttagtagagatggggtttcaccatgttggtcaggctggtctcgaactcctgacctyaggtgatctgccagcttcagcctcccaaagtactgggattataggcatgtgccactgtgcctggccccagcaatctggtttaacaagacttccagttgattctggtgcctgttaaagttggaaagccactggactaacattggctgccccatgatgtcctttggtctagaaatgatttacttaaggtcctactatgtgcatggcaacacgttgggtgctcagtatttagatgcaaagtacaaggtctggtgcccacaaggaactgacagtctattcaagggaacaggacataagcctgtgaaaaggtaaccggtgacagttggtagttggcagtgtgttcttagcataccacacaactggtgcaggcggtgagattccaggtgaatccaaggaaagtttggtgagtaggcgtggctggcagaggttttagagttgacgccagctaggccttaaagagttatcctttggagacaggggtggcagggaaaagagggaggatttccaagaagggagagtgggatgaacaaaggcaagattctggagaagatgataaccttgctagcaaggaagctttattccctctcttctcaccaccamtatttctgcagtgcacactggcagtgttctttccttgggcctttttcatggttaccttctagctcttccataaacacattcgtcacgttggggtgtgtgtgtgtgtccacgtttctgtgtgctgccgtgggcgtgggtgctgggatgtgggatgtggtaacactggctggtgagtgcagagggacgtctgaggaacgctgtgtccctgccaggggtgtcgtaagtgcagaaggggctgtgcctgctgtacatcagaagcatgtgtgggccaggcgcggtggcacatcctgtaatcacagcactttggggggccgaggcgggcggattacctaaggtcgggagttcgagaccagcttggccaacatggtgaaaccccgtctctactaaaaatacaaaaattagccagacgtggtggcgggcacctgtaatcccagctactcgggaggctgaggcacaagaatcgcttgagcccgggaggcggaggttgcagtgagccgagattgcgccacagcactccagccwgtgcgacagagcaagactctgtctcaaaaaaaaaaaaaaaaaaaaggatgtgtgttctgggtgatggtatagagcttacgtgggggtaataaaccgccagccgcgcagcaccgcgctcaccagtcsgctgcactgaacaagcaaagcccagaatgctccgagataagaccgggagaggcggggctgggctgcggggcggaagctggaatctggcggcggcggaaacgcgatctctgcggggcaagatggcggcgcccagacaggcctggagcacgtaggtggcggggctggagggacggatttcaggtgatctgggaggaggacccagggtagcgtgtccagtttctttgctggaacctgcctgcgggcctttggtctgtaagggagcaactgtggcctcctctgtgcatagatctcgggcacggcccttcaacgggcggcgaargctgcgactcgrtgattcctcattgtagagttgggtggtccaggaggcttaactggagcccttracctgagcggtaagggcagtcacgcgtcccgactcgggattggatcctggctctggaggataggctgcaatgtaagagccccagagactcctcagaggccaacataaacccagaggtccattgttaggactacttttttttacgagttactctttaggcattactctttaggattacaggcgtgagccaccgcgcccggccaacccattcttattctattaataactgaaaatgttatcacttctagcactgattggttctggacaaatctgcgctggatttgtggggaaacacactggtggctttacttaggactaaaataattgttactgaggtttatttatataagtaacaggcactgggctaggcgttttgcgtgtatagtcatttaaatcctcacacatttcctattatataggacctgttactcacattttacagttgtggaaatgggayttaagacagcatagaggccgcgcacggtggctcacgcctgtaatcccagcactttgggaggccgaggcgggcgggtcacctgagatcaggagttcgagaccagtctggccaacatggtgaaaccccgtctgtactaaaaaaatacaaaaaattagccgggcgtggtggcaggcgcctgtaatcccagctactcgggagcctgaggcaggagaatcacttgaacccaggaggyggaggttgcagtgtgccgagatcgtgctattgcactccagcctgggcaacaagagggagaatctgtctcaaaaaaaaaaaaaaaaaaaaaaaggacagcattgataatttgcctaatttcgcacatttagtgcatttagtaagtagcggaactggtatttgacttctggcctattgattccaaaactggtgcccataaccccctggctctctttgtgatgtaggtatggcgcaccctatgaagtgagctggactttgcttttggatcacatgaatccatggataagtaggaattgtttctgcttatgtagactcttataggagtgaattgttaccatactatggattctcagttcatctagttcagccttccttagggcctttgggtaggcattggggtaggagactttttccttgtttgttggtcagactgcccaacaattagatatggttatctgccctttggctatataaataataagaatcataactggcgtttgtgtcctttcatgtatgagactctgttctaatcttcttacatatatataattaattcaggaggtaggtacagttatcttcatgttacagatgaggaaacaagcacagtaacttcagtaaaataccttgcttaagcttacacagttagtaaatggcagagcctggatttgaacacaggcagtccattttcatactgtttacctcccatccaggaaaaggcacatctgtatacttcgctgttgtcatgctacaaatagtaattaatacaagttctatgccaaatttaagatgaaattttgtagacaggtctttgctcacttcatccacttccttcagttctctacttatctaagttttctctttcaatattgacctctatttttaacctttagggatttttcccacctctgaaatcgtgtagcactgatcttctatgcaattaatttcatcactgggatgtactgccttgtaaatttatatgtgtgtttaccatattctctcaccccaactttgggtacatcattgaccaaaggaagacctttacaatcttggagacatcatttaaactgtaaacctttggaatttctagrcttgtgtgggcaaagagagataatgaagtgggaaattattaaaagacccagcatttcggcatggtctctgtctccccagtaagccccttgaacccagggactggattttactcccatttctttatatttacagccccytgtacaccgctcagcccagagtaaactctcaaaaaattttttgataatgttcttaaggtcacaccgtcatgtgattgtttcaccatttctacccctttagcctgcccccaacccctgtgttgggaggtgtttccaaggctggcttagttattagatctgatcctgcttagaagtagatgaagaaaaagtaaggaaatgtgtcattcagcactttttttttgagacagagtctcatgctctgtcccccaggctggagtgcagtggcacgatcttggctcattgcaacctccacttcccgggttcacgccattctcctgcctcagcctccccagtagctgggactacaggcgcgtgctaccacacccagctaattttttgtatttttagtagagacggcatttcaccgtgttagccaggatggtctcgatcttctgacctcgtgatctgcctgccttggcctcccaaagtgctgggattacaggcgtgagccagcacrcccggccttcattcagcactattgttagttccagctatctagcttgtctacctctccatctcatcctccttcaacttttaggaggtggtcaacttcatcatgttctcccatgtaccatatttattccctgcttttttttttttttttttcaagatggagtctagctctgtcacccaagctggagggcagtggtgtaatcttggctcactgcaacctccacctcctgggttcaaaccgttctcctgcctcagcctcccaagtagctgggagtacaggcacatgccaccacgcctgcctaatttttttgtatttttagtagagatggggtttcaccatgttggccaagctggtcttgaactcctgacctcagatgatccacccacctcagcctcaaagtgctgggattacaggtgtgagccactgcgccyggccctattccctgcttctatacctttgcccagctctcccttctggctggaggcctatcttatccttcaaggtctggttcagtggttttcaactgggggtgatttttttctgasgtgacatttggcaatgtctgsagacatttttacttgtcacaactaggggaggaggtttgatgatgacgtctagtgggtaaaagccaggaatgccgctaaacatcctacagtgcgcaggacagcttcccacagcaaagaattacccagctataaagatcaatagtccctattgagaaaccttagtgtagttgcagcctttgctcttcaggagattctttatagttcttccccatctgcctcactattccagacttccaggacacccaggcaccacacagcagtaggcagtagaacatagtgggtaagagcatggactgactgggattgaatcctaatcctagcacacacttacactgagaccttgagcaaatacttaacttctcagcactattcttttctcagctgtaaaatttgaataatagtagtaactggcccgttgcagtggctcacgcctgtaatcccagcactttgggaggcagaggcgggcagatcacctgaggtcgggagttygagaccagcctgaccaacatggagaaacccagtctctactaaaaatacaaaattagctgggcgtggtggcacatgcctataatcccagctactagggagactgaggcaggagaatcgcttgaacctgggaggcggaggttgcagtgagccgagatcgtgccattgcactccagcctgggcaacaagagtgaaactccatctcaaaaaaaaaaaaaaatagtagtaacctacctcctaggctgttatgaggattaaatgaatgaatatggaaaaagtgcttagagaacagtatgtggtgcatactaagtgctcaataagtgttagatataacaatatttttattattatcagcatctagctcaggggttccaaaactagccagccagcttgcagatatctttggccagcccagcgttttttgttttataattgatttatagtttatataccacagaagtcatcattttattttattattattatttttttgagacggagtctcactctgtcgcccaggctggagtgcagtggtacgatcttggctcactgcagcctccgcctcccaggttcaagtgattcttctgcctcagcctcctgagtagctaggattacaggcacctgccaccacacccggctaattttttttgtatttttagtagagacttcaccatgttggtcaggctggtttgaactcctgacctcgtgagccacctgtctcagcctcccaaagtgctgggattactgatgtgagccaccgagcctggccagaattcatcattttaaaagtttacaggccaggtgcagtagctcaggcctgtaatcccagtactttgggagcccaaggtgggcagatttcttgagcccaggagatcgagaccagcctgtacaacatggtgaaatcctgtctctgtaaaaaacacaaaaattgtggggcacggtggctcacrcctgtaatcccagcactttgggaggccaaggcaggtggatcatgaggtcaggagttcgagatcagcctgaccaacatggtgaaaccctgtctctactgaaaaactacaaaaaattagccaggcatggtggtgggcgcctgtaatcccagctactcaggaggctgaggcaggagaatcacttgaacctaggagtcagaggttgcagtgagccgagatcgcgccattgcacgccagcctgggcaacaagagcaaaactccgtctcaaaaaacaaaaaacaaaaaacaaaaaaaaaaacaaaaattagctgagtgtggtggtgcatctgtagtcctagctttttgggagactgaggtgggaggacggcttaagcccaggaggtagaggttgcagtgagcyaagatcacgctactgcactccakcctgggtgacagagccagactctgtcacaataaattaataaagtttacaattcatggcttttagtatattcacaaggttgaacattttcattactccaaaaagacgctccatacccattagctgtcaattcccatttccctccagctctcctagcccctggcaactactaatctactttctgtctctatggatttgcctattttggacattccatatgaacagaatcatacaatatgaggtcctttttggctagcttctttctttcttttcactaaataaaatgtttctgagtcatatagcttctttcacttagtataatgttttcaatgtttgtgcattggaacttcattcctttttgttgacaaataaatgtaaggtctctatgttaatttcttttttgcctttgtgccatggttacgtaaagtcttaacctttggagaaactgggtgaagactacatatggaaactgttcatactatctatataaatctgtaaatctaacattataacaaatcacaagtttaaaaagtacataaatttacagtatatagagaaaaatagaaatatgcatattttatcatgatacaaaacatttgattgctgacctgtttgttgattttttttatgttttttctttccttttttatcctctaagcctctgatcacttatcattgtcaaggttgagcagacagakaagtgcatacattctgcagcttgagtgcctaacttgagattctgtttctgacatttactgtggatttggggcaattaaattaactttctgtgtcaagtgggaggatcacccaagcccaggagtttgaggctgtagtaagctatgatagcagactgcactccaacctaggtgacagagtgagatcctgtctgttttttgttttgttttgttttgtttttttgacagagtctcactctgtcgcccaagctggagtgcagtggctccatctcagatcactgcaagctccgcctcccgggttcacgccattctcctgcctcagcctcccgagtagctgggaatacaggtgcccgccaccacgcccggctagttttytatatttttagtagagacggggtttcaccgtgttarccaggatggtcttgatctcctgacctcataatccacacgccttggcctcccaaagtgctgggattacaggcgtgagccaccgcatccggccaatgcaattgttttcttaattccattttctgcatgttctttgctagtgcatagacatacaatttttttttttttttttgagacggagttttactcttgttgcccaggctggagtgcaatggtgcaatctcggctcacagcaacctccatctcccaggttcaagcgattctcctgtctcagcctcccaggtagctgggattacaggcgcccaccacaatgcccagctaattttttgtatttttagtagagatggggtttcaccatgttggccaggctggtcttgaactcctggcctcaggtgacccaccctcctcggccttacaaaatgctgggattacgggcgtgagccactgcgcctggccacaaatgttttttatattgatattttacagcccaaggtttttaataatttacatacctttaggccaagcatgttctctccagtttgatacagaatcatcacccccccattatgacaacatttatctgctcggcccctgatgacattttcctcaggtctcctgctggttgttcctgagagttttatcacctatagattgtaaacaacctaagttggctataaatattgttgctaggctgatgacatcasggagggctgaagacagagggaatggcagtaaggtatgaatgaggaggaatgagttcatgttaacccaaggataaagaagatcttcgctgttgcccaataaagagaatcagggttcagttgcagagggcccatattctttcttgctcttagggatgaataagagggaacccccacayggagacactgctggagagagtcgtactggggaggcagctggagcagcaagatgctgtygagaccgaagccaggggagtccgaggtggacctgctgcacttccagagtcagtttctcgcagctggtgcagccccagcagtgcagytggtgaagaaaggaaataggggcggtggtgatgccaactcagaccggcctccgctccaggaccatcgggatgtggtgatgttggacagtgagttcccatggatgtgaggctgagaagtagagagggtacagcctygggccsctccctcttcctgttgtggttggattcagacacatcattattatttcagacactgcatagcctgtgtttctgcagccccattttacagaggaagaaaatgaggctcaaagaggttaaatatcttacccaagatgacacagcttgagccagggccccatggcagctgtctttcttccctagcctgcagtgtcttcctaggaaggtgtgcatatactcacgtttgggatcttttctttctcagatctcccagatttgcccccagctttggtcccttctcctccaaagagagccaggcccagccctggccactgcctgcctgaggatgaggacccagaagagaggctgaggaggcatgatcagcacatcactgctgtcttgactaagattattgtgcgtctcactctggctgagtaggataagatgttctagggcaacagggatattggatgctcggggtgggtgaggcttatcagtggagggtgcttcagaaaggtagacttttacccctgaggtcaggwtgggggctgggttagaatcactgccctgaagggaggagggtccgtaaccccccagagtgaggttctcatcgttcagaactgggctaataggatcgggtccagcctggggaagtttctccattgtgcttcacaactttgtgctttgttgctacaggaacgagatacaagttcagtggccgtgaatctgcctgtgcccagtggtgttgctttccctgctgtgttccttcgctcgcgggacacacaggtaggcaagggtaagcttaggtggtgctcaggagacagacaggtgagtctcatagtgcatcttctccaggcaggtagttttaatgatgataagcaatttaatttacaaagcaggatcatactaagcacttcatacccattacttcttttaatcttcataacaaacatataaggcaggtatcatgatgataccttggggatgaggagtccttattcccatttttcatatgaggaaactgagaccccaaagagataaataacttgtccaacaccacacatctaataggtagaagagccagaacttcaacccaagtctgtcagagtctaagacctttactcttatagacctctcctttttctgagaactagggttgtgatccctggaaattgagcaaatccccttttatctctttgttccagaggccttgatataaagaggttgagaggaaagtgggatgatgagcatcagtracctgggttttctttttgccccacaggggaaatcagcaacatctggtaagagaagcatctttgcccaggaaattgcggcaaggaggatagctgaagccawgggcccatcagttggggaagttgtgcccaacgtgggcccaccagagggtgagccggggttgaagaggattgggcttggcctttttaaaagacacaatcatarggtcatttttgaagatatgtcttcctgcctcaaatgagaggtgcatttgagccatctcaagtagtctgagaatactaggtatgggaggcttgggtccatatctgggtctcaggtgctgggagtggggcaggccattatgcagtcctaagagaaagggaatagggcagaagtgtctggcagagactgtaaaataaatgtgttggccaagatccctttaatgatgcaaattattagcttaacagctgggagcaggcccctggctatagatgcctgcctagatatctaagaggagtcagaaattaggatgtttctgaggaaaaccttttcatataagtactagggaagcagtgagtggagaagccacctggagtccctgtgccagacccagtggggtctccactctgaggaaagyttgggtctatacctgtctccagggctaatagccttatagaagaaggccaaaaagcccagttagagccctggaggacagagcaatgaatgtgatcatacctttcttccaggtgccgtgacctgtgagacacccactcctaggaaccagggctgccagcttcctgggagcagccacagctttcagggacccaatctggtcacagggaaggggctcagggatcaagaagctgagcaggaagcccagactatccatgaagagaacatagcaagactgcaggccatggctcctgaggagatcctgcaggaacagcagcggttgctggcccagcttggtatgggtgcctggctttcctgctgagaccaggctaggagaggaataccacttattgagctaggcttactgtgagttccgggcactgtgctgagtactttaatgcyttttttttttttttttttttttttgagatggtcttgctctgtcacccaggctggaatgcagtggcacgatctcggctcactgcaacctccaccttcacggctcaagcartcctcccacttcagcctcctgtgtagctgggattataggcacacaccaccacactcagctaatttttttttttttttgsggggacagagtttcactcttgttgcctaggctggaatgcaatagcacaatctcggctcaccacaacctccgcctcccgggttcaagagattctcctacctcagtctctcgagtagctggaattacacgcatctgccaccacgcccagctaatttttttatttttagtagaggtagggtttctccatgttggtcaggctggtctcgaactcccaacctcaggtgatctgccctcctcggcctcccaaagtgctaggattacaagcatgagccaccatgcccggcctttttttttttttgagatggagtttcggtcttgttgcccaggttagagtgcaatggcgcgacgtaggctcactgcaacctccgcctcctgggttcaaatgattctcctgcctcagcctcctgagtatctgggattacaggtgcccaccaccatacccaactaatttttgtatttttagtagagacggagtttcaccatgttggccaggctggtgtcgaactcctgacctcaggtgatccactggccttggcctcccaaagtgctggagccactgcgcctaggttttttttttttttttaagacggatttttcctcttgttgcccaggctggagtgcartggcgcaatctctgctcactgcaacctctgcctcccaggttcaagcaattctcctgtctcagcctccaaagtagctgggattacaggcgcctgccaccatgcctggctaatttttttattttttgtatttttagtagagacggggtttccctgtattggccaggctggtttcgaactcttgacctcaggtggatcaaagtgcctcccaaagtgctgggattacaggtgtgagccaccgtgcctggcccccagcgaatttcttttaaggtttttgtagagatgaggtctcactatattgcacaggttggtttttgttttttgttttttgttttcagagtctccctctgtcacccaggctggagtggaatggcacgatctcggctyactgcaacctctgcctcccaggttcaagtgattcttgtgcctcagccttttcagcagctggaattagaggtgtgtaccaccatgcttggctaattttttttattttcagtagagatggggtctcaccatgttggccaggctagtttcgaactcctggcatcaagtgatccaccgacctcagcctcccaaagtgctgggattacaggcatgagccaccgtgcctgacctttaatgcattattcagttctgtccttaaacttgtcctgtgaggtaggtggtattaaccctattttacttatgaaagaaactgaggcctaaaatttaaaagaaattctacccaggtcacacaccttataagaagcacaggacacaggatttaaacccagatctacctggtctcatatagatctacctggtctcatatgccctgcttttttttttttttttttttttttgagacggagtctcgctctgttgtcctgggtggagtacagtgacacgatctcagctcactgcaacytgtacctccctagttcaagcgattttcctgcctcagcctcctgagtagctgggattacagatgtgcaccaccacayccagctaatttttttgtatttttagtagagatgggtttcaccatgttggccaggctggtcttgaactcctgacctccagcgacccatctgcctcggcctgctgaagtgctgcgattttttttttgagatggtcaccgtgcccagccgaggccctactttttaaccactgtgctatgtataactgtactaccctggtatagtatacactatgctttattatagctatactctagtatatgtatagtctcttctactctgtgatactgttctatgctatgcctcacccctagtgtctgttcaccaaaatgccaggcactcagtcaatcttgttacccactgtatactagcacctctatagastataatacgtgttagggctcagtatggtgccttgccctgtaattccagcactttgggaggttgaggtgagaggattgcttgaggccaagagtttacgaccagcttgaggaacatcatgagaccccatctctacaaaaaataaagatataaaaaattacagccaggtgtggaggctcacgcctgtaatcccagcactttgggaggctgaggtgggcggatcacaagatcaagacattgagaccatcctgrccaacacggtgaaatcctgtctctactaaaaatmcaaaaattagctgggcgtggtggcacacgcctgtagtcccagctactcgggaggctgaggcaagaaaatcacttgaacccgggaggcggaccttgcagtgagccgagatcgtgccatggcactccagcctgggcgacagagtgagactctgtctcaaaaaaaaaaaaaaaaattagccagatatggtggtgcatgccggtagtcccagttacttgggaggctgaggcgggaggattgcttgagcccaggagtttgaggctgtggtgagctacgattgtgccactgyactccagcatgggtaacagagcaagaccctatctctttaaaaatatatatttacagcctgagcaacatggtaaaaccccgtctctagtaaaaatacaaaaattagccaggcgtggtggcaggcacttttaatcccagctactcaggaggctgaggcaggagaatcccttgaacctgggagatggaggttgcagtaagttgagattgcaccactgcactccagcccgggcgacacagcgagattccgtctcaaaaaaaaaaaaaaaaaaaaaaataaatawatatatatatatatatatatatatatatgtgtgtgtgcataaataaattagctaagagaaggaaattctttctgtaaatgccttctttttggccctagtcaacattaacttattcattctacagccacttacattggaactgtgacctgaaaccaaagggataggcataggaacctgggccagtggactgtgagggatagagggaaaggtgggcaggtgggcaggtgggcctastgaccccacaggtgtgagaaggctgggtcattgatgggccacaggagcacccagaaggctcaggcccaggctcggaagcagcttgtcctgtccttggcacccacagacaggcgatattcagcgggttccaggtctgtaggaggccagggaggatctaccctcactcactctcccctctaccttcgcctctagaccccagcttggttgctttcttgagatctcacagccacacgcaagagcaaacaggagagacagcctctgaggagcagaggccaggaggaccctctgctaatgtcaccaaggaggaacccctcatgtcagcttttgccagtgagcccaggaagagagacaagctggagccagaagccccaggtttgcaggaggcgggggtcatattttggtggataaaagtaggggaaattgtcccttttcctaggcctggcaaatgagagaagagagaagcttctgtgcttttggacatctaacattaatcctcattattggcttcaagtcagtcttcattgctgatgcatgtcttcttcctgcacatgcttcctgttttcttgtcctgttactgccccttctccgccttcccttttaagaggcagcaatgcgtgatggctgaatcccactccacccgctcccggcagactatcttcctgtccttgctgtagctgccccagctctggctctgtccatcccactgttctttctctctctgctcacagtgctgggggaaagatggcagggccagagtaataagagaggcagaatctgacaaagatcttatgaacatgccagaccagaagcagagaggccagtggaagcactcatttcccagaaactagattatttcattagtgattawcaaaataagaaattgaattatgagagccaggaacctcatgcccccggaggagctccaggccagctgagcaggttgggtgggggtaggcgtgaaggaggaaaatgctgtgggatttgtttctgtatcctgccccccaggagcagtatagttgcctcctcctcattgtccccactctcctactcctttaagggctggtactggaaagtggagatggtgccttcctgacatatgtggtcctccttcttcatctttttctcctttctttctctttcttccttctccttctcctcctctctcccctcccaacaaatccttggggtcagcaaggggctggagcccaggatggagtgtgtctgtcatatttgagactttcaccccagccccaggagttccagtccctgrgccatgccatttagccataaycgagggtagaagctggcagatcctggaacagaagtggatgtggcagctgctgggtgatggtggggacccctgtggatagtgagctgagccgtttgggtaatactatcatgctttgtctccccagctctggcattgcccrtgacccctcagaaagaatggctgcacatggacactgtcgagctggagaagctccactggacccaggacttgccccctgtccggcggcagcagacacaggaggtgaggagggccacctggcctacaaggggtgggtgakatagggcaggagaggagctgctgctcttgccctcagaactcaggcctttctattgcccagagcctgagaagcatctctcctttgctctcacccacctttaccatcactctgcctggcccccaaggccagataagccccatttctggtagaagtagagtcagtacctaagtcctgaaaggcctgggattaaaggtggggagtgggtgtgggaaggttgctggagcccccagaccacagtcctctttctcttcccattagaggatgcaggctcgrttcagtcttcagggagaactactggcccctgacgtggacctgcccacccacctgggtctgcaccaccatggagaggaggcagaggtgaggcatgggactggagaggatggggcagctcttttaacaaccccatggaaaaggatctctggtcaactgcctttgaccttctgtgtgccctgttctagttcatgcctttgctgtgcattcagtttctttttttggagacagaatctcgctctggcccaggctggagtgcagtggtatgatcttggctcactgcagcctccacctcctgggttcaagccattctcctgcctcagcctcctgactagctgggattacaggcgcatgccaccacgtccagctaatttttgtatttttagtagagacggggtttcaccatgttagccaggatggtcttgatctcctgagcttgtgatccgcctgcctcggcctcccaaagtgctgggattacaggcgtggcattcagtttcttaggctcaaaatcttgatcctctctccgtattctggtcagttgctagaatttgccgatcttctgtcacctcctcatgatgcctcctgcrctgtggccttgcttccttggtctgctcactctccatgccctccattctccgcccccctgccattccatgtctctcggggctgctgtgctgatttcttctggcccagctcaggccatgccttgcctccagaagtttcccagcttccctctgctcacaraataaggttctggtctcagctgggcaagatattccttctaccttttgtccctgctgaccctgctgctctgcctccttcacttcctgctacaccactctgctggcttctccccacatacctcctgtgctcagggccctccaggactccactcgctccaggaaatgcctttgccttttgctccatgtcaggccatcaaagctctacccatccactgagaccaatttaattttccaggttcccttctctctctctcctgtccgccggtcgcaaattaaacatcagttatcacgttcctctgcatctgcctcatggcatggttacttgtatgcaagtcttatctttaccggcttgaggctccatggaaagcagggcagatttcacttatttatctttgtctttcctgtgataccttgcttggtgttttgggggcactgtgctgtatcctggctgcttctgacttcttgtccctgccccagagagcggggtattccctacaggagctgttccacctgacccgcagccaggtttcccagcagagagcactggcactgcatgtgttagcccaggtcatcagcagggtgagtggattgccagcctggtcctgcccacccttcccttcaccccacagcctcagacttccccatctcctgcccttttcactctggctcactagccagctatgtgcttttaacaacctaggatcataggggggcaaacgaaggattagggcaaagcctctagataacttcagcatcttcagcaaggttttaccctcctgccctcaggcccaggctggtgagtttggggaccrgctagcaggcagtgtcttaagcctccttttggatgctggtttcctcttcctactgcgcttctccttggatgacagagtggatggggtcattgcaaccgccatccgtgctcttcgggctctgctggtggctcctggagatgaggtaccacagggataggaatggggcttgggctgggaggtgccagggtccatattcctgttyctgggcatggccccattgctaaggctttgygggcaagatgtagaatgggatggcaggcgtctccctcatctcctaaagtccctaaagcccaggaggcttgcmtttatggtttttattggggagcatcctctctactcctggatccatttcctggccccttcagcattgccccccaactcccgttcctctggcaggagctcctcgacagcaccttctcttggtaccatggagctttgacgttccctctgatgcccagccaggaggacaaggaggatgaggacraggatgaagaatgcccagcaggaaaagcaaaaaggaaaagccctgaagaagaaagccggcctccacctgacctggcccgacatgatgtcatcaaggtaaagggacagcttctttcccatcccatggcccaggggacaagcacatgctggaaagaggggccatcaatgcccagggtccagctgcatttgtcagtgggtttctctctccaactcccaggggctcctggctaccagcctgctgcctcggctgygctacgtgctggaggtgacatacccaggacctgcggtggtccttgacatcctggctgtgctcatccgcctggcccggcattccctggaatcagccacargggtgagaaaaaagggagcagggaatgggcaaaaagcctagctgrgccttgtcttgacccacagcctcccttcctcccttttayctcctgtctcccataggtcctggagtgccctcggctgatagagactatagttcgagagttcttgcccaccagttggtctcctgtgggggcagggcctacccctagtctatacaaagtaccctgtgctactgccatgaaactacttcgtgtcctggcctcagctgggaggaatattgctgcccggctggtgagcaggacacagggcaagggatgggggaatgcatgggacagggttgggttgggagctaaacatggctcctgaactctgggtggccagctcttgccatcttcttcctctctgatccagttgcttagaaatgcaacagaaatcaccaggcatgaacctgtttactggagcctgtttaytggagcctggtgcatcatataggtatactgtggtctcatgatgtaataggaggtctccctgttccctagacccagatcagaagggcttcatgcacataggcattcatcatctatagccaagtagccctagagaaggtgcccagcaagccttgctataaagagggagggctgggtgtagtggctcaggcctgtaatcccagcactttgggaggccaaggcaggaggatcacttggggccaagagttcaggggccagcctggmcaacatagcaagactcygtctctacaaaaaacaaaaacaaaaaattagctagatgtggtagcacatgactgtagtctcagctactcggtaggctgaggtagaaggatcacttgagctgggaggtggaggctgcagtgggctggttgcaccaatcactgcactacagcctaggcaacagggcgagaccccgtctcaaaaatactactactggccaggtgcagtggctcacgcctgtaatcacaacactttgggagaccgaggtggtggatcacttgaggtcaggagttcgagaccagcctggccaatatggcaaaaccccacctctactaaaactacaaaaattagccaggtataatagtgtgcgcctgtagtcccagctacttgggaggctgaggcaggagaattgcttgaacccgggagatggagggtggagtgagccaagatcacaccactgcattccagcctgggtggcagagcaagattccatctaaaaacaaataatagggccgggcgcggtggctcacacctgtaatcccagcactttgggaggccaaggcaggtggatcatgaggtcaggagttcaagaccagcctgaccaagatggtgaaaccctgtctctactaaaaatacaaaaaattagccaggcgtggtggcatgcgcctgtaatcccggctactccagaggctgaggcagagaattgcttaaacctggaggggcagagattgcagtgagccgagattgcgccactgcactccagcctgggcgacagagcgagactccatctaaaaaaataataataataaaaataaaaaaataatargggctgggtgcggtggctcacacctgtaatcccaacgttttggaaggccgaggtgggtgaatcacgaggtcagcagttcgacaccagcctggccaacataatgaaaccccgtctctactaaaaatacaaaaattagtcgggcatggtggcgcatgcctgtagtcccagctactygggaggctgaggcaggagagtctcttgaacctgggagacagaagttgtggtgagccaagatcactccactgcactccagccagggcaacagagcaagactccatctcaaaataataataaataataaaaagtaaaataataaaattgaaattttaaataaataataagaaggaagggcagggtggatgaggtatgactttgtggcaccagaggggcctgggtcagggttgagttaagccactctctgtccagctgagagtagctggacttgagactcacagctgaccctgatccycagactgtgcccatttccagttgagcagctttgatctccggagccgcctgtgccgcatcatagctgaggctccccaagaactggccttgcccccagaggaagctgagatgctgagcaccgaggccctccgtctgtgggctgtggctgcctcctatggccagggcggttacctttacaggtgaggagaggcagggggtaggctccccctagacaccttcagttctgctcttctggccaaatcaaacacctcagccttgctcaaggtcccaagcttggaggaaggataagaatgagtgggagggcttctgccagatgtgaaaaggcttaggagtcaggcccagccagggaagagggggataaacctggcttaaccgtattctatgctcaaaatcattagccgggcactgtggctcatgcctgtaatcccagcactttgggatgccaaggtaggcgtatcacgaagtcaggagttcgagaccatcctggccartatggtgaaaccccgtctctattaaaaatacaaaaattagccaggcgtggtggcacacacctgtaatcccaactactcggcaggctgaggcaggagaaccggtttaacctgggaggcagaggttgcagtgagccgagatcactccatcactccactgcactccakcctgggcaacagagaatgtctcaaaaaaaaaaaaaaaaaagcattggtatctgtgaaatcacatttaaattccctgttgggggcagccttgaaggacaacatcctttccattctttagggctgagccttccaagagtgccccactcttcctcctcatcctcctttatcaaactgcagatccctgggtcagggccatgacctgtgtctcatgtctccacttgctttcatacagtgaaaatcagtccctgttcttccctagggagctctacccagtgctgatgcgggccttgcaggtggtgccgcgggagctcagcacccacccacctcaacccctgtccatgcagcggatagcctcactgctcactctcctcacccagctaaccctggcagccggcagtacccctgctgaaaccatcaggtagtttatagccaggacccacaggacaggtggagggctcctccacagggctggggtggctggagtgtaaaggggcgtgaggcagccagatcctcactgtggcmccctttggcacttttgtagtgattctgctgaggccagcctctcggccaccccttccttagtcacttggacacaggtgtctgggctccagcctcttgttgagccgtgtctaaggcagaccttgaagttgctgtccagacctgagatgtggagagccgtgggcccagtgcccgttgcctgcctgttgttcctgggagcctactaccaggcctggagccagcaagtgagtgcctcctgccggctgtccaccaggcccccgcaccctgccttcagctacattccacccgttgctccctctctgtgtccatctctccactcctacttccccatttactatcttcccttttaattcctacccttcctcctctttctacctccatatccccgtggagcttcccaggagccatgttggtggggaccagagagcccacgcagcasctcagccttcctgtagcctgtgtgctccctctttatgccccctacacatcggggccttctctcccttcagaaggctcagcctgcagaagcctccaaatgtgctcytttgggctgttgggatggtggcattggcctgggtacacagggtctaggagaatgaatggctgggccatcagctcagtgaattccttggtccaccagccaagctcatgcccggaggattggctccaggacatgsagcgcctgtcagaggagctgctgctgccactgctgagtcagcccacactgggcagcctgtgggattcccttaggtatgtactgtgtttggtagctgggggaagcaggggaggaggcaatttctttccttgtgggattcctgggtccagctcccakgtccatcccagggtgcaggccctcggcccgagggaaacccgagtccctagcaggcagcagtggggtgggctctgaggagtgtgagcagcactgacctccacagccaggccccccgttagtcttaggtacagacccagaagctctttccagcttggcacacgccaggccagagtccccctcagactctccacttcacctacaggcactgctcccttctctgcaacccgctgtcctgtgtgccagcccttgaagctccccccagcctcgtgtcactgggctgctcgggaggctgcccccrtctcagtctggctggctcagcctcacccttcccattcctcactgccctcctctctcttcttaataccctggcccagatccacaaggggctgtgtggccaggtaagtgtggggtgcctgattaggggccaggcaaggggccaagatggcaggaatcagaaagaaagtgggagggtgggatgggcgcggtggctcacgcctgtaatcccagcagtttgggaggccgaggtgggcagatcacctgaggtcgggagttcgagaccagcctggccaacatggagaaaccccatctctactaaaaatacaaaattagccaggcatgatggcacatgcctgtaatcccagctactcgggaggctgaggcaggagaatcacttgaacccgggaggcggaggctgcggtgagctgagatcacaccattgcactgcagcctgggcaacaagagcgaaactccatctcaaaaaaaaccaaaaagaaagtgggagggtgtcccatggggaagggaggccttctgctggcactcatttccctgagtctggagaggggcagccacctggggagccctagaaggcatgagagtcaatttctagatctgaacaaaattgcttttcctcagctggctgccatattggctgccccgggactccagaattacttcctccagtgtgtggctcctggggctgccccacacctcacacctttctctgcatgggccctgcgccatgagtaccacctgcagtacctggcactcgctctggcccagaaagyggtaggtccccctgtctgacaggttctcctgtcatcccattatctccttcctgtttctgtggaacccagcctgcttctgccaggccatgcagctcccactttcctccagacaygccctggacctstgcccttcagcctcacttttatcctcttcctcacttctctctgccacgtccccttctcctgtactaggtagttccctgcttttctgtctgcaggcagcgctgcarccactgccagccacccatgctgccctctatcatggtatggccttggccctgctgagccggctgctgcccggaagtgagtacctcacccatgagctgctgctgagctgtgtattccggctggagttcctcccgtaagtgcttggttggtggcatcaactcagcccttttggacgctgctgcagttgttaacagagcagccctgaatttggagccaggagacctaaattctctttcttccaccgacgacacttaactcttccgagcttccattacctcattagtgaagtgaggatcaggctaaccacacccaagaatgattgtgagacttcagtgtgactgcatggctaaaaaaatggtatctaaatcagttacacacatgtaatagccatccgctactgagtgtttactctgtgtttgatactcccttatgtatttatctacattttaagtattttacttggaccatgagatagatactattattatccttattttactctgaggaaactgaggcccagagaagttatgtaaactcatgcctaggcagctggctgtagtgtgcatcctcttaactgctacacagcactgcgcgggaagtagttaagggagcagagaggcacaggtctggacctaggagcctccaggaagttccaaagagctggcacagcctccaagtgctgtggttccagccctcatttttggcttttgggtcccattacagggaaagaacatcagggggtccagaggcagccgacttctctgaccagctgtcgttaggaagcagcagrgtccctcggtgtgggcaagggactctgctggctcaggcctgccaggacctccccagcatccgcaactgctacctgactcattgctcgccagcccgagccagtctgctggcctcccaggctctgcaccgaggggagctacagcgagtcccaaccctgctactgcccatgcctacggagccgctgctgcccaccgactggcccttcctgccactgattsgcctctaccaccgggcttcagacaccccctcgggactctctcccacagacaccatgggcacagccatgcgggtcctgcagtgggtgctagttttggagagctggcgcccccaggctctctgggctgtgccccctgctgcccgcctggcacggctcatgtgtgtgttcctggtggacagtgagctgttccgggagtccccagtacagcatctggtggcagccctcctcgcccagctctgtcagcctcaagtcttgccaaacctcaacctggactgccgactccctggcctgacgtctttccctgacctctatgccaacttcctggatcattttgaggctgtctcttttggggaccacctctttggggccctggtcctcctgcccctgcagcgtcggttcagtgtcaccttgcgccttgccctctttggggaacacgtgggagccttgcgagctctgagcctgcctctgacccaggtactttctcagcccagcaggacctgcaagggtaccctgcactgggcctcgggggcagtcctgagccttgaggagctttggaagacctcagcttcctcatcttacctcttgggggctttgaggggattaagagaatcaatgaaaagggcttaacatgggctgggtgtggtggctcacgcctgtaattccatcactctgggaagctgaggtgggtggatcacttaaggtcaggagtttgagaccagcctgggcaacatagtgaaaccccatttctactaaaaatacaaaacttagctgggcgtggttgcgggtgcctgtagtcccagctactcaggaggctgaggcaggagaatcgcttsaacccgggaagcggaggctacagtgagccgagatcgcgccactgcaccccagcccagtgacagagcaagaccctgtctcaaaaaagaaaaaaggaaagggtttaacctggtgtctggcatatagtgggtattcattactattaataaggcatagctccttgcttatcagtgctacaatctagataagaagagatttactgaaaacctacatagttgtgaattattcagatgctaggtggtatcaggattcagagaagggaaagatcaaattgggctttgtggaagaagtggggattgacccaggcactgtaggttgggtagaatttgaattggtgaggaggtagaaaggcaggagattcctaacagaataacataagcaaaaggagcatgacaaagggcagaaggagggaggagagatttctgttgggaacttaaggctaaaaataagaagtgaagtctgagagggcctcaaatattaggctaaggacttaaatttataagctgtaaagagttactatgtttgccaggtgcggtggctcatgcctgtaatcccagcactttgggaggccgaggtgggcggatcatttgaggtcaagagtttgagaccagcctggccaacatggtgaaaccgtctctactaaaaaaaaatacaaaaaattagccgggtgtcgtggtgcatgcctgtaatcccagctactccggaggctgaggcaggagaatcgcttgaacccaggaggcagaggttgccatgagccgagatcataccactgcactccagcctgggcaacaagagtgaaactccatctcaaaaaagaaaaataaaaaagagttactgtgttatggctgcgtgaggtggctcatgcctgtaatccaacattttgggaggccaaggtgggaggattgcttgaggccaagagtttctgaccagcttgggcaagaaagctagacaccatctctacaaaaaattattsgaaaattagccagacctggtgatttgcccgtagacccagttactcaggagcctgaggcaggaggatcacttgagctcaggaggttgaggctgccagtgagctatgatcacaccactgcattccagacttggaaatagaacgagactctattaaaaaaagaagttattgtattttgttttttgtttttaagattttgggtttttgtttttgtttttgagacagagtctcgctctgttgctcaggctagagtgcagtggcctgatgatcttggttcactgcaacctctagctcccaggttcaagcgattctcctgcctcaacctcctgagtagctgggattacaggcacacagcaccatgcctggctaatttttttttttttttgagacggagtcttgctctgttgcccaggctggagtgcagtggcgcgctcggctcactgcaacctccgcccctgggttcaagcgactcccctgcttcagcctcccaagtagctgggactacaagcacccaccaccatgtccagctaatttttgtattttcggtagagatggggtttcaccatgttggycaggctggtcttgaattcctaatttcgtgtgatccgcctgcctcagcctcccaagtgctgagattacaggcgtggcccactacacatggccaatttcatgctttttaatggctgcttctcagttcccagttttccccaacatctgctctgtagtctttaaccctgatccttgtgctagaaggacagatgtttgtctaggacctgatctctgccctcatgatttggtttcatgtgatcgttatccacacacsttatgtatgtatatacattcctaccctccccctcagcacgtcatttcccctgtcacagttgcctgtgtccctggagtgttacacagtgcctcctgaagacaacctggccctccttcagctctacttccggaccctggttactggtgcgctccgcccacgttggtgccccgtgctctatgctgtggctgtggctcatgtcaatagcttcatcttctctcaggacccacagagctcagtaagttacatctccatcttcagaggaaggaagggagctagcaattgagctgcctctgggccagctggggaagaggtaagtgtcaagcaaggccagtggtgggtaccagccctcggctcagtgccacctctccctgttctgcttctaggatgaggtcaaagctgcccgcaggagtatgctgcagaaaacatggctgctggcagatgaggtagggtcagggccattaggagggtgggatattagaggatcttgggggacagagaccacaacaggatctcattacccacttcataagttttctttcctttctgcagggtctccggcagcacctcctgcactataagcttcccaattccacgctcccagagggctttgagctctattctcagttgccccctctgcgtcagcactacctccagagactgacttcaacagtgctccaaaatggggtatcagagacctaggatagttgatatagatggaaagatgggtacgttgtcctgtatccagcctttcaacagatgtctggccagacgaagaacattgtgtcctaatggtaggcaggagaccaaggagcagaaggcttgccttcctgggagcaggttgtttgagctgttttagagcagtgagccctaccattacatcctgatatctggggcttctgaaggtctgtrctgggagtgaagagtggcttagctatttacccgctctttggggacagggcaaactaaatgcatcccttcttacctaactcccaacccctgccctgggctgaggcatatgaatgctatagttgtgcattaaaataaatgttttttatctcctggaaatttgatctggactgatttcagccatgttagttcagggttagtatctgggggtgggttatcccaggtgaggagcaggactgctgtgagagagatggggaagaatcataagtgggaggtaaaaactttgtccacatctggagacaacaagaatgtggggcctgccaggcayagtggtacacacctgtagtcccaactacttgggaggctgaggcaggatgatcacttgattccaggaattcaattccagcctagccaacatagtgagaccccatgtctgtctgtctgtckgtcggtcggtckgtctatctatctatctatctatctatctatctatctatctatctatttctgagacagggtcttgctctgttgcccaggctggagtgcagtggcgtgatcatagctcactgcagcctcgacctcctgggctcaagccattctcccacctcagcctcctgagtggctgggaccacaggcaagtgccaccacgcctggctaattttttgtatttgtagagacggagtttcaccatgttgcccaggttggtcttgaattcctgagctcaagcaatccacccacctcagactcccaaagtgctaagattacaggcatgagccgctacacttggcctattttggtagtttctacattgttctttggtctgaattctaaactttaggctttcttagactgtcttttgctgtgtggattacttattgtgtttgcaagtaaccagagtcagagcagtgtgccaaggcctagccctgtcagtaggtagagagaacccagtcttcataaatggagctgctgaacacagaattatccaataggtttttttgggtttttttttttttttttttgacacgaagtcttgctctgttgcccaggctggagtgcagtggggcaatctcagctcaccacaacctccccctccctagttcaagccattctcctgcctcagcctcccaagtagctgggattacaggcgcgtgccaccacgcctggctaatttttgtatttttagtagagatggggttttgccatgttggccaggctggtcttgaactcgaactcctgacctcatgatccgcccrcctcagccttcaaaagtgctggtattacaggcatgagccactgggcccagcctttttttcttttttttttttgagacagagtcttactctgtagcccaagccagagtgtastggcatgatcttggctcactgcaacctccgtttctgaggctcaagtgattctcatgcctcagcctcccgagtagcaggggctacaggcatgcaccaccacaccsrgctagttttttgtatttttattagaagcggtgttttgccatgttgcccagggtggtctcagactcctaagctcaggcaatccgcccacctcagcctcctaaagtgctgggattataagtgtgagccacagcatgtggccccaataggttttattaagcaactactgtatcagcaaataccaatgattctcaaactttgtgacaaaaatcatctggaggatattttaaaacagatcactgggtcctaccaccagaagctgctgattcagtacatctggggtgaaacccaagaatctgcatttctaacaagttcccaggtaatactgatgctgatgttcagaacaaaccacacaaccacaatttgaagagcagtggcttaaagagactttgcaaggtaaattctgtgatctcatagtgtgatatctagtgttaagtagggcatagagaccagggtttttttgttttttgttttttttgagatggagtctcactctgtcacccaggctggagtgtagtggtgcaatctcggctcactgcaacctctgccttccaggttcaagcaattctctgcctcagcctcccaagtagctgggattacaggcacctgccaccacgcacggctaatttttgtatttttagtagagacggggtttcaccatcttagccaggctggtcttgaactcctgaccttgtgatccaccccacccccaccgtccccttggcctcccaaagtgctgggattacaggtgtaagccaccacgcctggctgagaccagactttttacaaaatcactgttctgtttacaccttgaattagactttaccaagtagctaactactataacttctcttttgaagtattttgtattaaacataggtctcagactttcaagttaggattttttttttttttttttttttgagatggggckttgctcttgttgcccaggctggagtgcaatggtgcgatctcgtctctgcaacctctgcctcccaggttcaagccattctcctgcctcagcctccagagtagctgggattacaggcgtgcgctaccacgtgtgtctgattttgtatttttagtagagacgggattttgccatgatggtctagctagtctcgaactcctgacctcaggtgatctgcccgcctcagcctcccaaagtgctaggattacaggcatgaaccaccgcacccggcaaatgatcatttaagcaaatgatcgaagactcaagacacaaaactacctgaagggagtggctcccacatttgtagggtaccttacagagcaatttcccttcatatgattttgcaggtggtggggaaactctcmgggcagttgtggcctgtgctacatcacccattgaccagaggtgccagtactagtgctcaagatcaatygatcgatcggtctacctacctatcatctattgaccttcagtgctactaaaaacactcggatcttctaacgtctggtccagtctttcaccccatcacagtgagaggctgtgcacaggggtaacacaggcaacggaattatatgaggcaaacacagagatccaggtttctgggagtagcaatgaggttcagccttgcagtcacaaaggcaccactaaaaggcacaagtaatggcaggtaatgaggccttacttggagcagtttagagtacttmccacgtgtggtgacgcatgccacacactcaccaccaccaccactgccacaaatgaagtgcacactccactgctcctgtcctcaggaacctggaagcccccacctggtgtccgaggtgtggctcccactttaagcgtggggcacctcctctccggcctcaaacctaccsgagctcccagcaggctgcggcacatctgacggctggaaactagaacccctgggtggggactccttaaggctcctcccggaagcgtagggacctcgctgcccacacgcccctccctttcctcctctggcgtcctggggtctgaggtgggcgtggccagaccagctttaggtccggggagtgtctcgccagcggcagcacacccctgtaagtggtggccagrgctgccgtggcaaaatgagctgtcaactttaggttgacaggggtgtggccgcgaccgcaagggcttttgttgccgggtggacccaacagggatgggctgctggggacagctgctggtgtggttcggagccgcgggtaagtgctatctggcggtcaggggaccgtccagcctgaggcactttcctaggcttgggggtggccggtcaacaggccaggtgtcagtggttcctccagaggcctcgaactctcacagccaaatttctccggtccgtgcttctggagtgcgggccgagaagcgccaagtgcgtgcgaatcccagagtctggatcacgcagcttgggaaggaggaacattctttggggtctcagcaccgccttggggcggggccaccaatctaagttgaggaaagcattggggaggctgcaggaccaaattcattgcggcccctaagttattcactgggaaaggcgctcgaggagagaaactggcagacctatcagcgcgcacccgcggggcttctgcgaccggagtcgggtagtggcttccaggctgagagcgcggctgggccgggtgacgggtgtggccgcgaccgcaagggcagctgttgcggggttctctctttctttcatatcctatttccacccgccttaacgtcctgcgccttctcccaacacctttcaggcgccattctctgctctagcccggggtcccaggagacttttctgcggtcctcgcccctgccgctggcaagtcccagcccccrggacccgaaagtcagcgccccgcctagtatcttggagccagcctccccgctgaattctccgggtgagctttagacgcctccttcctctttcgctcaccataccagacccctctggcccagcyaggggctcgacgacccttgcctcgctccttgctctcaggcaccgaggggtcttggctgttttctacctgcggggccagcggccggcatgggcccacacagacacaatgtgacggggcgtacgcggggaccagcgtggtggtgaccgtgggggccgccgggcagctgagaggcgtgcagctgtggcgcgtgccgggccctggccagtatctgtaagtgcacggcggaggtagggtggacagtgacctgctagttggaggtttcaccctcagggtaacgaagtccacgtgcgcaccgacttgcgtcttggactattccgsggggaggtccaccttgagtgcccttcaaggtggcagtagtcgccaccgagttagccsttacccggaacctcttacaccgagcggaaggcccccaaccagggcrgcgccaaggggtgcttgagcctccccacatttccacgaaccctcctgaaataagtgtaatatctgatttttcggtgtgcaaacctacccttcccatcccgtcagagtcgattgcagcctccaagtccctcagataaaaaataattctggagcctcctctgtcgccaacttctgcccggagcggccggcctgagcaccgaaggccggggactcaccgtccgttccccgcaggatctcagcctacggagccgcgggcggcaaaggcgccaagaaccacctgtcgcgggcgcatggcgtcttcgtctcagcaatcttctccctcggtctcggggagtcgctgtacatcctggtggggcagcagggagaggacgcctgtcccggagtgagcgcagccagtggggatgggscggcgccggcgccgggggcgagggctgcctgggggccgggggagcgtgctttcctcggtgccgggtcaccagcacagcgaggggaggctcccgggccccgccgattccctcccccgctgcccgcagggtagcccggagagccagctcgtctgcctcggggagtctcgagccgttgaagagcacgcggcgatggatgggagcgaaggggtcccggggtcgcggcgctgggcgggaggtggcgggggtggcgggggcgccacctacgttttccgggtacgtgctcccttcggcgctcagcgttggggtcccaatcctctccccaggggcgctcacgcaccggctctccgtccgtcccttggggtccccctatcccygcgctgggctgggctggcctgggctgggctgggggcccctgcccttatccaggccccctgggcgggagccctctcccagtggcagtgcccctggacagctggagggcgcttcctggamcacgccgctggccccacaggtgcgcgctggcgagctggaacygttgctggtggcggccggaggcggcggtcgggcctacctgaggccgcrggaccgaggccggactcaggcctcccccgagaaactggagaaccgctcggaggcgcccgggagcggcgggagaggcggggcggcaggtgagggcgcgggccgcggggagaggcgggcgtgctccccgtgtggctgccaaccttcctgctgtcgctctgcaggtggtgggggcggctggacgtcgcgggctccctctccgcaggccggccgctcactgcaggagggggcggagggcggccagggctgctccgaggcttgggcgacccttggctgggccgcggccggcggcttcgggggcggcggcggggcctgcactgcgggcggaggcggcggcggc

SEQ ID NO: 1653 - DNA, 25677 bp, Homo sapiens
  misc_feature (1)...(25677): n = A,T,C or G, or insertion/deletion polymorphism (see Tables 1-2)
gttggtgtacgtgggacactcgatgtccaggttgtgctgacatgtcataggtggctttgctgtcgactatgaaggcacagtcagaatgttccagggtcgtgtaggtggtcaggatggagytgtagggctccgtcatggccatggagacctggggggctgggcaaatggcaaactccagcttggacttcttcccgtagtccaccgagagccgcttcatgagcagagacacgaacccagagccagtgccgcccccaaagctgtggaagatgaggaagccctgcagtcccatgcacagatctgccygagagaaaycagacaacgtaagccaatgccygtgggagccacaccaccaacctccaccaagccggggccacttctctttgcctctgagagttgatacggattcagaccatccataatgaacacgcatcacactttgaagcagagaaaagcagacaatacagatctatgcacaaatcaccacgcayacttcacagtaagacgttgcagaggtctagnaaggctggtttgaagaaatacacagaagaaaaacggatggactaaccagagcgctcagccagcctgctggactggcacccgtggctacagacactcttgtttagcaccatggagagctccctgcacagaagcaaggactcagggcattgccccctctctacctgagaactagactcagcgcccagcactggatttgataatacaggtactcaaatacatgtgctttcctctttactcagacacttctagggctggcagggtcagacagtaatcccccactttgtggggaggccctgtttttgctgaacagctcargggcrggaagattctttcttccacacacccctgcaactgccaatacttgttctgtgtgacccttgcagccatcctatgcggtaggtgctaccattgccatggatcaagtggggacgcacagatccaagctccttcacctctcaagggagtkgggccctcccacagatctcttggaggaaaaaaatggccttgctgggcctgtcgatttccagtccccacccacctccctcatgtacatgtgtctgtttgtgaaaccttcatagcaccttagcttccaggccctccatcccggctgcctctctggcacttgcccttttactgtgcgggtccaaagagacacctatgttcagtttgtcraagtctgaaataagcctgtcttttaatttcactgactcccagtagtaatttttttagaagacaaactgcttctctggcagttacactccagggccaattctcaaaggccaagtctggtgccaccccactccctctaagctgcttgagccagatgagagcttctgaaatgctgcagaaaagagctctcctggggcatccattaaaatgcagattcacyggcattcccctaagagtwtggttcagcaggtccagggtcaacatctgcatgcctcacccagggtcacaggtgattgttactattattggaccatttgaggagaggcaggtagaagtgcaaattcctggcaaagcaaacactcaggggcatgagagtgatgagaccaaggaatcccaaccatgtcttctacctcacctggaacaaaatctataccctttttgccacggcctacagccctgcagccctctgccctctccaccccacagcctggccacgcttccctggctccctagcctaggcacactgctgyctgccagtctgggaaacaggcccgcatgctcactgttcctctgcttgaaatgctstccctctgatcttgccatggctgactccttcccaccctgcacatttcagcttaaatrtcacctcacagaggcctccccagccacctctttaaagyagggggtcccyrttcttctctagaakcataaactatttgtttcttttgcagtgccaataattactcagaatgatrttgttaacattgtcccttgaggtcaggaacttggttttgttcaaggtggatccctggtggctaagtcagtgcccagcacatacagcagcgcgcaatgagatatttgtggaaggaatgaagagttccgtgtggctggagtggaagaggagtggggcaaggtggggtgtggggagcaggaaccagagcacatgctccctggcgatgtgcagcgcggtcctgccaacccccacccatccctgccccaggaagctgagctttcatggccatggtgccctgcgcaggcgttacctgcttggtcattcagctggttgtagctcaggtccagggacttcaggtctgtgtgggccagcaggagttcrkcaaggtgctgggccgcctgctcctccaggccattccctgacagctgcatcttccgcatggcctggttcactgtgagggcggcacagagggcctgggctcctgccactcccagctggttctccracaggtccacatctgggggwcggagccactcctcrgccagtgggatgcaaagccaggtaccacccccctcccccctcttctgccatcccccaaacctccaggtctgaggcagaggaaaaggacttacaggttaactgtcctggggttgcatggtggctctggctcccaatggctgggtcccctctgcccctgacctccccctccctgtgtgcccaccagcttctgtgtcaagcggttaaaacygcctacctcctggtactgtagagactgctgtggtggggggcagccaccccatcratgattatgtctggcagtgatatcaccacccacttcagaagycctcactgccccattgccaggattggcaataatagcccaggtgactgtgcatggagcacttacatgggtcacacactctgctgatcacttcaggagtgcatttcacttcatgctcaccacagccccaagcctatgaggtcttktgrgggccatttcacagattggaaactgagctgctttcataggtcaccccgttttctcagtggcagagacagcatttggattcagcttcaatgaactcccaccttgcccacccctttcttgaacttccccrcccccaactctctgtgttgcaggactttccactctgcattcaggcactggggagtctcccatgtgcagggcagggcaggagaatgggtgccagccaacaaggaaggagagtggtggggtagggtggatgaggaagggacttgtatccagcatcdgctgcacagcagagggtctaactccaccccacataccccstcctgtgatgaggcccctcctctatccaccagcaacaccagcaggacccaggtgacatggcccagctttcaggggtggaggcacatccctgaggaaagggaggastcacgcctgcccacctgccccagacccagcacctaccgcagatgytgctgcttttgctcagggcacctgccagggcctctgtacctgccccatagagcccactgtcccaaaagtycagccrcttgacatatggattggagctcaatgaggaagccagagaccggcgccctgggacagacagagcaaacacactggccactatcctggctcatgctccagggctcagcccgctccacgtcccccacctggaaagtacccccctttccacctgcttaagggacacatgcttctccttttaggccccacctaggtgtcccccacccccacctctcccagagcccccagcgggttagaagcctgaaggctccccaacccttcatgccatctgtcatagcatcaatcccatctgtctctcagatgtcgagggtagggcatgcctggcacaggcagaagctggggagtacaggggacagactcaggggcactcccatggctgttgtctccyggggcctctccctgtaagcctggacccagtgtccttccagtggtacctgsggccccaggccaccgtgcagcaggttcagctctggggcactcccttggcacagaaagcagaagatgggcacaatgctatggatccagcaagacctcaggtacagggtgtccccgaccagttctccaagtscatgggtgcctggtaggagacagggggatgaatgtgaacccctgcatggctatagccacctgcctcctcccctgccctgcatcactacctggcctattttttgcctctagaagcactgcttcctaygctccttaggaccactgcccgcatatgacagataagaacatcgaggctaaggcaacgcaaatcttttccttaaagtcatacagctgtcaaaagaaagctggacaacctgggcaacayagcgasataaaaaattatttaaattagccagatgtggtagccccctgtagtctcagcgactcaggaggctgaggcaggaggctcaccagagtgcagagttcaaggatgcagtgagctatgatcctgccactgcactgaaagctgggtgacagagcaagaccctggctctaataaatgaatacataaagtctcacagctagtggtagctaatcctgccagagtcaggcctctacctgtctgatgacaaatggcacactatgtcttttaacctgattgcagaccacaaatgttttgtgaatattttccccagggaaaaaacyggaagtagttctaaattctatacatccattatattagttttacctgtggattgggaaaacccagctctgattgcatttcagggcgggacagcctttggtgcactgtctggcgggattttccattttaacctccttctagaagcgccttctcatggtaaagttcctgatgccgccaggagcgccgaggagagggcagggggctggagacgccccgcagagggctacgtgccctgctggacagaggtctcctgcctcctcggcggcgccagcccacctcccacaacccctgcgggagaagcccccaaggggaggagacgggcctggcccctgccccgagcaccttccgtctctaggtcggagtctgaatcggccttgggaccctgcttggcttcggggacccctgcaagacgtccacaggccgccgtcgcctcttcctcctgctttttatcctccccagacctctggcaggaaccgctcatcgttacgcccctttcgcagcctcagacmctgaggcggagaccgcttggcgcctcacttagagcgcgacccggggatgtgggcggagtctgcggctgcgctgaccaatcgagtgtggcgtccatcgactggcgtctgccacggcaattagcgacgcgctcccccgcggcggtcgccccggcaacccagtgctgtaggttgccgtagaaaccgtggctctcctgcgctgaggctcctcgcctgagaggataaactgcacgcgccacgggctatgcactgggctgggcgccttgtgggcatcctccctgccttcctagggggttccagcatcgcccccctttcgtggactgggaaacacgcctgactccaggacttgtgttgtcctcactgcactggggaaggtggcgggggcagcttttcaggagggcctggggaacttcgcagagccaggtcaccctctcactctgtrcctcttagttatcttgcatgctctggtctttgcatacgctgctccctgcaccaggaacctccwtccccatctttgtctgcttgtcgaacttcagaaatctgcaagggtcagcttagaggtcacttcttccggaagctttcctcaacaccctccccgccctgctgctgctgccctcaggccctcctctcacagcactgataacagctgtccgtctccaccctcccaccacctccactcccaccccaggaagtgaggccagagggcagggacagagctgctgctgttctctgtgtgccagggcccagcaaagggaatgtagggagrgtgggaggtgcagggcagctgggattaggggttgagggctgggtgttggaggctggatctggatcctgctttagtggaagtgtccctttaacagcaactggcctggcctggctcgggccctgctttgcctcctgttcagctgcggctgcagctgccrtgctgactcatgtgcccgcagctagcaggagctggcagcatgggctccccaggggctacgacaggctgggggcttctggattataaracggagaagtatgtgatgaccaggaactggygggkgggcgccctgcagaggctgctgcagtttgggatcgtggtctatgtggtagggtaagagagaagagcttttggccaggctggaggggcaagggaagaggtsggggrtggggcttggtcctgctgggttgaagttgagggttgggctgtttaggggctggagtggaagggggcagattgggacggggttggggagagctaggcgatacaagacaggagagcaagaacaagctgtgtgtttgtcctgtgtgtccacttgcctccttcccaggcccccacccaggccccacccagggggcacatgacatagtccttaacatctgtgagagctggagcactaggcccccagagagaccaccagctgtatctcgggtcaggagagtctgtaagggggaagctggatctagtcaggctgggggtgggtgctggctagtgaaggtgattgtctgagrgcattggctctctgatgcatggctggagcttctgtctcattcagggggtctggagtgggaagtggggccagagaggaggtggggccttcgatgttgggccgggagcctgtagggtgtggggggagaactgagcatgtagggctcagctccgcccctgtcactacacgctggggacacaccacactgcccgacttctcctccccaggtgggckctcctsgccaaaaaaggctaccaggagcgggacctggaaccccagttttccatcatcaccaaactcaaaggggtttccgtcactcagatcaaggagcttggaaaccggctgtgggatgtggccgacttcgtgaagccacctcaggtgggggccctgatgttgctgacgggggcgcaagtcctttccccactgacagcctgaacacccgccatgcagccagtgtgtgcgagagagaagcatgtgatgccagagacggctgcgggttctcaggaagggcttcacagaggagtggcacctggacaggactttcagggatgtgtaggaggttttggggtggaaaaaggggccactcaagaagccaggccagggttggacgtgctggctcacgcctgtaatcccagcactttgggaggccraggcaggtggatcacgagattgagagtatcctggctaacacggtgaaaccccatctctattaaaaatacaaaaaattagccgggcatggtggtgggcgcctgtagtcscagctactcgggaggctggggcaggagaatggcatgaacccgggaggtggagcttgcagtgagccgagattgcaccactgcactccagcctgggtggcaaagcgagactctgtctcaaaaaaaaaaaaaaaaagccaggccagagaaactgcatttccaaagactgccaacagaaaagaagggagtgtccaggactaatggcttgagcttgagagtggtgtgaggtgctggggcatggaacttccctgtagccctgctccctgacctggggcactacggtcaggtgctgctcctcccctcttctcggctgcgttttcctcctccctccacccagctcatccccagcctcaactgccacttctgctcctctgatgcccagggtgtattcccagtgatcacctgcccagagcacagctgtcttctaggtgcacacccacatgtccaaagatcaattattttcctctmctggcatggcctctgtgacgcccactagtcatggtggctgtgacatccactagtgcctcagccagacccgtgactcaccctggaccccttcctgtcccttccaagatttttcaccactacccatgccatgccatgcatgagactatggcctcctagagggtccctagatgcccctctcgcctcctcccttamtgctcggtgcacaccacgcagcagccaagstgaactttcacaccaggcatcatgagagcctgcagcgcctgsttctaccctcaggaattcccccaaccctgcccatgacggtgtccacactttcctcccaatcctaatggctgccactcccagcaccatctggccagccctcaccttcccttcctgggcatacattccccaaattcacagtgctctcacgagcagcactggagggtcagcctttctttccaatgtcctcggccacccgttgaccacagacacagctttccctcttctcccttggcccctgccatgccagtgctgctgtgtgtgagatgggagactcacctcgtctccatcctgagcaggtgctgggcccagctctcccttggatcttcagtactagaagcagcaggctgttggaatattctggttggagccaggcatggtagctggagcctgtagtcccagctacttgggaggctgaggcaggaggacctcttgagtccaggagttagaggttgcagtgagcactgatcacaacactacactccagcctgggtgacgaagtgtaatcctgtctctaaatacacacatacacatgcacacacacacacaaattttggttgagacaagagacttgtctcaagagatggacatgggcacaaggcttcctggtctcaaaaatggccagaaccactgccagcctcccatctctgsttcagtctgccttacrggggkacagggttaatgacttgatggggccaacatcccttccctcataaaccaggctgccggcttccggcctttccagtcaacacgagcccagccaggccaaccttgagacttgcctcctagggagagaacgtgttcttcttggtgaccaacttccttgtgacgccagcccaagttcagggcagatgcccagaggtgagtttacccaggatcctcccarcgggtcccttgttcctccatcagccccaggkggccacccgtgtttccctttccccttcccaggtggstgaaggctcagcctgtgytcggtgtsccccaggcactgggstacatcttttcctgaatcattatgttcagtcttcacatatcccctgcctggtaggaagtcctgtgatccccatttcagaggagaagactgaggctcagtgaggttgagtcactttcttaaggcctccaggcctgtgggtgacaggaccccgagctctgggcagcagcagttcccatgaggtgtccaggccctcccatcctggtcctgcctctgggtactctccaggttggtagtgtgacacccagagctgcgcacatgctcagggaggttctaatagcaagagccaagctggaatatcacctccccttgtctgtgcccagcctctattaatatgtcctgaggcagctttcatctttgtgggccaacacagcacactcttgctcatggtgaattcaggattgcttatgatttctggatagttttttttgttttatttttgagacggagtttcactctgtcacccacgctggagtgcagtggcagatatcagctcactgcaagctctgcctctcaggttcacgccattctcctgcctcagcctccggagtagctggtactacaggcgcctgccaccacgcccagctaatttttttttttttttgtatttttagtggagacggggtttcacggtgttagccaggatggtctccatctcctgacctcatgatccacctgcctcggcctcccaaagtgctgggattacaggcgtgagccaccacgcccggcctgatttctggatagtttttacatcaaccgtggtcaagccagagtcccccaccttgttcttcttcatttctgatccagaaatgctgattctccccctgacatttcaccttttccccttgcctggggatgtccctgggatcctgcatctgtcacagagcatgctcattctctccagctgtgaattttgtttgaactattgggactcaggacatagtcctgaaagtttacctccacagtgacatctttaggcaagtccaacatttacgtgcytcctgggctggagggtcgttgtgcagacagctgtcccctgagccctggtggctggtcctagcacagttgctggagacatcccatgtccgtagttggaaatatgcacaaaggattgcttactctttttgtttgtttgtttttttgasatggagtcttgctcttgtccccaaggctggagttcaatggcacratctcggctcactgcaacctccgcctcctgggttcaagcagttctcctgctcaccccctgagtagctgggattacaggtgcccgccactgtgcccagctaatttttgtattttaagtagagacggggtttcaccatgttggccaggctggtctcgaactcctggcctcaggtgacccaccagcctcggcctctcaaagtgctgggattacaggygtgagcctgccgagagcttggtcrgggagacctgaacccagcggtgctaaaggaattaaagacaaacacacataaatatagaggtgtggagtgggaaatcaggggtatcacagccttcagarctgacagcctcgaacagatttacccacatatttattgacagcaagccagtgataagcattgtttctayagattatagattaactaaaagtattccttatgggaaacaaagggatgggctctggttggttakctgcagcaggagcatgtccttaaatcacagatcgctcatgctattgtttgtggtttaagaacgcctttaagcggttttccgccctgggtgggccaggttttccttgccctcattccggtaaacccacaaacttccagtgtgggtgtcgtggctatcacaaacatgtcacagtgctgcagagattttgtttatggccagattttgggggcctcttcccaacatgagccactgtgcctggcaggatgtgcttactcttggtgaacccacacaatgtccttctctttcttaatgctcagatgtgcatttagtgttcagtttgtagaccgttctgaaatttggctggatctgtgggtctgtgtttttcagaatctgtgcaattcctctttgtctgcaaccacacttctggctcttcccrtgaaacgtcagggctgggtcgtaattatcagatctgacaacctggctttcccggaagaccagagttctgccagctcctctagggatcctggtgcctgatccctcccttacatgcaccatgctctttatagtgtcacctccctcagcagacacygctgagcctccccgctgggccagggggctagctaggctaaattcacaaaactccatctcccatacttcaaagaccacccacatggacagcccagcccaggtggcaggtcckatgatgggacagaggctgtaggtgggggacctagggctgcacttgagcagaatcttttttttttttttcytttttttttttttgagacagagtctcgctctgtcacccaggctggagtgcagtggcgtgatctcggctcactgcacacctccacctccttggttcaagcgattctcctgcctcagcctcccaagtaggtgggactacaggcacacaccaccacactcggctaatttttgtatttttaatagagacagggttttgctgtgtcggccaggctggtctcraactcctgacctcaggtaatccgcccaccttggcttctcaaagtgttgggattacaggtgtgccaggccaagcaraatcttaaaaaaaggtggggagaagctggtgagcaggtggatttggttgaagcaggatgtcgacacagagggggcttggtgggtaaaggccctgarctgtgtgaggtgaggtgcctttagggctacctgccactgggtggagctgaagtgaagatttggactggggtgggaagaaggtagttcaggatttcaggggcccctgtaagccccactaaggagctaaactgtttttgyttgkttgttttctttttctcttttcttttttttccygwagcaatgaggtcttgctttgttgcccaggctggtctcgaactcctgagctcaggcaatccgcctactttggactctcaaagtgctaggattacaggcgtgagccactgtgcctggcaggagctaaacttgattagaggaacagaagagagccacacgtgggctcagaggcagggtgctcagtttcctgcacattgggatgcaccacttgggctgctgggcatasgtggatgagggtatgggaagacgtgggggccccactggtggtcactgtggggtctagttggaggagacggtagcccagctggggtgaagaggagaggcagacacaggacataggtagggacaaagaagcagagcatgtggctctgctccgacctccacccaatcabgacggccctgtctttcagaaagtcccaccgcctcattctggcttctcagaggccctcagccttccttgcgcccctggtgctggtgttcttcctgctgcccctgagctgagtgccctgggcagcagtgtccatcctcagttggggcaggaccatgcctgggagagtgcccgatgctcaagggtgccttcgtctctggggtctgggaccccagaaagctcacctgtcctccccttctgccagagccccatagtccyatgcctctgtgcaggcattaatgtccccaggttacagaagagcgagcaggaaggagtagcctgtggtccctcagcaagggtgtggggtcctgcttcaatacccaagcccctgactctagggccctgatctttgtcagctatgtccccatgccgggcatcaaaaactcaccctcccaaggtatcttmaccttccctgatctgtcatccaaattggaccagaggagctagacctggaagaatcacttccgcatccaccagggacagaactgtcaggagggaaggggcagggtgcgttgtctcacscctgtaatcccagcactctgggaggstgagacagaaggattgcttgaggccaggagttaaaaaccagcctggtcaacatagcaagactccatctctacaaaaaaaaaatattaaaaaatcagccaggcacagtggtgtgtgtctgtagtcccagctactgggaatactgaggtgagaggattgcttaagcccgggagggcgaggctgtagtgagccatgatcataccactgcactagagcctggacaacagagtgagaccgaatcactaaaaataaattttttgaaaaaggaggaaaggggtctccctttgtctttgaaatacagtactgtaccttcatctggccagggcattgctccgctccctcctctgaccacctccttttatttgcaccctccagctttcctgtgtggccccacactcagggtactctggcggcggggtggtgaggttgtttaaggtgggaagkgggcctgtccttcccaccttgaacctccctgcctttgagactgggctgtggaggggagacatcccctgtgccattggtgactgctctctctcccacctcagcacccgtccgtcccactggctaactgctgggtcgacgaggactgccccgaaggggagggaggcacacacagycacggtaactgtgggctctgtcttccagtgccccyagcagggtgggggccgggctgggatcctgggtggctcctgagtgcaggccctgctcgcctctgtccctgcatctctctttctgccaacaaccccctggctgaaggcctccccaggcctgcagagatttgaaggtctggagttcatcttttgttttctaggtgtaaaaacaggccagwgtgtggtgttcaatgggacccacaggacctgtgagatctggagttggtgcccmgtggagagtggcgttgtgccctcgtaagtgtcyccacaatcccctaccccaactggcgcagggccccaggcctggcagaggctgtcacctcccttccacctgcaggaggcccctgctggcccaggcccagaacttcacactgttcatcaaaaacacagtcaccttcagcaagttcaacttctctaagtaagcagagtgggtctcatctgccccaagaccctccttgtcccctacctcatctgacctttcccactcctcccaggtccaatgccttggagacctgggaccccacctattttaagcactgccgctatgaaccacaattcagcccctactgtcccgtgttccrcattggggacctcgtggccaaggctggagggaccttcgaggacctggcgttgctggtgggtcccaagttgggggcagggttcctagagggctctgggagagggtcccgggcccacccaccggtggaaaagctatgtgctatgtgcagggtggctctgtaggcatcagagttcactgggattgtgacctggacaccggggactctggctgctggcctcactactccttccagctgcaggagaagagctacaacttcaggtgaggccccacwgctcccagtgcccagmtgctgggcccatcgccytctcmctgtggcggccaggacagaccacacmcaggcccaggcctctagatattccactacgtgtgcaagggggtcccaggagcaggagagagctgttctcaaccccacatyctccagcacaggctccgtcctgctgccccaagtcctgarccctccaccccatctgtcccaggcccckgcccagctcaggctcctcactgccagcccttcctccaccccacctcgcttctagtatctcccctccacagcaatggggtgtttcatttttactttccccttctccccttcagctttgttttttttttttttaagacagaatctcattctgtcacccaggctggagtgcagtggcccgacctcggctcactgtaacctctgcttcctgggttcaaccgattctccttcctcagcctcctgagtagctggaattacaggtgctcgccactactcccagctaatttttatattttggtagatagagatgggttttcacaatgttggccaggctggtctcaaacccctgacctcaggtgatccacccacctcagcctcccgaagggctaggattacagacgtaaaccaccatgtctggcctcccttccgcttttacctaaactttttttttttttttgagatggagtctcactctgtcgcccaggctggagtacagtggcgggatctcagctcactgcaagttccgcttcccgkgttcacgccattctcctgcctcagcctcccaagtagctgggactacgggtgcacgcctccacgcccggctaatttttgcatttttagtagagacagggtttcaccatgttggccaggatggtctcgatctcttgacctcgtgatccacctgcctcagcctcccatagtgctgggattacaggcgtgagccaccacgcccgacctttttttttgaaacggagttttcactttcttgtrgtccaggctggaatgcaatggcgtggtcttggctcactgcaacctytgcctcctgggttcaggtgattttccagcctytgcctccagagtagctgggatgacaggtgtgcaccaccacacccaactaatttttgtatttttagtagagatggtgttttgccatgttggccaggctggtctcgaacttytgacctcaggtgatctgccsacttcagcctcccaaagtgctgggattacaggcatgagccaccaagcctgttttttttgtgttttttttttttttttttttagatgaagttttgctcttgttgcccagactggagtgcagtggcccgatctcggctcactgcaatctttgcctctcgggttcaagcaattctcctgcctcagcctcctgagtagctgtgattacaggtgcacaccaccacacccagctaatttttgtgtttttactagagatggggtttcaccatattggtcaggctggtctcgaactcctgacctcaggtgatccacctgcctcagcctcccaaagtgctgggattacaggtgtgagccactgtgcctggcctcaagtttcataaattgcatttattatcatgtctttgagtcttctaagcagatctattggatccttctgccaccgagcgtcacctcgtcatgcaggcaggcacacacgaccaccaggcctggggatgatgcccctcaacatagctcactgcaccccgtctgatctggcttccccaacctccccagcccttcgaaaccacgtggggctggctcccacccacatcctgttcccctgacctctgtgytggcaaaccacctgtgtgcatgttccttcaggcccagcctcatgtcccctccaggaagtctaccccagttcccagggaagagtgagttcccatctctggaatccctcagccctgagcctgccccttcacatcccccgctgctgggtctgtttagggactcctctgtcccccgtcctctcagcaggcagggaacttctgagggacaggtcttcgtttgctttttctgttttctcaccaattacatagggctgagacccaggactcaggcttgggctgggggtttatagagtcaattgacaagttggacagaggtctggcagggccagccccacctgggggtgggcaaagcangtcaccagagccttctttcctgcccacaggacagccactcactggtgggagcarccgggtgtggaggcccgcaccctgctcaagctctatggaatccgcttcgacatcctcgtcaccgggcaggtaggcacaggtaggggtcaggccggggatgggatggggcaggcagacagggctggaggaggcatgaggctgacagtcgtgggctgagaggttcagctcagatctctctcaggcagggaagttcgggctcatccccacggccgtcacactgggcaccggggcagcttggctgggcgtggtgagtgcgarcactgtgggcacctgcaggctgcagtgagtgctgctgaccagggtgtgtccaatgcatgctggagcctccggtgcctgcacattgagtctcggggtgcaggctggggaggtggcaggaragcaggctygggggctggaacatgggttggccctgcctctcccaggtcacctttttctgtgacctgctactgctgtatgtggatagagaagcccatttctactggaggacaaagtatgaggaggtgagctgaggtcgctctgcttggaccctgggttctgccacacttaggaagatgttggctggatccctgacctgctgtcctcatctgcaggccaaggccccgaaagcaaccgccaactctgtgtggagggagctggcccttgcatcccaagcccgactggccgagtgcctcagacggagctcagcacctgcacccacggccacwgctgctgggagtcagacacagacaccaggatggccctgtccaagttctgacacccacttgccaacccattccgggagcctgtagccgttccctgctggttgagagttgggggctgggaagggcggggccctgcctggggatytcaaggatgaggccccagcatggaggattgggggtagaattccacccttgaaccccagcaracagtccctcccctgactcccaccttggtagggtgctgcctcagggagccataraagtcggctgtgttttgagacggcgacagaacctgacccgtggagactgggagagcccagcaggcacctgtattgcagggctccgactgcatgtggcaggggctcctgctgcgtctgggcctgraggtctctctcccagtgctctgtccccagtgttcctagcagaggtatgcttaccagctgtcagcacaraccctcctgctgcctgggtcctggccctcctcccccatctgcacccccatcataggtagagaccccaccctcccatcggtcctacatggggctgtgcagctggagccaaaaaggcaaggyagaaagaggagtgatgggggagggggattgtttcagcttctctggtgctgwgatgccccaggagagtcctaatctagggaatggggtggagtaggcagataatccacctccctatcccccaggcaagggcggagcatgtgtcttgggcccacacctgcttagtttatgaggaccggctgctttccagtggtagcccttttgccatggaggtctgggagagagagcagagggcggcagggctaagttggtgatcaytgggttcttcaggaccttctatatccctcctcggtraccccccagcccaaccccttggaatctttcctccaggcttcctgagagccctgggggtgggaggctgtgggaggctgtacatctgaaattcacttcagtccaagtcatacctaggaagctgtctgggcagctgctcgagggaggccctggctctgatcccaggctggatggagtggctggaaggaatggttccaaacaacaccaccgagatctccctcaggctggccaggttttgcagctggaattctcctcttggtcccagggcggggcagggaattctaagtgtccaccccagggaggcaaggggctgctttccactgtgggtacctggtgatcagggcaagctgtggagggccaggggtggggctgagactgggctgacatctagaatcacctgccacctggagcctcagtaaaatgcctggggtccctgctgcctctcaatctccagagccatgtccatggggaggtgggctctgaagggygaaggtgggagagcagggcccctgaggcctgggtatccaasgargggcacgtgcacctgattctccttggggcccagaggaagctgatgtcatggctggacaaagtcacggagtaaagccagcaaagccaccctcttcctgtgtagtccttacaggcatgactggaaagttggggggcatytatggtagacatggcacagccatgaagagaccagtggggtggtgcagggtggacttggggaccctacccctgaagactgaggccctgcagctaccaggtgggctagaaggtaactggaacaggcctgggcactygtgcacccatgtaggagcatgagggccacactcttttcacctcaaagcccttgaagagtgggcaaagacagcaagagagctgcagcctgggcccgagctcagaaacagctgtcgcctcagtctgcgcacargcatgcaccccagsgtagtgcctgcagggatgcatgtgtccccgtgggggtgcctgtgccaggcaggcctcaggtgcatgccatgctcagaaccctgctgccctttctaggcagcctccttggggcccaagctctgctccctggatctgccacctagcagacgtggggagcctgaccccatgcctgtcatggaaccctccttgcctggtgtgtgtggctcccctcttcactgggcacctggatccaggccyacctgtgtccctgactcagggtggtcccaggmctggcacctactctttagagagccccagcatctttgatgtggattggagacaattgcctggttccctggggcaggtgaagacttggtgccacaaagaatgccacagtggatacgccagcaggccacatggctggccaagcaattattattatggatcccttgggctgtgggccttcccatccaccccaccacaactgcccaggtagctggarctgatcataaacaagaaggctctgggcagagtccatggcaccagcaccagccaaggcccactcctgaagacccgaagcccagcccctggatgaaggtcctaaggtcctgaggactccccagcctgtgcaggcctgcaaacccaggctgcccacaacagaaggggctctcggctygtctggcctctctggcctcccaagcaggtrtgggagggcggggcaagtgtgggctgatcagctactccatatggccagggtcctgtgctggtgcctggctggggggctgcatagcctgcactgtctcctccaggctgcccctggggaataccacgtagtgtgtggagttcagccctggcagctcccgctggttctccttgctatgccggatgccatagccgaaatacactgcaagtcctagacagggcaggaggcagggcatgagcctgaggtacaggttccagcccttcctgtcctctttgccctcctcctgaccccggtcccagcctggcccccactcacccatcagcagccagatggagaagcgcacccaggtcagatagctaagtttcagcatgaggcagatgttgaggacgatgctcagggctggaatcaggggaaccatggggatctgaggaggcagaggcagggcagggctgggccgggctgcaggaaagatctgccagcccagggctcactttctcgggaatccatagagcctttgttcctcacgggagattgtggagacatgtgctcactcaccatgcagaaaggggtgcgggatgggtgtgtggtcctccccagccccgtgagacttgttcattctgggatggtagtgggggaaggggaggcasctgcctgggccgagtgtgagtgggtgttggctaggggaggtacctgaaataagtcttcccgatactgttgctggtgagcccccaggacaaggaggstgagcagaaacatgacactggtgagcaggagcagcaggatgtaaccccagtgtgggaggtgcagggtcgagttcccaaagacaagcacgcagcctatggtgatggctgaggccaacataacgccaagcgcccaagtcaccactgctccagggctgtacccatccaagaagcccaggtagggcctcagggctggcttcagctcccctggctcagggacggaggcgtgtacagtgcccaccagctgtaggtggtctgagaaggagctctgctgcttggtcagggggccagggctggctgggcctggggagctgggcggggaagacttctggaagcgcagcacaatgatactggtggccacgaatgtgtaggccaggagtgtgccaagggacaggaactgaaccagcgactccaggtccagcagcagtgccaggaaggccgtgaggagcccgaacgccagggtgccygccacaggcacctgtgtccgggggtgcacatgggcaaacacctggaagaagagcccatcggyggccatggcatagacaatgcgtggcagggagaagaggaggctgagcaggacggtgttcatggctgtagcagagagagtggggagggtcagcatggcggagaagcccaccaggggcctctgctgggggtcggtgcatgggtggctccttgggaacaagggcatgagcttgtctgggctctcagagtaagcatgagtttgtgtaggagtaatagattgtcagcgctttgcccaagaacaggacatctgggttaggtcacaggcccactggagcatcggatgagggctgagtccctctgcctaggaaataatctataaggacatgcccagaactaatatgctatggaccatgtgtggggcggtcccttccaaagtttctgaagaaactttttttgaagtgaagagtttctaataattagcactttccttgccccattatgcaactagtaaaacagccccagttgaaggtgcattccccaagaatctgaggacaaggtcccccttgctcttttccctgccaccctgcccaggaagagtctctcaccgcagatggagccagctgccacgatgaagccagcccacctgtagccccgctggtagaaggcatctgcaagcgctgagtcggggtccaggctgtgccagggcaccatgagggttagcacggtggagacaaggatgtaggcaccagctgcaatggcaagcgagatggcgatggccagaggcacagaccgccgtgggttctgggcctcctcactggaggcggcaatgacgtcgaagcccacgaaagcatagaagcaggaggcagtgccggccatgacgccggagaagccgaagggtgcaaagcygccttcgtcagcgctccagttgtgaggctgggccaggatgaagcccaggatgacaatgaagagaatgacaagcaggctgatggccgagaaggtgtgattgagccaggaggacacgcgggctccacaggagacaaaggcagaggccaggaggatgatgccagcagccaggaagtcygggtagtggcccaggaggggcacctgccaagaacccacgtgggtctcagtgaagttgcggatgctgtggctgaacatagagtccaggtagccactccaggcacgggccacggcggcgccaccgatgatgtwttcgaggagaacattccagccgatgaggaaggcccacagctcgcccatggatacgtaggtgaacaggtaggcagagcccgtgcgtggcacacgtgccccaaattytgcatagcatarggctgccagcagggaggccacasckgccacaccgaaggacaagagcacagcagggccagccacctccttggccacggcacctgtgagcacgtagagacccgagcccaccatgccaccyacgcccagaagagtcaggtccagygtggacaggcagcgccgcagtgacgtctccatgrtggagtcctccagcggcttcaggcggttcagcttctggcataagcgtgccaggctagcaatggtgggcagcccccgggccatggcaggtggcygagaagagcaccgagccagctactggaacctgctagggccagaggggaatgacaggatgcgtagcyggggcctgaccagccttccatccctcctggtctgaccacccccagtcctctctctgtccctgacctggggacctggacaccctcaccaggggcctgctggagagctggaatggggcaggtgtcagaacctgtgggcaggaggtcacaggaagcctggaggccctgtctgcatcccaggcagcaaaggaggcctggtgaggccccacctgctcacccgctcggtggccctgaggggtggggagggagcagctccagggggagcagggtgagaggctgggaacggctcagtggtggggtcycagagccaggtgaaaccgaggcttccccagagtcgagccggacccggaacaggagccgcggctctgcgtcggggcgggtgtggcccaggcagccacctggccacagacagacagtggcggctacatacacccccgcccctgcacccgtggccaggctggggtatccgcgcgccaggcggaatgcargggcgccctgggcccgcacayctccccatgtccgacacgccgctgctgctagagcctgctccgccgcgcccccgtccccggacacctgcgccttcgcctgttcttgggcctgagcccgtcccagtccccgtccccgcaggatctgctgcaacccacctgctgctgccgcagccgctgcctccgctctgagcactgagcccgcccagttcgccggcgccgagcgcagggcccgcccccatcccaggccccccgcgcggccccacccgctgccacacacccagatatttcaccctgcccactctgcccgacctcgcaaggtcgttaccggagctcaccggggtctagggaagccctgtgactgtgactcagtcacagatggagaaggtcagaccgccggctractgactagcctaggtcagttcggggaggttaagggccacgtctgaaagtccgcagcccaccttctttctactgcagcggacacccttcttgatccctcaccccagtacatgaaccccacccagctgggccccagacaggccccacagcaccgtcatgtgagcttcaggcacagtgagttagatgaagacatgggtctggcagagtggcctggggcggtccctgacctctactcttacaatggaagagactgcagccttttgagagagttctgcgaattgagggaatgcattctggctgttttgagcctgcagctaccacgtcctgcaaggaarcaagcagcttctgggaccagcctgcagccctcctgtgggggagtagagctcctcagaccccagtggcagcccttcctagcctargcacctctggcaggccgggagggccctatgggaccccaatascaratccccacttgtgtttatcagcgacagccactgtgtcctgagtactgcattccagtgccccacgccccaggcaggcagctatgcaacaatacacctggctaattttttaattttaatttttttagagactgggtctcactatgctgcccgggctggtctcgaactcttggcctcccaaaaggctgtgattacattcatgaaccatggctcctggyctccccagaacgctatactagacatgtgttcaggcttayatgtggtttgtggaatggaatcttaggagcatctgcagcctatccagcctattgggctggtgacaggatgatggactcccagacaagatggtgccaatttggaacattctgcctcggccagaatgccaataccttctaatatttggctggtattgtctkgaggaacttctcagatggctcccacttycggtgggatggtagcttccttaccccatccctgtgttgcctgagcagacgtcccttgtcctgaaatgtcaccacaaaagtctaggcacttcaggccagagggttaggcagatttgtaatgggagctccccaaaggccttaccaatgastgccttattgctggtgtccagtgttttggagtgttgactttttatctacctggagaaggtgtgacaccacaccctctgccacaggcaccaacatacaacggatatgtgagactaagcagggctgatgcagtaaattgtacatttccagagatatttccctcactactgagtgagacagctacacagagcaaccccacagtgatgcagtgaagacaaaccaccaggaaacaaaaactttctaactcattctgcaaggccaggattaccctgacactaaactcaacaaagacatcacaagaaaagaaaaccacagaccaaaatcccttatgaatatagatgtagaaatccccagcaaaacacagtggactcttgaacaacacaggtttactaatacatagatatttttcaaccaaatgtcgatcaaaaatacagtatttggctaggcccagtggctcacaccggtaatcccatcactttgggaggctgaggygagaggatcacttgaacccaggagtytgaggctgcagtgagctatgatcctgtcactgcacttcagcctaggtggcaaagcaagaccctgtctccaaaactactaaataaataaattaaaataagtggtgggtgcctgtaatcgcagctacttgggaggctgaggcaggagaatcgcttgaacccgggaggcagaggttgcaatgagctgagatggcgccattgcactccagcgtgggtgacagagcaagactctgtctcaaaaaaaaataaaaaacaaaaaacaaaaaattcatatggaaatgcaagggatccagaatagccaaaatacttgggtattttgcctgggtaacatagggagacctcacctctacggaaaggtaaaaaaattatatgggcatggtggcatgtgcctgtggtctcagctactgggagtcgggggtggtgttgaggtggaaggatttcttgagcctgggaggttgaggttgcagtgaggcatgtttgtgccactgcac

SEQ ID NO: 1654 - DNA, 15862 bp, Homo sapiens
  misc_feature (1)...(15862): n = A,T,C or G, or insertion/deletion polymorphism (see Tables 1-2)
ggcagaaaccaaagagaatatttcaattggtcacagagccatgttctcaagacataaaacaagatatgataaaccacacaacagagacatggaaaacaagccttatttctgggaggctgtgggtcaatagccactatgtatgcagagccaaataccaaattcggaagtgtgaaatcaaataattcttttttttttttttttgagacaaggtctccctctgtcacccaggctggagtgcagtgctgcaatcatggctcactacagcctcaaactcccaggatcatgcaatcctcccacctcagcctcctgagtagctgggactacaggtgcccgccaccatgccgggctaatttttgtatacttagtagagacggggtttcgctgtgttggccaggctggtctcaaactcctttcttaagttatccagccacctcagcttcccaaagtgctgggattacaggcgtgagccaccaccaagctgttggaactttacattattatgagcctcaggaggaatgtggccatgtggcctgaggcatggagcatgcagttgcaacttctgcttttccctgtaaatggttagaaatgtctgagcagcatcagagataagatgacctcagagcttgacttcttctcacagaatgttgaaacaattttccttggaatgtagcaagctgtactaatggaatctaacatactggatttgtacagaagatgttgcaatcctgctgacactgtttctgcctctatgagtgaaaccttagcttccccactttggagcaatgaccccaaccctttggaagctgtttcctgggtgtccatcctcaagctttgcactagaataaaaatcatatttcctttggttttttttgtttttgttttttggagactaggtctgtgtcacccagactggaatgcagtgatgtaattatagctcactgcagcctccaactcctgggttcaagtgatccttccaccttggcctcccaaagtgctgggattacaagcataagccaacgtgcctagctgatattttctgaatctcattatttaaggttgacataagagtcataactcaaagaatcaattcttaccatgcttttctcctgccagtttgaatttagaaagggacaaggaaaaattttactctcctctttcaaccaggcattacagacagagatccagaagagttcactttgggctgggcgcagtggctcaygcctgtaatcccagcactttgggaggccgaggcaggcggatcacgaggtcaggagattgagaccatcctggctaacacggtgaaaccccgtytctaccaaaaatacaaaaaaaaattagccgggcgtggtggcgggtgcctgtagtcccagctacgtgtgaggctgaggcaggagaatggcgtgaacccaggaggcagagcttgcagtgagccgagatcgtgccactgcactccagcctgggctacagagcgagactccgtctcaaaaaaaaaaaaagagttcactttggtaagaattcctacctgtgcccgcttttatttgttctcccaggatcccatctttaggcttgagaggatcccatccttgtcaccaraaactgtaggggtggcaaaactccacttccatccctagagtctcagctgggcccaagaattaaattgacataggacaggttaacagaagaaaagcacataaatttatttatatgctattytacatctgatttctgttctttaatcttgcgaacagagtccctaaggctagccattatatttatttataaataaggggtgctggagtgcagtggtgagatcacagctcattgcagcctcaaactcctgggctcaagctatcctcccacctcagcctcctgagtagctggaactgcaggtacatgccacccaccacaccaatctaattaaaaaaaaaaagtgttgaaccgggatctcactatattgcccagactggtcttgaactcctggactcaagcaagcccccctcggcctcccaaagcactgggatcacaggagtgagccaccacacagtcccacaaatttattgagtacaagttttacatgggttgggaaccctcataaggacatttgaagacccaaagaagaagttagagtctgttacttatacactgaattggacaaataataataagttatgaagaggcaactaaattatatggggaggcttaaaagataacagtgttttaacaaggtctgtatagaattctctcatttcaacttctcatccttgaagataagaatgttgcatctttcacatggcaacttcatctcctgcattttagaaatagcacaggcctggttgggtggctcacgcttgtaatcccagcacattggggaggttgaagcaggtgtatcacttgaggaaatgagtttgagactaacctggccaacatgggaaaaccccatttctactaaaaatacaaaatttagcctggtgtgacagtgcacgcctgcagtccccagccattcgggaggctgagacatgagaatcgtttgaatcctgaaggcagaggctacagtgagccaagatcactccacttcactccagcctgggcgacagagtgagactctgtctcaaaaataaaaaataaaattaaaacgagctattcagccatgaaaagtcatagaggaatctcaaatgcatattattaagggaaagaagcctgaaaaggcaatatactctataatcccaactatataagattctgcaaaagtaagactagactatggagacaggaaaaagatcggtggttgccaggtgttagcagggagggacaggcagagcacagagggtttttagggcaatgaaactactgtgtgtgatacaataatggtgtgtctatgtgtcattacacatttgtccaaacccatagaatgtacaaccggaagaatgaaccctaatgtaaactatagaccttgggtgataatgatgtgtcaatgtaggttaatcgattgtaacaaatatgcccctttggtgctggatgtcagtagtgggagagggggctacacgtgtgtgggagcagaagtatatgggaactgtactttctgctcaatattgctgtgaacataaaactgctctgaaaactcaactttttttttttttagatacagggtcttgctatgttgcccaggctggagtgaagaggctattcacaggtatgatcaagcycactgcagccttgagcctcctaggctcaagccrtcctcccaactcagccttctgagtaactgagactacaggcgtgtaccaccattcccagctaataaagtctatttttaaaaaatcacttgacgataaatgtaactgtttatttgtggactgtcaattctattccgttcatctatgtgtctactcttatgtcaccaccacaatcttgattacagtcattttgcaatcagtttagaaatcaggaattgtaagtcctccaaaactttttcaaaagtattttgactattctggatcccttgcatttccacatgaattttgatgatttttgcaaaacaggtagttgggatttcaataggaattgcactcaatctatgcaacccctgaatctgtagaccagtttggggaatactgccattttatatttaaagtcttacagtctatgaacatgggatgtctttccatttatttatgttgcctttaatttctttctttacttttttcttttttttttgagacagggtctgactatcacccaagctggagtgcagtggcacaaacatgcctcactgcaacctcaacctcccaggctcaagaaatccttccacctcaacaccacccccgactcccagtagctgagaccacaggcacatgccaccatgcccatataatttttttacctttccgtagaggtgaggtctccctatgttacccaggcaaaatacccaagtattttggctattctggatcccttgcatttccatatgaattttttgttttttgttttttatttttttttgagacagagtcttgctctgtcacccacgctggagtgcaatggcgccatctcagctcattgcaacctctgcctcccgggttcaagcgattctcctgcctcagcctcccaagtagctgcgattacaggcacccaccacttattttaatttatttatttagtagttttggagacagggtcttgctttgccacctaggctgaagtgcagtgacaggatcatagctcactgcagcctcaractcctgggttcaagtgatcctctcrcctcagcctcccaaagtgatgggattaccggtgtgagccactgggcctagccaaatactgtatttttgatcgacatttggttgaaaaatatctatgtattagtaaacctgtgttgttcaagagtccactgtgttttgctggggatttctacatctatattcataagggattttggtctgtggttttcttttcttgtgatgtctttgttgagtttagtgtcagggtaatcctggccttgcagaatgagttagaaagtttttgtttcctggtggtttgtcttcactgcatcactgtggggttgctctgtgtagctgtctcactcagtagtgagggaaatatctctggaaatgtacaatttactgcatcagccctgcttagtctcacatatccgttgtatgttggtgcctgtggcagagggtgtggtgtcacaccttctccaggtagataaaaagtcaacactccaaaacactggacaccagcaataaggcastcattggtaaggcctttggggagctcccattacaaatctgcctaaccctctggcctgaagtgcctagacttttgtggtgacatttcaggacaagggacgtctgctcaggcaacacagggatggggtaaggaagctaccatcccaccgraagtgggagccatctgagaagttcctcmagacaataccagccaaatattagaaggtattggcattctggccgaggcagaatgttccaaattggcaccatcttgtctgggagtccatcatcctgtcaccagcccaataggctggataggctgcagatgctcctaagattccattccacaaaccacatrtaagcctgaacacatgtctagtatagcgttctggggagrccaggagccatggttcatgaatgtaatcacagccttttgggaggccaagagttcgagaccagcccgggcagcatagtgagacccagtctctaaaaaaattaaaattaaaaaattagccaggtgtattgttgcatagctgcctgcctggggcgtggggcactggaatgcagtactcaggacacagtggctgtcgctgataaacacaagtggggatytgstattggggtcccatagggccctcccggcctgccagaggtgcytaggctaggaagggctgccactggggtctgaggagctctactcccccacaggagggctgcaggctggtcccagaagctgcttgyttccttgcaggacgtggtagctgcaggctcaaaacagccagaatgcattccctcaattcgcagaactctctcaaaaggctgcagtctcttccattgtaagagtagaggtcagggaccgccccaggccactctgccagacccatgtcttcatctaactcactgtgcctgaagctcacatgacggtgctgtggggcctgtctggggcccagctgggtggggttcatgtactggggtgagggatcaagaagggtgtccgctgcagtagaaagaaggtgggctgcggactttcagacgtggcccttaacctccccgaactgacctaggctagtcagtyagccggcggtctgaccttctccatctgtgactgagtcacagtcacagggcttccctagaccccggtgagctccggtaacgaccttgcgaggtcgggcagagtgggcagggtgaaatatctgggtgtgtggcagcgggtggggccgcgcggggggcctgggatgggggcgggccctgcgctcggcgccggcgaactgggcgggctcagtgctcagagcggaggcagcggctgcggcagcagcaggtgggttgcagcagatcctgcggggacggggactgggacgggctcaggcccaagaacaggcgaaggcgcaggtgtccggggacgggggcgcggcggagcaggctctagcagcagcggcgtgtcggacatggggagrtgtgcgggcccagggcgcccytgcattccgcctggcgcgcggataccccagcctggccacgggtgcaggggcgggggtgtatgtagccgccactgtctgtctgtggccaggtggctgcctgggccacacccgccccgacgcagagccgcggctcctgttccgggtccggctcgactctggggaagcctcggtttcacctggctctgrgaccccaccactgagccgttcccagcctctcaccctgctccccctggagctgctccctccccacccctcagggccaccgagcgggtgagcaggtggggcctcaccaggcctcctttgctgcctgggatgcagacagggcctccaggcttcctgtgacctcctgcccacaggttctgacacctgccccattccagctctccagcaggcccctggtgagggtgtccaggtccccaggtcagggacagagagaggactgggggtggtcagaccaggagggatggaaggctggtcaggccccrgctacgcatcctgtcattcccctctggccctagcaggttccagtagctggctcggtgctcttctcrgccacctgccatggcccgggggctgcccaccattgctagcctggcacgcttatgccagaagctgaaccgcctgaagccgctggaggactccaycatggagacgtcactgcggcgctgcctgtccacrctggacctgactcttctgggcgtrggtggcatggtgggctcgggtctctacgtgctcacaggtgccgtggccaaggaggtggctggccctgctgtgctcttgtccttcggtgtggcmgstgtggcctccctgctggcagccytatgctatgcaraatttggggcacgtgtgccacgcacgggctctgcctacctgttcacctacgtatccatgggcgagctgtgggccttcctcatcggctggaatgttctcctcgaawacatcatcggtggcgccgccgtggcccgtgcctggagtggctacctggactctatgttcagccacagcatccgcaacttcactgagacccacgtgggttcttggcaggtgcccctcctgggccactacccrgacttcctggctgctggcatcatcctcctggcctctgcctttgtctcctgtggagcccgcgtgtcctcctggctcaatcacaccttctcggccatcagcctgcttgtcattctcttcattgtcatcctgggcttcatcctggcccagcctcacaactggagcgctgacgaaggcrgctttgcacccttcggcttctccggcgtcatggccggcactgcctcctgcttctatgctttcgtgggcttcgacgtcattgccgcctccagtgaggaggcccagaacccacggcggtctgtgcctctggccatcgccatctcgcttgccattgcagctggtgcctacatccttgtctccaccgtgctaaccctcatggtgccctggcacagcctggaccccgactcagcgcttgcagatgccttctaccagcggggctacaggtgggctggcttcatcgtggcagctggctccatctgcggtgagagactcttcctgggcagggtggcagggaaaagagcaagggggaccttgtcctcagattcttggggaatgcaccttcaactggggctgttttactagttgcataatggggcaaggaaagtgctaattattagaaactcttcacttcaaaaaaagtttcttcagaaactttggaagggaccgccccacacatggtccatagcatattagttctgggcatgtccttatagattatttcctaggcagagggactcagccctcatccgatgctccagtgggcctgtgacctaacccagatgtcctgttcttgggcaaagcgctgacaatctattactcctacacaaactcatgcttactctgagagcccagacaagctcatgcccttgttcccaaggagccacccatgcaccgacccccagcagaggcccctggtgggcttctccgccatgctgaccctccccactctctctgctacagccatgaacaccgtcctgctcagcctcctcttctccctgccacgcattgtctatgccatggccrccgatgggctcttcttccaggtgtttgcccatgtgcacccccggacacaggtgcctgtggcrggcaccctggcgttcgggctcctcacggccttcctggcactgctgctggacctggagtcgctggttcagttcctgtcccttggcacactcctggcctacacattcgtggccaccagtatcattgtgctgcgcttccagaagtcttccccgcccagctccccaggcccagccagccctggccccctgaccaagcagcagagctccttctcagaccacctacagctggtgggcactgtacacgcctccgtccctgagccaggggagctgaagccagccctgaggccctacctgggcttcttggatgggtacagccctggagcagtggtgacttgggcgcttggcgttatgttggcctcagccatcaccataggctgcgtgcttgtctttgggaactcgaccctgcacctcccacactggggttacatcctgctgctcctgctcaccagtgtcatgtttctgctcascctccttgtcctgggggctcaccagcaacagtatcgggaagacttatttcaggtacctcccctagccaacacccactcacactcggcccaggcagstgcctccccttcccccactaccatcccagaatgaacaagtctcacggggctggggaggaccacacacccatcccgcacccctttctgcatggtgagtgagcacatgtctccacaatctcccgtgaggaacaaaggctctatggattcccgagaaagtgagccctgggctggcagatctttcctgcagcccggcccagccctgccctgcctctgcctcctcagatccccatggttcccctgattccagccctgagcatcgtcctcaacatctgcctcatgctgaaacttagctatctgacctgggtgcgcttctccatctggctgctgatgggtgagtgggggccaggctgggaccggggtcaggaggagggcaaagaggacaggaagggctggaacctgtacctcaggctcatgccctgcctcctgccctgtctaggacttgcagtgtatttcggctatggcatccggcatagcaaggagaaccagcgggagctgccagggctgaactccacacactacgtggtattccccaggggcagcctggaggagacagtgcaggctatgcagccccccagccaggcaccagcacaggaccctggccatatggagtagctgatcagcccacacttgccccgccctcccayacctgcttgggaggccagagaggccagacragccgagagccccttctgttgtgggcagcctgggtttgcaggcctgcacaggctggggagtcctcaggaccttaggaccttcatccaggggctgggcttcgggtcttcaggagtgggccttggctggtgctggtgccatggactctgcccagagccttcttgtttatgatcagytccagctacctgggcagttgtggtggggtggatgggaaggcccacagcccaagggatccataataataattgcttggccagccatgtggcctgctggcgtatccactgtggcattctttgtggcaccaagtcttcacctgccccagggaaccaggcaattgtctccaatccacatcaaagatgctggggctctctaaagagtaggtgccagkcctgggaccaccctgagtcagggacacaggtrggcctggatccaggtgcccagtgaagaggggagccacacacaccaggcaaggagggttccatgacaggcatggggtcaggctccccacgtctgctaggtggcagatccagggagcagagcttgggccccaaggaggctgcctagaaagggcagcagggttctgagcatggcatgcacctgaggcctgcctggcacaggcacccccacggggacacatgcatccctgcaggcactacsctggggtgcatgcytgtgcgcagactgaggcgacagctgtttctgagctcgggcccaggctgcagctctcttgctgtctttgcccactcttcaagggctttgaggtgaaaagagtgtggccctcatgctcctacatgggtgcacragtgcccaggcctgttccagttaccttctagcccacctggtagctgcagggcctcagtcttcaggggtagggtccccaagtccaccctgcaccaccccactggtctcttcatggctgtgccatgtctaccataratgccccccaactttccagtcatgcctgtaaggactacacaggaagagggtggctttgctggctttactccgtgactttgtccagccatgacatcagcttcctctgggccccaaggagaatcaggtgcacgtgcccytcsttggatacccaggcctcaggggccctgctctcccaccttcrcccttcagagcccacctccccatggacatggctctggagattgagaggcagcagggaccccaggcattttactgaggctccaggtggcaggtgattctagatgtcagcccagtctcagccccacccctggccctccacagcttgccctgatcaccaggtacccacagtggaaagcagccccttgcctccctggggtggacacttagaattccctgccccgccctgggaccaagaggagaattccagctgcaaaacctggccagcctgagggagatctcggtggtgttgtttggaaccattccttccagccactccatccagcctgggatcagagccagggcctccctcgagcagctgcccagacagcttcctaggtatgacttggactgaagtgaatttcagatgtacagcctcccacagcctcccacccccagggctctcaggaagcctggaggaaagattccaaggggttgggctggggggtyaccgaggagggatatagaaggtcctgaagaacccartgatcaccaacttagccctgccgccctctgctctctctcccagacctccatggcaaaagggctaccactggaaagcagccggtcctcataaactaagcaggtgtgggcccaagacacatgctccgcccttgcctgggggatagggaggtggattatctgcctactccaccccattccctagattaggactctcctggggcatcwcagcaccagagaagctgaaacaatccccctcccccatcactcctctttctrccttgcctttttggctccagctgcacagccccatgtaggaccgatgggagggtggggtctctacctatgatgggggtgcagatgggggaggagggccaggacccaggcagcaggagggtytgtgctgacagctggtaagcatacctctgctaggaacactggggacagagcactgggagagagacctycaggcccagacgcagcaggagcccctgccacatgcagtcggagccctgcaatacaggtgcctgctgggctctcccagtctccacgggtcaggttctgtcgccgtctcaaaacacagccgacttytatggctccctgaggcagcaccctaccaaggtgggagtcaggggagggactgtytgctggggttcaagggtggaattctacccccaatcctccatgctggggcctcatccttgaratccccaggcagggccccgcccttcccagcccccaactctcaaccagcagggaacggctacaggctcccggaatgggttggcaagtgggtgtcagaacttggacagggccatcctggtgtctgtgtctgactcccagcagcwgtggccgtgggtgcaggtgctgagctccgtctgaggcactcggccagtcgggcttgggatgcaagggccagctccctccacacagagttggcggttgctttcggggccttggcctgcagatgaggacagcaggtcagggatccagccaacatcttcctaagtgtggcagaacccagggtccaagcagagcgacctcagctcacctcctcatactttgtcctccagtagaaatgggcttctctatccacatacagcagtagcaggtcacagaaaaaggtgacctgggagaggcagggccaacccatgttccagcccccragcctgctytcctgccacctccccagcctgcaccccgagactcaatgtgcaggcaccggaggctccagcatgcattggacacaccctggtcagcagcactcactgcagcctgcaggtgcccacagtgytcgcactcaccacgcccagccaagctgccccggtgcccagtgtgacggccgtggggatgagcccgaacttccctgcctgagagagatctgagctgaacctctcagcccacgactgtcagcctcatgcctcctccagccctgtctgcctgccccatcccatccccggcctgacccctacctgtgcctacctgcccggtgacgaggatgtcgaagcggattccatagagcttgagcagggtgcgggcctccacacccggytgctcccaccagtgagtggctgtcctgtgggcaggaaagaaggctctggtgacntgctttgcccacccccaggtggggctggccctgccagacctctgtccaacttgtcaattgactctataaacccccagcccaagcctgagtcctgggtctcagccctatgtaattggtgagaaaacagaaaaagcaaacgaagacctgtccctcagaagttccctgcctgctgagaggacgggggacagaggagtccctaaacagacccagcagcgggggatgtgaaggggcaggctcagggctgagggattccagagatgggaactcactcttccctgggaactggggtagacttcctggaggggacatgaggctgggcctgaaggaacatgcacacaggtggtttgccarcacagaggtcaggggaacaggatgtgggtgggagccagccccacgtggtttcgaagggctggggaggttggggaagccagatcagacggggtgcagtgagctatgttgaggggcatcatccccaggcctggtggtcgtgtgtgcctgcctgcatgacgaggtgacgctcggtggcagaaggatccaatagatctgcttagaagactcaaagacatgataataaatgcaatttatgaaacttgaggccaggcacagtggctcacacctgtaatcccagcactttgggaggctgaggcaggtggatcacctgaggtcaggagttcgagaccagcctgaccaatatggtgaaaccccatctctagtaaaaacacaaaaattagctgggtgtggtggtgtgcacctgtaatcacagctactcaggaggctgaggcaggagaattgcttgaacccgagaggcaaagattgcagtgagccgagatcgggccactgcactccagtctgggcaacaagagcaaaacttcatctaaaaaaaaaaaaaaaaaaaacacaaaaaaaacaggcttggtggctcatgcctgtaatcccagcactttgggaggctgaagtsggcagatcacctgaggtcaraagttcgagaccagcctggccaacatggcaaaacaccatctctactaaaaatacaaaaattagttgggtgtggtggtgcacacctgtcatcccagctactctggaggcaraggctggaaaatcacctgaacccaggaggcaraggttgcagtgagccaagaccacgccattgcattccagcctggacyacaagaaagtgaaaactccgtttcaaaaaaaaaggtcgggcgtggtggctcacgcctgtaatcccagcactatgggaggctgaggcaggtggatcacgaggtcaagagatcgagaccatcctggccaacatggtgaaaccctgtctctactaaaaatgcaaaaattagccgggcgtggaggcgtgcacccgtagtcccagctacttgggaggctgaggcaggagaatggcgtgaacmcgggaagcggaacttgcagtgagctgagatcccgccactgtactccagcctgggcgacagagtgagactccatctcaaaaaaaaaaaaaaagtttaggtaaaagcggaagggaggccagacatggtggtttacgtctgtaatcctagcccttcgggaggctgaggtgggtggatcacctgaggtcaggggtttgagaccagcctggccaacattgtgaaaacccatctctatctaccaaaatataaaaattagctgggagtagtggcgagcacctgtaattccagctactcaggaggctgaggaaggagaatcggttgaacccaggaagcagaggttacagtgagccgaggtcgggccactgcactccagcctgggtgacagaatgagattctgtcttaaaaaaaaaaaaaacaaagctgaaggggagaaggggaaagtaaaaatgaaacaccccattgctgtggaggggagatactagaagcgaggtggggtggaggaagggctggcagtgaggagcctgagctgggcmggggcctgggacagatggggtggagggytcaggacttggggcagcaggacggagcctgtgctggagratgtggggttgagaacagctctctcctgctcctgggacccccttgcacacgtagtggaatatctagaggcctgggcctgkgtgtggtctgtcctggccgccacagkgagarggcgatgggcccagcakctgggcactgggagcwgtggggcctcacctgaagttgtagctcttctcctgcagctggaaggagtagtgaggccagcagccagagtccccggtgtccaggtcacaatcccagtgaactctgatgcctacagagccaccctgcacatagcacatagcttttccaccggtgggtgggcccgggaccctctcccagagccctctaggaaccctgcccccaacttgggacccaccagcaacgccaggtcctcgaaggtccctccagccttggccacgaggtccccaatgyggaacacgggacagtaggggctgaattgtggttcatagcggcagtgcttaaaataggtggggtcccaggtctccaaggcattggacctgggaggagtgggaaaggtcagatgaggtaggggacaaggagggtcttggggcagatgagacccactctgcttacttagagaagttgaacttgctgaaggtgactgtgtttttgatgaacagtgtgaagttctgggcctgggccagcaggggcctcctgcaggtggaagggaggtgacagcctctgccaggcctggggccctgcgccagttggggtaggggattgtggrgacacttacgagggcacaacgccactctccackgggcaccaactccagatctcacaggtcctgtgggtcccattgaacaccacacwctggcctgtttttacacctagaaaacaaaagatgaactccagaccttcaaatctctgcaggcctggggaggccttcagccagggggttgttggcagaaagagagatgcagggacagaggcgagcagggcctgcactcaggagccacccaggatcccagcccggcccccaccctgctaggggcactggaagacagagcccacagttaccgtggctgtgtgtgcctccctccccttcggggcagtcc

SEQ ID NO: 1655 - DNA, 15017 bp, Homo sapiens
atggctccccacatcagccaagaggcccaaccccaggaagccactcctgcccggggatggggaaggtgggctgggtggctgtgtgcactgccctgggccagctcacttgagcctgctgagccgcctggccaaacatgagcctctctcctgttgtatcagatgctgttctggggacctgcgccaggagcctctgccagggctttaaatagctgcccccattgatctggctgcaggcagcagcagtcacactgggtcagcctccatcaggtgctcaggtttccctgaggactggagtcaggtgccagggaatcgcgtggtctaccttatgacctggtgctccccacacctgtctcctaggcctggggggtggggaggactcctgtcacttcatctgcggcaaaatacagcccccaccacttaccagagaaaactgtctggcattgtagagagaggggttttgccctcaaaagactgttgcttactttcagtagaatggggaatgacactggtatcttccttaagggttgttatggggatgaaatgtatgtaaagtgctcaatagggcactggactcactccattgatggctgtctttgctcgaagtgtcttcctgatgctgctgctgttgctgcttgtgcttcttctgtgcttacattctctctctctcactcactcactctgtctctcctctcccccgccccaccccctttctgacaaagccaccaccattttgtaaggaactgtagcttctctctgaaactgccgggaaagggaaaatctttttaaaatagacatcacacaaccaacagggtcccctaggttcaggcggggaggtgaggtcgagtgagaggaactgcttagcatacgcggggatgctcctcccatctcaccccaccgcgctaaggagaaggtcactttctctttaaatgcaaatgaactccctccagcttagctttcacccggtggtgttcccgggaggagagggcggagggcggagggaacttgcaccgaagcatcactcgagaccccaaacctccaggtcagtagccccctgagggagtgagggcgggggcggaatgacgcgggtctgacgctctgtcttcgagcgcggctgcggagctgagcgatgagtttggcacatggctttggagcccgggcttgggaaatagatccccggtcgccccagccgctcctggggagcacaggctccggctccagttcttctatcaggtccctaattgggtcaagctgctgcacggagaggcagaggatgcgctcctatctcccctccccacacccgcagaccccgtcagtggcagccagctatgtgtcagtgtaaatgcttaagcgccacccacccccccaacccccccagtcccagaattcgaagttaggctcggtagcagcagcctggaatgagacccccagaggagggaaccccagccgaccggaggcttggggggcgctgctggaccggggacctcggagcagcccagccacaggcgcagcctttgtcggaggcccaggcagccagcggccaaccacccagtccaccctggctgcagctgaagcccagcagggactttccgactgggaaaaatgaagcagctgaaagcacacccgcgggacctatagggagtccctaatattttcggttgggggtgggtggaagtggagggatgccggtgtctatgtgggggaaacccacaatgaaccctgccctgtatgctgcggcttctcctacaattacccacacgctggggctttcccaggcgcccctacctgcaccttgtccccctcccatgctgacagggtttgttagcatctgcttaggcccctgataaatagaatagggtttagttaagacatccctaatcttcggctgggcttctgcagctcacctccgtcttgtctcccactacatttcctctgccagccccgccccccagccaccgtgacaggaagccccagtagcgccaagatagttgtgactggtcccaccctttcaggaggggcmtargttttcaggcagaaggggaattaggttgggccttakaaggtccttcaagtgtacatccacgatcccagcagcagacactggcatctggctctgcccctaccgtatagatgaggtgacaagctggaaggtcccagggcccttccttggtgcagctctcagggatttctgggtgaagggctaactttgcccctggctatctttgtggggttgcttccctcctaggcctgaggcccagccagcgcccaatggatgacaaaaagaagaaacggagtcccaagccctgcctggcccagccagcccaggccccaggcacactayggagggtccctgtgcctaccagccacagcggctccttggccctaggacttcctcatctgccatcccccaagcagcgggccaagttcaagaggtgggtacagaagggaaggaaaggaggagggaccccaactctgggttgcactgtagagaggaaggcaaggggggcctccgcctttagttcctaagcaataattgatgcctttctggagcagacccctgagaactcagagctcactcagacccagtccctaccctcaactgtgtggcaaaaaggccaggtgggtcactgggatcacatagcgtgaggattcgcctcagaggagggagtgagcaactctgcaagaaagtgaatgttccacgctgagaggcttacctggtataaatatggaagaaagctattacctgaaaggtttcaggaaccacaggtggtttgggggccctggagtatcagggaacaggaaatggtgaggaaatacctgggggcacaatttgaattctctgttgaattttttttatgattgggagtttgcatgctgccttataatgtgtccatgtttgttccccactaaatacaatgtattctttctccagttgctccagataagaccactgtgtttccccctggttttgcacaccacttgcctaaggggcatgaagctcaaggctgtggggagagtagcaggaaaggcaactgggaaggcaggagggccaggctggcaggggcattcaattttatcctgagagcagtggaaattttaagacagtttttttggtttattggtttggctttgttttctatgtatttttgtttttgtttaraagagtttttaaatagaagagggttggctgggcatggtggctcagcctataatcccagcacttggggacgctgaggcaggcagatcacctgaggtcagaagtttgagaccagcttggtcaacatggtgaaacctcatctctgttaaaaatacaaaagttagccaggcgtgatggtgggtgcctataatcccagcaacttgggaggctgaggcacaagaatcacttgaacctggaaggcagaggttgcagtgaaccgagattgtgccactgcactccagcctgtgtgacagtgagactctgtctcaaacaaaaaaaaaawtttttttttaattaaaaaaaaagaagagggctaggggcagtggctcaggcctgtaatcctagcactgtggaaggccaagacaggcagatgacctgaggtcaggagttcaagaccagcctggccaacacggtgaaaccccaactctactaaaagtaaaaaaaattagcagggcatagtggcaggcgcccataatgccagcaacttgggaggctgaggcaagagaatcacttgaacccaggaggcgaggttgcagtgagccgagatcacaccactgcactccagcctgggcaacagagcgagactctgtctcaaaaaacaaaaaaaaagaagaggggcagaaagatattttgggaggaggtaagacagccctggtggcaataagggagtagctgtctctatatacgctgaagactagggaggataagtgactcattcagggtcataaaacaaatgagtgaggcactcagacaggaacccagggaccccctttcaggcactgctctggctgtgttattagcagaaaagacttmtttttgacctcttcacgcctcctcaccccttcccagtgcccaaggggaaccataaagttacccatttatgctagtaagtagatgggcagatgagttagtgcagatagacagataaactggtgcataggcagatggcacaaaagatcrggaggtgcctgactgccccctaccctgtgatcatggtcatgtccaccccacccagagtaggcaaagagaagtgccgcccagtcctggctggaggtggaagcggctctgcaggcacgcccctgcagcactccttcctgaccgaggtgactgatgtctatgagatggaggggggactcctgaacctgctcaatgatttccactctggccggctgcaggccttcggtgagtcctgggggctggtttcagcgggtgtgtggatagggctgtagggcccagtccatggggcatggctgggaccatggttccagggttccagggttccaggactctttcccagggttcagacaggggyttcgttccagggaaggaatgctcctttgagcagctggagcacgttcgggagatgcaggagaagctagcccggctgcacttcagcctggatgtgtgtggggaggaggaggacgatgaagaggaagaggatggggtcactgarrggctgccagaggagcagaagaagacaatggctgaccgtaacctggaccagctgcttagcaatgtgggttcatgtctgggtgctttggttcctgggggcatgaggggtggagaaggtacatactcccaaagccattcctgggccctgggtgaaaaggtgggagtgcatggatccaagagctctgggcccctcaacctccccagaagatagcccccagagcattggggatttggcctggttcccctcctaacagaagcctccctttttctctttgttggcagctggaagacctcagtaattctatgtatcctttccaaggaacccgtctatgtgtgtgtgttcctgagaggtcagtttcctcctctccagccctccaggagtattcacacacaaccaacttccccacctcttgcagtcctgtcagatttagccacagactgcccaaacccaggtacaggaatttagaatttccccaaaattagaagaaaagtggttgtaggggatgttttactactgatcaaaatctttgtgagtactttagctgacatcaatcatagcaaagcttgtccgatgtcctcctatcctttcagcattgaacaattatttttactaatttacactaccacctcacctggtcctcagtcagaaacagcgcgagtgcgcgcgcacacaccccagtgtgtctgacctgcacgatctggatgaagagagagggggtgmgagagggcaggcggggactgcaacctcagtccacagacggcccgagaccctcgtccccggccctttgcacaggtgagggaactaaacctgtgcaagatgggagaccggggtgggaggaaggactggtccaaagcgccacgatccttgacgggcacagccagaagctgcacctggccgagaacgccgagcctgaggagcagtccgctgcgtaggcgtcccacgcaggcccacactgcccctctcattytcttcaaactgtgactttttacagactcgggcgggtgttctgcggccccccaggtgctatgggggaggggggcgttgaatggaattaaaccagaaagaaagcaagcggctccgtgtcctgcttcccctccttgcgcctttcctccyggtctccgcggagacagccctcggttatggaggtmccgcctgcrggattggagtgccccttgcggctgtgggaggggcagtcgggggctggggggacgcaggtacgcctgtcgccaggacgcctctaccctggacggtaggaggttgccgtgggaacggctggggcaaagcccacgcccgcgcatgctcaggagcgacgccgaycaatgacgtacttcgcaggcgcgcgggcgggcctggcagttggcgcccatggagccagagctgctggttcggaaggtgtctgcattgcaggtgcgggggcgggcgcggggttcacaggatttttcctttagggaaatcatggggtctcgtacctggacctcccagcgagatgctaccacgttcagtcccctaactgcgcgccaacctctggagataccggctgtccccaaccgcgctgaggaaagctgggacccacggactccctgccctgcgcgtccccactcccaccacacgctcgcgccggatcagggaaacgggaagagccttaaggcgaggaggggcatccagtctggcatcgtccctcgagccccccggagccctagcgcacagcccacctatcctttccccgccgtcaggtcccctcttgcattcgccgggacgacctcttcaggacagtcctccgagatgccccctctcttaccgtgataagggacttctttcctctcgttctccataccaggcctgcgtccggggcttcttggtccgacgccagttccagagcctgcgagctgagtatgaggcgattgtacgagaggtcgagggcgacctgggcacgcttcagtggaccgagggccgcattcccaggccgcgattcctcccagaggtagaacacacctaggagagaagggaaggagggacttgggcagggtggaacccaccctwcccagtgataagcttttctcactggaagaggcagtagactcacctcctcacaccccactccttaaccctcaccaacttgtctgctagatcatggtgcccagatacttggaagggtttagccctggggctctcacatctctcttgtttctcagaaggcaaaatcccatcagacctggaaagcaggagacagggtagcaaatccagagcaggggctgtggaaccacttcccatgtgaagagtctgagggagaggccacctgggaggagatggtgctgaagaagtcaggagagagctcagcaaatcaaggaagcctctgcagagatcacagctcctggcttcagatgaagcagaacaggaaacccagccaagagaagaccagagacacgacaaggatggagaatccaggtacctctctgcaaagatcagggcaagcccctgaccctcactgtgcctcagcctcccatctgaagagtgaaaggcttgcgctagataagctgcatccctttcccgtcttccctctgccgggatagggccaccacatggttgggcagtgcaggggagggagtttccaaagtctaaggctaggccatttcccagggtctggtccctcaaggttttctccttcctttcttccctccttcacagaagccacagatcaaagactgccccacagccaacctcagcttcaagagcttcagtaccaccgcagccacttggccatggaattgctgtggctgcaacaggccatcaatagccgtaaggaggtaacactaacctggaactctttctgaacatttagggtcaagggtgggggttagggagagacswcctgccatgcccaagcaggcctgcttggtacaatgtatgttctctcccccaacagtacctacttcttaaacaaacactgagatccccagaggcgggcccgatcagagaggaaccccgcgtgtkcctagaacatggggaacaggcctrtgagagggaccagtcacaaccaagcgcaccactggaggaccagtcctacagasacaggaccactggagagctagaacaggaggatgactcctgtcacagggtcaaatcaccccacagatccccaggaagtttggccactacacaaaaaaacattgctggggctaagtgcagagaaccatgctacagcaagtctggaccaccgtcgtctataccatcaaacagccaggccttgggggacaggctcaccaaagggccagacgatrgaagacagacctttggagggacctgcctgctgcagatgaaaatcctggaggaccagacccccagaggtttaaaacctaggaaccattgtcccaggaagtccaggacacagctgtctgcactctatgaggactcaaatattaaggagatgtctcccagaaaactagaccacaaagagcctgactgccgaacagtcaggacacaagagttgggcctctcagaggaccacatcatctgggatggtaccttggggggkccagagcatagtgtcctcgatctctggaggactaaaccacccaaaggccaggcccccactgayagaagctccagagatggaacctccaatgagcctagtcatgaaggacagaaaaagcagaggactataccatggagatcaaagtcacctgagattctgtcttctacaaaggcaggctgtacaggagaggaacagtggaggggcaggccatggaaaacagaaccacctggctagaccctakgaagccaggagaggatcaggttccaaaggggaatgctatgaaagggcagtgagacaagacctcatcctacctccctgaccagctctggcttctgctcctgcccctggccattggtgactagtggggccaagagaagctggagcagagagctggcatgagtatagggaaggaggaaggacacattttcaatcctctgcctgtagctcaatccaaatttgtggataaggggccgggtgcagtggctcacacctgtaatcccagcactttgggaggccaaggtgagtggatcacctgaggtcagaagtttgagaccagcctgaccaacatggtgaaatgaaaccccatctcaactaaaaatataaaaattagccaggcgtggtggtgcatgcctgtagtcccagttactcgggaggctgagacaggagaatcgcttgaacccaggagatggagattgcagtaggccaagatgatgccactgcactccagcctgggctacagagcgagacacggtctcaaaaaacaaatgtgtggctaaggagttacctgggggaagtagaatgagaggtctgttgggaataaaggtttttcttagattctgagtctggctgctttcatttctgcttctggccaggacagattctgggccctgccgttcacttcctactggcatggggcattgaccccggagccagctgggagccatggcccaggaaaagatctagccatcctccttagggaacagctcccaaagctgatccccaattgagctcagccttgtgctttagagtggcaaggaggctctggagagtagggtaacacctatgtttaagtgtgatctccccagggcagatgggataaaaccctgaatgcagataaatgctcctgccacagtctccctctgccttcctgggtgagagggcaggactccacctctgattggcaatgttcccagcccttccttggttgcctggcaacaggtctgtttctctgactgaggatacactatggcaggtggcagtccagcagccaagagggtagtggtgtaccggaatggggacccattcttcccaggctcccagctggtggtgactcaacgccgcttccccaccatggaggccttcctctgcgaggtgacatcagctgtgcaggccccactggctgtgcgtgccctctacacaccttgtcatggccaccctgtcaccaacctggcagacttgaagaacagagggcagtatgtggccgctggatttgaacgattccacaagctccagtgagtgggctggggctggtcaaacagcctagcaagggaggtaacggcaagagcgtgtattcagtacctaccatgtatgtaccagcatgttactggtacttactgaactctatgtagggggggtggttttgcctccattagaaagggaaaacagacagaaaacctgcctaaaagtacataacaaatagttgaactgaaattcaaatagaattctgtgtgttactaatgtttatgcccatcacagccaagatcagcctgtgggaagaccactctcccacagggtgagcccctttttccaaaagctcttcttgcttggaccccctatcactgaacactctaaatccacccatccattcctccccactgtgcataggcatcccagactctcccgttaggctagggccatcctctgttgcaggaggagactgtctcccagggtgggagaagaatttgagtacctgagtctctgactcatgtctggcttccaggtcctactcttagctctcagctgaggttgcttactataatgtaaggatcaagagggagtaagtggctgggcacggtggttcacgcctgtaatcctaacactttgggaggccaaggcgggtggatcacctgaggtcaggtgttcgagaccagcctggccaacatggcgaaactctgtctctactaaaaatacaaaaattggccaggcacgatggctcacacctgtaatcccggcactttggaaggccaaggcgggcagatcacctgaggtcaggagctcaagaccagcctgaccaacatggagaaaccccatctctactaaaactacaacattagctgagcgtagtggcgcatgtctrtaatcccagctgctcgggtggctgaggcaggagaatcgcttgaacctggaggcagaggttgcagtgagccgagatcgtgccactgcactccagcctgggcaataagagtgaaactccatctaaaaaaaaaaaaaaaaaaaaaaatcagccaggcctggtagcacgtgcctataatcacagctactcaggaggctgaggcagaagaatygcttgaacccgtgaggcggaggttgcagtgagctgagatcgcacaactgcactccagcctgggggacagagtgagactctgtctcaaaaagaaaaaaaaagagaaaaaaagaaaaaaaaggccagaggagggaagctaggtagacttagaatctaggcttcattccttgtgtgactttgggcaagtcacttaatttcttggaatctcatacaaaatggagataaaacgacctatctcatgaatgagaatattcttgggatacagcaggatgcataatgcactagtttctagtttctcttgactttttttttttttgagacagggtcttgctctgtcacccaggccrgagtgcagtgcactggcgcgatcatggctcactgcagcctcgaactcctgagctcacgcaatcctcctgcctcagcctcccaagtagctggggccacaggtgcatgccaccatgcctggctaatttttttgttttttggtagcaatgaggttgcccaggctggtctcaaactcctgggctcaagtgatcctcctgcctcagcctcccaaagagctgggattacaggcgtgagctgccatgcccagccttcttgacctttaatctcatggttagtactgagaccccagtctggatttccagacttactcagcacttacccagacagcacttgagcactcaaggggtcctagggcaggttcagctgccaatatcttgtttctggactgagatgattgccactattccatggggagggatatctggtgagctgcgccccaacccaacactgacatctgccaggctattgaggcctcagtctccacaagatgacctgtgatctatctgtcctttcagctatttaccccatagagggaaggacccaggtgggaagagctgcagactacaagtgagtcccggggaacctgtgccccagcccctctgtcttcccactcctcctggaactgcccccaatttggtctgggaagccagggaagcagcaggatctgccagttccaggggggtactttggagccagctactatctttcctggggcgtgggatttcaagacactatttcttgcttctgtcgcagcctttaactccacactggggtccccaaaggaaagagaaagatgtgaaacacagattgggggagggggtggttagaatgtgacttagggaacatctaagcaccgtttggtgaaaggtgtaaactgtcttactcctcctcgcccccttcctgccccagtctggttccggccccctcactccacaccttggatgggcccacccctaaccaaaggccccaactctcctgatttggaggcctgacatgggtttcagggtcctcccgtgactcgccacttgtgtgatggggccattggacggcagctgcctgcaggtgctcccagctatatccagtgagtgccagtgtgagggagcaggggtgttgatgtttgttttagtaaggccaagaaaatggtgttgggtttgttctaggagcctctggttactgttgggaatgtagaagtccagcatgcttgatgggtgaagagagaccagtgttatggttattgctggccctgtgccacccttcccctcacatgtagggactcctggggacactcccccttaccaggctttttgtctcagtgtgttcaggaatggggacctggtaagtcccccatttagtctgaagctgtcccaggctgccagccaggactgggaaactgtgttgaagctcctgactgagaaggtcaagttgcagagtggggctgtgtgcaagtgagtatggggactgcgagggcccaaaagtccccaaagagagcctcgccactggcttcagctgtggctgaggatgaagaggcaaaaggaaagcatgttcccccacatgggacttccccctatgccactgggagagggccctctgcccagccctcagaggcagggtagagcctgggtgcctagaggccagagggcaccttggaatagctgcacccaccccttcagtctgctgaatgtgaagaagcatcgagtctaccagcccttatcctcctcacctctctctcccagactctgcaccctagaggggctcccactgtcagcagggaaggagctggtaactggccattactatgtggctgtcggagaggatgagttcaaggaccttccctatctggagctgctggtgcccagcccctccctgcccaggggctgctggtatgtatgtgggaggtggagcggtaacaggccgggcagaggaagccaccctctgggtctgtgtgctttgactctatgccctctgcccactacaagcctttccttttgtcattgtaggcaacctccaggctcgaagtctaggccccacaggcagggggtaggtgacgcaggggacaatgaggggtgggaagaaggggagtgactggctgacaactcttctggcacaggctctgaccttatttcactgcatcctctcttttttctttttctttgagacagagtcttgctctgtagtccaggctggagtgcagtggcaggatcttggctcactgcaacctccgcctcccaggtcccggttcaagcaattctcctgcctcagcctcctgagtagctgggattatgggcacgctccaccatatccagctaattttgtatatttttagtagagatggggtttcaccatgttggccaggctggtcttgaactcctgaccttgtgatctgcccgcctcagcctcccaaagtgctgggattacaggcgtgagccaccgtgcccggcctccttttttcttttaaatatagagatgagtctcacgatattgcgaaggctggtcttgaactcctgggctcaagcaatcctcccaccttggcctcccaaagtgctgtgattacactatgcccagcctgcatcctcttaataatttttttttttttttttgagacggagtttcactcttgttgctcaggctggagtgcaatagcacaatctcagctcactgcaacctccaccttctgggttcaagtgattctcctgcctcagcctcccgagtagctgggattacaggtatgtgccaccacacccggctaatttttttttttttttttttttttgagatggagtctcgctctgttgcccaggctggaatgcagtggcgcaatcttggctcactgccagctccgcctcccgggttcatgccattctcctgcctcagcctcccgagcagctgggactacaggcacccaccaccatgcccggttaattttttttgtatttttagtagagacggggtttcaccgtgttagccaggatggtctcgatctcctgacctcgtgatcagcccacctcagcctcccaaagtgctgggattacaggcgtgagccaccgcgctcagccacacccggctaatttttttaatttttagtagagacagggtttctccatgttggtcaggctggtctcaaactccctcaggtgatctgcccacctcagcctcccaaagtgctgggattacagycgtgagccacctcksctggccactcttaataatcttgtgaaagaaagattatccccattttccagaggtggaaactgaagctgaaaagtgaagtgggccttgggcacgatggctcacacgtgtaatcccagcactttgggaggctgaggagagtgaattacctgaggtcaggagttcaagaccagcctggccaacatggtaaaaccccatctctactaaaagtacaaaaaaattagctgggcatggtggtgggtgcttgtagtcccagctacttgggaggctgaggcaggagaatcacttgaacctgggaggcggaggttgtggtgagctgagatcacaccactgcactccagcctgggtgagagagtaagactcaagtctcaaaaaaaaaaaaaaaaaaaaaaaaagtgaagtgatttgttcagggtgacagagttattgagtggcaggggccagaccagaattctcatctgatttgcaggacttaataccttcttgctaggttggacgctgggagagagaattggtatatttggcacagcagggtccaagggaacttatattatccagctctaagccctcccaagaaatgagccagtgagcatggggcatggtggtgggggtggggaagcacagtctggtttcactgggcatcgaggagtgccaggcatctactgctctgtccctggataagtcaggctggtgggaagaggcagcaaggagggaggacgtactttgtgaagacagacggtgtctc

SEQ ID NO: 1656 - DNA, 14915 bp, Homo sapiens
tggactctggcttctcgggctgtggctgctgctgcccatccttccagaggtcgctggggtcagtggctggggtgaaggtgatgagcaagggccgggacatggcttttgggagaactgagaaaatgataccaggcaagggaaggatgagacaagtaagccaagctcgtggtgaccctgtagcaaccacagcctcagagacctgctgggatgagaaaaagtagtcaaaaacactttcctgccactaaagtaaccccacaacttaggactctgcagggcctaagggagagagactttgcgtaaaaacatggaaccctacaataccgactttgctccttagtaaagattaataaaactccatgagactgttgtccagaggtcctgcgtccggcccccacccccatcctcaccaacaataaacaccagcctctttctgaaaccactttcccaccccgtaagacataccagtaggaaaaaaaaatcagcctggccctttaaktcttccgcgatcccatttcggagtttcctcttccyaaacaaaaatagatgggtcactccctagaagatctcggggagagtctcctatacgtgttgctgtgtagcttccgtaccgcaaaatggcgccattctaatcagaagagttgacacaatcaaawagccacacggcacgaagacgcatgcgtggcgacaacaacaacaaaaaccacaacccacattacttgagggctcgggcgtgcgcaaagctccgggttcagtttcccgcgctggaactttttcaatagtaaacgagcaaagctccgcgcgcccaggtggcgcgagcactaggatctgtcggttggggtcctacttttacataacgcccccacaatgcccttcgccttcctcaacgtggcccccgctccaagcccattttctggagccaggaatccactctgtgggttaggaaaggccctcaggaggcggagggaaacctgtggaatgccgagaagccgtgtaatgaaataacgtcacgmctgcccctcaccattactctgaccagggttcgaaggtcacacttagagcctaagrggaaatggagaagtgcaaagggacgagcagaatggctggcaccacctcaggttagcgcamtgggacgttccagttctcacaccgcccaccccaccccacccaagtccctacgcacggagccaagccgcacctctcccctcatgaggcaggagcccggaggaaacagtatgcccgtcaagggtctctggcgggactgattcgcactaggggcccaacaggcaataaggacccagcggattggccgaggataggccagtcccctgggcagcagcgcckcgccgggactagaggggaacgtgaggagagctgcggaaagagatccagcctggctycctcctttccccgccctaagtcagcctcttcacccagtgagcacaaaactgtattgcccagactcccgggccccgaacgccatacctggcttccgcttccggtggcttctcgttgtgccccgcccgcaagcgccctcctccgggccttcgtgacagccaggtcgtgcgcgggtcatcctgggattggtagttcgctttctctcatttagccagtttctttctctaccggggactccgtgtcccggcatccaccgcggcacctgacccttggcgcttgcgtgttgccctcttccccaccctccctaatttccactccccccaccccacttcgcctgccgcggtcgggtccgcggcctgcgctgtagcggtcgccgccgttccctggaagtagcaacttccctaccccaccccagtcctggtccccgtccagccggtgagtctgaagtcgtcgctgctccgagtcccttgtcgctgggagcggcacatggggtctccggactttgatgtgggggcgggggaggaagcgaccaggtccggcacgaaggagggagaggtggcctgaggagcggaggggggatgtgtggattccggtgaaagggacctgacaatcgcccccaacccgtgagaaaaggaggagcccrgttcttgcttgagaatgataaacttggaaacccttgggaaaggcgtgggggtcatgcagagacttgtattggtagggagcctgagtcgaggtccctgccggagttgacacagaggagagagggccctggccttcgggagctccagggatgtgggtcgggctggtgggtcaaagtatctgttggcttctttcaagtggtgggaccccaaagaatgtttaacttcaaagaaaaggggctgagatgtaaattagaggagctggagaggagtgcttcagagtttgggttgctttaagaaagggtggttccgaattctcccgtggttggagggccgaatgtgggaggagggaggataccagaggcagggaaggagaacttgmgctttactgacactgttctttttctagctgacgtgaagatgagcagctcagaggaggtgtcctggatttcctggttctgtgggctccgtggcaatgaattcttctgtgaagtgagttctcttcaacctccctacktgccagcttcacatatcttcccaccagacgttccttcacatattccacttctrcactgttctcttacatgctatttgaaaacttcctatcagcaaagagtcccccctataaaccccgacgaacctgtgctaaagtggcaaaactggggcccaagtcctgagtctgccaccgtccagcaatataacgttgggctagtcaatttgtgtctttttcttttttttgagactgggtctcactctgtcaccgaggctggagggtagtggtgcgatctcggcttactgccacctctgcctcccaggttcaagcgattctcctgctccagcctcccaagtagctgggattacaagtgcctgccaccatgcctggctaatttttgtatttttagtagagacagggtttcactatgttggccaggctggtctcgaactccagacctcaggtgatctgcctgcctcggcctcccaaagtgctgggattacaggcgtgagccattgcgcccggcctgtatcttttgttactaaagtggcactgctagtacttgtctcaggtggcctttaggaaaactgaaatgctacacattgaaatgttttgttcagaaaccatgctgttcagcttccaccttccttagccagctgagaggacaaaactggttcctagagacgggatacaggagtggagtagggacaaagatcttgaaaagaatgtctaagaaaaagattgctgtatctacttatccttagaaaagaaaagccaaagcttttatgggagagagtgtaggtgaactagggagagacacaagtacttctgctgagttgggagtgagaaacaagcacaacagatgcagttgtgttgatgataaggcatcacttagagcattttgcccaggtcaaagatgaggattttgatatgggttccctcttggcttccatgtcctgacaggtggatgaagactacatccaggacaaatttaatcttactggactcaatgagcaggtccctcactaycgacaagctctagacatgatcttggacctggagcctggtgaggcaccctcagggttgttttgtgtgtgtgcgtgcactatttttctcttcaaatctctattcacttgcctgaattttgaaatttcctttggttctctgatttctttaaccccaaattcatgctttattttgatcctccacctgactcttgtctagttttgtgacgtatatcacttgttctcatgttttctaartccgcaattcagacctattccaaaatgcgtttcctcatgggtctggtttgttgtctgtttctcctgctttgcaccttccagtctagartttcatcttctgcattgacattgttgcagttatgtattgaggagggagttgggagggagagcaaggagcagaggctgaaaaggtgtgaagggaaggcagagctgtcttcgtttgatgcaagggtcagaagcccaggtttctgggtcccatgcccagatgttggatggggtaaggcccaaaagtaggtgctaggcaaactgaatagcccgcagcccctggatatgggcagggcacctaggaaagctgaaaaacaagtagttgcatttggccgggctgtgtttcagatgaagaactggaagacaaccccaaccagagtgacctgattgagcaggcagccgagatgctttatggattgatccacgcccgctacatccttaccaaccgtggcatcgcccagatggtgaggcctctctgctcctacctgcctccttctgagcagtaagagacacaggttcctgcagcaagaagtcatgtttaagccctgtttaaggaagctagctgagaagaggggaagaaccccagaacttgggcctgggaattgaattctgattgggggtcatcctgaagggattgttttcagggagggagacagaccttgaatcagagagttgtgatagactgcctcttcctcaaggaacaaacaacaaatggctctgatggtttgtagcctgcctaattggaagaaaggcaacacagaagtttgagagcccrtctagtccagagaaggggcctctggacagaggtgggaggagtgggggacagagtggtatgggttgggctgcgaagggagttgcctcttctttacatctacctgccaaccccttccattgtattcacctcagttggaaaagtaccagcaaggagactttggttactgtcctcgtgtgtactgtgagaaccagccaatgcttcccattggtgagtgttgaagaagggaaaggaaagcaccgtgtggcagtcttatgggaaggagttggggctcaacacattggagcctgagtcctgaggggaggttaggtaggaatagggggatacctggcctgctgagtctggctgtctcccaggcctttcagacatcccaggtgaagccatggtgaagctctactgccccaagtgcatggatgtgtacacacccaagtcatcaagacaccatcacacggatggcgcctacttcggcactggtttccctcacatgctcttcatggtgcatcccgagtaccggcccaagagacctgccaaccagtttgtgcccaggtagggagcagggagagtcattaagggtcaaaggaaaggcccaagatcccccagagaggggaggacagggcatggccctttcttgaggtctgcttctcccagaatcagggcatctccctgctgagtgactgtgggaaagttatttgattatctgtgcttgagttaccttattgtagaatgttcttgagctgagaagttgggaaccacgaggctttagctctgarcaggtccatagaggagctcaggtggggaggtgggaatgcaggtgactggcagggcctggatggggctcatgctgctgcctctctgacctctgccctggcctaggctctacggtttcaagatccatccgatggcctaccagctgcagctccaagccgccagcaacttcaagagcccagtcaagacgattcgctgattccctcccccacctgtcctgcagtctttgwcttttcctttcttttttgccaccctttcaggaaccctgtatggtttttagtttaaattaaaggagtcgttatygtggtgggaatatgaaataaagtagaagaaaaggccatgagctagtctgctggtgcttgctgttggggaagggaaggtgatggtgtgttggactccaggggccctcatggcccagcccaccctccccagattgaaaaccaggacagatttgtgctcagtggattgggtggtgtttttagtatggagcagaacagaattcctaggactgcgtgtgatgaaatgcaaggtcaaaaggaaaagacaaagcatatttcaaagatgagaaatatttgtttggatatctatgactgtctgtttatactgtaaggggcttaatcagcagctccatcttttagttttagttctaaaggaaaagtagcctaaagtcagtmtaactaaagggtggaacgaggtgggacaaggtccggaattgctgctcagtgatgtgtgtgtgcctgccgctggtggagctgagactgctcatctcagaaggatggggatgcttgatttcctggccaggttgtcccagcacagtggggattggccctgttgtatgacgaagacagcacatggtggcagagatagatactaacccatggactttccaagggagggaataggtctttggagggtatgcaagacaaaggtagacactggataaagaacccggtagtgcccaggtattaccccatctgggccattactcccacactcaggaaccagacgttgtgggtgaggacatgctgtccctcctgccaagtaataacttccttcccagccaggatcctgccccaagtaggaatatagctctgcatttacagcagctcctgctcagaccttgtcaaaaccaccctgcagcttaggattaaggagcatggtcacaggaaggtggggtttcagggcatcccctcaggaactgcccatctccccagaattccaaaatgaaggtccatatgcttgtaggtgtgctggtcatggtgggcttcacagtaggaaagggtaagtggggcccaggggcagggagggaggaaggggtaactgagtccaggaagggggtggagcgtggccatggataatcgggcttcctactggcccagggtatttgagagtgacccagtgcctccatccctccttctgcctccccagttcctgttcccgacatccggacgtgccacttctgcctcgtagaagacccttctgtaggatgcatttcaggctcagagaagtgtaccatcagcagctcatccctgtgcatggtgatcaccatctattatggtaaataaggtcccaggaaggggctgctggtggggcagccaatggcttggtcttctctcctctcacaratcagggctgctccgggcatggggtacaagaagagaggaggggctgagtgcaatggctcatgcctgtaaccctagcactttgggaggctgaggcaggtggatcacttaagctctagagttcaagaccagcctaggcaacatagtgagaccctgtctctacaaaaaaatagccaggcatggtggtatgcacctgtagtcccagctactcgggaggctgaggtgggagatctcttaaactcaggaggcataggttgcagtgagccaagattgcgccaccatgctccagcctgrgtwacagagctagaccctgtctcaaaaaaaaccagaagaatcttggaaggaggggtctaaggttctagggggccagcagagctcacttttctagcctcttgaaggactctgggttagaagtaaattaggtctgggtgaaggatgggaaaagtcagtagcaggggttcttggactatgggaagctattggaaggggttatcagctttcccctctccctcagatgtcaaggttcgcttcatcgttcgaggctgtggacagtacatttcctaccgctgccaagaaaaacgcaacacctactttgcagagtactggtatcaggcycagtgctgtcagtacrattattgcaactcctggtcaagcccccaactccagagctctctgccggagccccatgacaggcccctggccctgcctctgtctgactmccagattcagtggttctaccaggccctgaacctctccctgcccctccccaatttccatgcygsgacggagcctgatggcctggaccccatggtcacactgtccctgaacctgggcttgtcttttgctgagctgygccgcatgtacttgttcctcaatagttcaggacttttggttcttccccaggctggactcttgacacctcacccttcctgaattccacagtgcaaatatctttctgtaacaccctcagcatcctgcactgccctctctgaaaacacccacattctttggtcactgtgatttcttaggcctccgtctgttgtaccactagcatctatatgacttttgtgtaattttctctcttgaactctggtgctgtttttttgtttgtttgagacaaagtctygctctgtcacccagggtggagtgcagtggcatgatctctgctcactacaacctccacctcccgggttccagcgattctcctgcctcagcctcccgagtagctgggactacaggcgtgcaccaccacgcctggctaattttttgtatttttagtagagacggggtttcaccatgttggtcaggctggtctcgaactcctgacctcgtaatctgccctcctcgacctcccaaagtgccgggattacaggtgtgagccacygtgcctgkctgagctctggtgctgttcttccccctagaaaagaatctctagtgtggattctgcccagacaggctgacctgagaaaggcacagtggttcctccattccttccccatcatctgagtgttccagtatcccccatccctctcaatccagtcacctgcctattgacatctagctctgtttcccctgtcttgtccatgtctctaagacccagtaccagactgaactagcagcaagaaggacgaggaggccgggcatggtggctcacgccggtaatcccagmactttgggaggccgaggtgggcggatcacttgagattgggagtttgagaccagcctggccaacatggtaaaacccgctctctattaaaaatwgaaaaatcagctgggtgtggtggcacacctctgtaatcccagctactcaggaggctgagacaggagaatcacttgaacccgggaggcagaggttgcagtgagccgagatcgcgccactgcactccagcctgggtgacacagtgagactccgtctccaaaaaaaaggatgaggaatagaattctgtgcagatgtcctgacttggcaattttgtgtccctgcctcactgtctccaccaacccccgcctgtcctrgtgttgttctgcctcctgtcctctcttgctctcttgtcagtctctggcttcctcggccccatttcacttcactgagtcctgacacccatctccctaggggcctgtgagaggagagggaagggtctgttctgctcagctccatgtcccccattttcctccacaataaactgggactgggctaaaactgtgtcacattgtttgtggggtcaggctcaggtgtgggcaggtaaacacagattaaagaggkttaatgcctggcgcagtggctcacgcctgtaatcccagcactttgggaggctgaggcaggcggatcacctgagattgggagtttgagaccagcctgacyaatatggagaaaccccatcgctactaaaaatacaaaattagccgggcttggtagcgcatacctgtaattacagctactcgggaggctgaggccggagaatcacttgaacctggaaggtggaggtggcgatgagccgagattgcaccattgcactccagcctgggcaacaagagtgaaactgtgtctcaaaaaaaaaaaaaaaaaaaaagggttagtgaggtttgggatccaaataggattgcagagccctctccattgcacttggcgtttgtcgcttcctctcggcctcctgtaaagggcacacatccctccccaccctctgcttagctggagatcaaagcatggggactgtgattcttcccagccttaaacataccctacaaaacctggaaagttagaccctgatgatgccaggtcttttcacctaagaaaagaaactttaggccaggtgcggtggctcatgcttgtaatccctgaactttgggaggccgaggtgggtggatcacctgaggtcgggtttgagaccagcctgaccaacatggtgaaatcttgtctctactaaatatgaaaaattagctgggcatggtggctcatgcttgtaatcccagctacttgggaggctgaggcaggagaattgcttgaaccggggaggtgtaggttgcagtgagctgagatcacgccattgcactccagacagggcaacaagagcgaaactctgtcttaaaaaaaaaaaaaaaagcctgggcgcggtggcttgcctgtaatcccagcactttgggaggccgaagcaggcggatcatgaggtcaggagttcgacaccagcctgaccaacatggtgaaagcccatctctactaaaaaaaaaaaaaaaaaaattagttgggcatggtggcacgtgtctgtgatcccagctactcaggaggctgaggcaggagaatcgcttgaacctgggaggcagagtttgcagtgagccgagatcgtgccactgtactccagcctgggtgacagaccgagactgtctccaaaaaaaaaaaaaagaaactttctctttaaaccagaaagactcaggaactcagagccacatgccagagttacctgctgctggggccctggactcctgccattccttagttcttttcaaggattctggcatccaggatgccctctcgaggggcccaatttgaggggcaaagtgctgagagcactgatgttgggctgcagtggttggatcttcatgctaatattttaattttgaaatagtgcaaacgtatagaaagcaaggatggatacaacagccttttccatacactggataaacatgctggacataacgctgctctgagtcaggcttggtattgagcagcaggactcccagatgagtatagccaggtgtctgcccttccaagtcttgcagcccagtgcttgggttatgaaacctttttctgaaaagcagtgcagctttgtggctgggaggtccaatcccagcccctctaccacttggatatgtcagtctcttcagccccaccttggtcacctgtcaagtagggatagtgcctcagatgattgagaaaacacatgtaaatgtgcatacacaagtagaagttaaggccttttccccctcaaaaaaatatatttgccctagagtcaaatgcatacacaatgttcagcttttttttctaaggttcttactatgttgcccaagctggccttgaactcctgggctcaagagattcttctgcctcagcctccaagtagctgggactacagwtgcacaccaccatgctcacctggctgatttacttattttcaaacctttttggtaaaacattcagaagcttgcacatatcacaagatggatttttgtaaaccacacatctgtgtaaccagccaccaaatcagcgtgaagacctttaccygcagccaagcctgcctctgttcccctctcccaggtgctcttcccagctctggggtagccgctgtcctgactggtagtagcttagatgagttctgtctgtgcttgatggaaatggcatcgtacrcatctgcttttacctatatagtgttttgcacacgtgttaacaaatctgtgtggcctgtactctgacggaaaataccaaaccaatgataattaagtcatgaggcagttggcgtacaaagagaggtacaaacccttaatgtgccccccaacccccaccttgctaagtccacccttctccatgacctctgacgtcagtataagacagagaaaggcccaggtttatagcaggtcaacctggaagacaccctcagaggctgaagaacttggcccagaattgaagagaccaggactccaataaggtctaacatctctttgagagtggccttctcggctcggggtgactcacgcctgtaatcccagccctttgggaggccaacgcaggcagatcacttgaagtcaggagttcgagaccagcctggccaactggtgaaaccccgtctctactaataaaatataaaaattagccaggtgtggtggcatgtgcttgtaatcccagctactcgggaggctgaggcagaagaatcacttgaacctgggaggcagaagttgcaatgagccaagatcacacsactgcactccagcctaggtgacagtgagactgtctcaaaaaaagagtggccttctcacccacctccttctacctgggcctggtcctttcgcagcccccttcccaccaacatagccctctaaacgcccctagcccccacacagctctggtctgacagcactgccgaggatgcccactaactttctggcattcrccataggagggctttcatttcctctttctctttttgtgtctagagcaaatcacataccaaggcaggacaagaggacagctcagcagagctgggggtcccttacctgacccatggtagggcagttaggcaggtgcacctccctcagccttcacctccaccagaagaaagagacataccaaacagtttacacacaaatttatttgggagaaacatccagggactaggggacaagagaggaaacctggtgggcagtagggctgggggtacagagtagcagtaagtgtgctgaagggcgtcaaccaagaggaagagccaaggctggggtccagtggctggagggaggcaaggagggctggtrtgagggactagaagtcctggccaagcccagatagaagtcaggaaggtggctggaaactggtggaattttacaccaaagtttgctgcagtcacactaaggagtatagagccctctgttttgagggtcattgcagaaatccaggaagcagtattgagagaatatccagaagccagacaccggagaagttcgggtatttgaacaatcactcatctgctccttacttcggcagtcactcaccatgacgtcagaaccgctgcctggggagggacagtgggcaccagtgatacggaagtccccaggaagagccccaaatcctctcatccccacactcataagtcaaaaaaaaaagaaaaagaaaagattcctgtagttaggcatgggtggacatgcccagtgttcaccagccatggaactccactgaagttcccatgcaaggctggaggaaaagagccatatgaaatgtaatggttggagggggagttgggagttactgagccaagtgaggagaactagcaccataggaccatgtgagaaaaagctgggaaatgttttggagattgggtggcaggaaggaggtgtattgttatttatttttcagaccaaaagagaataagatgatgtctgctgctgttatacataatagagaaaaatctttgtgcctgcatcccaagaagtcatgttcagggatgtttgctgctgccctgcttgagagaaatgaccaaaatgcccatcaatagtgggatggggaaatcagctgtgatatgcgcatgctatggagtagtatasagcaggtcaataaaacaaggaagctgtttacaaactgatatcggaacattcagttcccctaacttaaatgtggaataatgtttacagtgggatgctactatcttgggttggggcgggggaagaggtgaaaaaatagtaaacagcatatttgtgcagggtggaatgtgcataaaagattgcaggagggatcatccagaaagtaaaaaaagtggtcacatgtgcaggggagccaggtgggttagggtagtagcgggagactttggtttgatggtattgtatactctgatatttgacccacatctgtgcatcggctatgttaaaagggtagtaagaggacttgaacacaggcagctgcatgcagtggttgttgagagcaccatctctggagccatcacaaattctggctcagcatctgtgagactcaggcaaggttatgacctttctgcacctgtttcctcatctgtaaaatgcacatagtaataatacctgcctcagyggattgcaagtgtttagaacagtgcctagcacatattatgtgttacgtttttgctaacttaagaaaggtggggggtcggtggaagagcaggcatcgggaaggagtcaattttcagcgagggagatgtccagtggtcaacgggatatgaggagagcggtttgacataacattcagattcagaaggaagtggtatgtggctgctggttgaagccagcaaagcagataaaatcctctgcttttgagtatatgaagtgggaagacagctaaggaccaaaccttggtgaacatgaaccactaagggtcagagagaaaacgctccatgaaggagactgaagaagccgtggaggatgcaggagaagagcaacaccagcagtaactgcagacagatgcggaagcagacagcttgaggacaggcaagggcacctggagatctggagggtccccgtcaaagctgcgcaccttgatagggtagaagmtattcagctacagattgaggagagaaggttagtggaagtggagacagagtgtggctctgaagaaaagggaagagaggctgggcacggtggctcacgcctgtaatcccagcactctgggaagctaaggtgggtggatcacctgaggtcaggagttcgagaccagcctggccaacatggtgaatccccatctctactaaaaatacaaaaaattagctgggcgtggtggcgtgcacctttaatcccagctgcttgggagactgaggcacaagaattgcttgaactggrgaggtggaggttgcagtgagccaagattgcgccactgcactccagcctgggtgacagagcagcaaaaaaaaaaaagacaggatyggagcaatgtcttatgggattatgggaacaagacttggggtgcagcttaggaggctgagagagtttccgtttgggagagtgctgggcccatgacaggagaaggccacttactgttctttttgtggagagtgatgcagctgctgccagctggggtgaggcagatgtcagatcccagaaggcaccctaactccttggtctccaagaggcatcggtagcagcgcaggtatttggggaatggaagtggttgagggggttcccaattgacaggaacaaacttacctagaacacagagaagtgctgacc

SEQ ID NO: 1657 - DNA, 17055 bp, Homo sapiens
ttcaggaagggtgaggtgtcaagagtccagcctggggaagaaccaaaagtcctgaactattgaggaacaagtacatgcggcgcagctcagcaaaagacaagcccaggttcagggacagtgtgaccatggggtccaggccatcaggctccgtcscrgcatggaaattggggaggggcagggagaggttcagggcctggtagaaccactgaatctggkagtcagacagaggcagggccaggggcctgtcatggggctccggcagagagctctggagttgggggcttgaccaggagttgcaataatygtactgacagcactgrgcctgataccagtactctgcaaagtaggtgttgcgtttttcttggcagcggtaggaaatgtactgtccacagcctcgaacgatgaagcgaaccttgacatctgagggagaggggaaagctgataaccccttccaatagcttcccatagtccaagaacccctgctactgacttttcccatccttcacccagacctaatttacttctaacccagagtccttcaagaggctagaaaagtgagctctgctggccccctagaaccttagacccctccttccaagattcttctggttttttttgagacagggtctagctctgtwacycaggctggagcatggtggcgcaatcttggctcactgcaacctatgcctcctgagtttaagagatctcccacctcagcctcccgagtagctgggactacaggtgcataccaccatgcctggctatttttttgtagagacagggtctcactatgttgcctaggctggtcttgaactctagagcttaagtgatccacctgcctcagcctcccaaagtgctagggttacaggcatgagccattgcactcagcccctcctctcttcttgtaccccatgcccggagcagccctgatytgtgagaggagagaagaccaagccattggctgccccaccagcagccccttcctgggaccttatttaccataatagatggtgatcaccatgcacagggatgagctgctgatggtacacttctctgagcctgaaatgcatcctacagaagggtcttctacgaggcagaagtggcacgtccggatgtcgggaacaggaactggggaggcagaaggagggatggaggcactgggtcactctcaaataccctgggccagtaggaagcccgattatccatggccacgctccacccccttcctggactcagttaccccttcctccctccctgcccctgggccccacttaccctttcctactgtgaagcccaccatgaccagcacacctacaagcatatggaccttcattttggaattctggggagatgggcagttcctgaggggatgccctgaaaccccaccttcctgtgaccatgctccttaatcctaagctgcagggtggttttgacaaggtctgagcaggagctgctgtaaatgcagagctatattcctacttggggcaggatcctggctgggaaggaagttattacttggcaggagggacagcatgtcctcacccacaacgtctggttcctgagtgtgggagtaatggcccagatggggtaatacctgggcactaccgggttctttatccagtgtctacctttgtcttgcataccctccaaagacctattccctcccttggaaagtccatgggttagtatctatctctgccaccatgtgctgtcttcgtcatacaacagggccaatccccactgtgctgggacaacctggccaggaaatcaagcatccccatccttctgagatgagcagtctcagctccaccagcggcaggcacacacacatcactgagcagcaattccggaccttgtcccacctcgttccaccctttagttakactgactttaggctacttttcctttagaactaaaactaaaagatggagctgctgattaagccccttacagtataaacagacagtcatagatatccaaacaaatatttctcatctttgaaatatgctttgtcttttccttttgaccttgcatttcatcacacgcagtcctaggaattctgttctgctccatactaaaaacaccacccaatccactgagcacaaatctgtcctggttttcaatctggggagggtgggctgggccatgagggcccctggagtccaacacaccatcaccttcccttccccaacagcaagcaccagcagactagctcatggccttttcttctactttatttcatattcccaccacrataacgactcctttaatttaaactaaaaaccatacagggttcctgaaagggtggcaaaaaagaaaggaaaagwcaaagactgcaggacaggtgggggagggaatcagcgaatcgtcttgactgggctcttgaagttgctggcggcttggagctgcagctggtaggccatcggatggatcttgaaaccgtagagcctaggccagggcagaggtcagagaggcagcagcatgagccccatccaggccctgccagtcacctgcattcccacctccccacctgagctcctctatggacctgytcagagctaaagcctcgtggttcccaacttctcagctcaagaacattctacaataaggtaactcaagcacagataatcaaataactttcccacagtcactcagcagggagatgccctgattctgggagaagcagacctcaagaaagggccatgccctgtcctcccctctctgggggatcttgggcctttcctttgacccttaatgactctccctgctccctacctgggcacaaactggttggcaggtctcttgggccggtactcgggatgcaccatgaagagcatgtgagggaaaccagtgccgaagtaggcgccatccgtgtgatggtgtcttgatgacttgggtgtgtacacatccatgcacttggggcagtagagcttcaccatggcttcacctgggatgtctgaaaggcctgggagacagccagactcagcaggccaggtatccccctattcctacctaacctcccctcaggactcaggctccaatgtgttgagccccaactccttcccataagactgccacacggtgctttcctttcccttcttcaacactcaccaatgggaagcattggctggttctcacagtacacacgaggacagtaaccaaagtctccttgctggtacttttccaactgaggtgaatacaatggaaggggttggcaggtagatgtaaagaagaggcaactcccttcgcagcccaacccataccactctgtcccccactcctcccacctctgtccagaggccccttctctggactagaygggctctcaaacttctgtgttgcctttcttccaattaggcaggctacaaaccatcagagccatttgttgtttgttccttgaggaagaggcagtctatcacaactctctgattcaaggtctgtctccctccctgaaaacaatcccttcaggatgacccccaatcagaattcaattcccaggcccaagttctggggttcttcccctcttctcagctagcttccttaaacagggcttaaacatgacttcttgctgcaggaacctgtgtctcttactgctcagaaggaggcaggtaggagcagagaggcctcaccatctgggcgatgccacggttggtaaggatgtagcgggcgtggatcaatccataaagcatctcggctgcctgctcaatcaggtcactctggttggggttgtcttccagttcttcatctgaaacacagcccggccaaatgcaactacttgtttttcagctttcctaggtgccctgcccatatccaggggctgcgggctattcagtttgcctagcacctacttttgggccttaccccatccaacatctgggcatgggacccagaaacctgggcttctgacccttgcatcaaacgaagacagctctgccttcccttcacaccttttcagcctctgctccttgctctccctcccaactccctcctcaatacataactgcaacaatgtcaatgcagaagatgaaaytctagactggaaggtgcaaagcaggagaaacagacaacaaaccagacccatgaggaaacgcattttggaataggtctgaattgcggayttagaaaacatgagaacaagtgatatacgtcacaaaactagacaagagtcaggtggaggatcaaaataaagcatgaatttggggttaaagaaatcagagaaccaaaggaaatttcaaaattcaggcaagtgaatagagatttgaagagaaaaatagtgcacgcacacacacaaaacaaccctgagggtgcctcaccaggctccaggtccaagatcatgtctagagcttgtcgrtagtgagggacctgctcattgagtccagtaagattaaatttgtcctggatgtagtcttcatccacctgtcaggacatggaagccaagagggaacccatatcaaaatcctcatctttgacctgggcaaaatgctctaagtgatgccttatcatcaacacaactgcatctgttgtgcttgtttctcactcccaactcagcagaagtacttgtgtctctccctagttcacctacactctctcccataaaagctttggcttttcttttctaaggataagtagatacagcaatctttttcttagacattcttttcaagatctttgtccctactccactcctgtatcccgtctctaggaaccagttttgtcctctcagctggctaaggaaggtggaagctgaacagcatggtttctgaacaaaacatttcaatgtgtagcatttcagttttcctaaaggccacctgagacaagtactagcagtgccactttagtaacaaaagatacaggccgggcgcaatggctcacgcctgtaatcccagcactttgggaggccgaggcaggcagatcacctgaggtctggagttcgagaccagcctggccaacatagtgaaaccctgtctctactaaaaatacaaaaattagccaggcatggtggcaggcacttgtaatcccagctacttgggaggctggagcaggagaatcgcttgaacctgggaggcagaggtggcagtaagccgagatcgcaccactaccctccagcctcggtgacagagtgagacccagtctcaaaaaaaagaaaaagacacaaattgactagcccaacgttatattgctggacggtggcagactcaggacttgggccccagttttgccactttagcacaggttcgtcggggtttataggggggactctttgctgataggaagttttcaaatagcatgtaagagaacagtgyagaagtggaatatgtgaaggaacgtctggtgggaagatatgtgaagctggcamgtagggaggttgaagagaactcacttcacagaagaattcattgccacggagcccacagaaccaggaaatccaggacacctcctctgagctgctcatcttcacgtcagctagaaaaagaacagtgtcagtaaagckcaagttctccttccctgcctctggtatcctccctcctcccacattcggccctccaaccacgggagaattcggaaccaccctttcttaaagcaacccaaactctgaagcactcctctccagctcctctaatttacatctcagccccttttctttgaagttaaacattctttggggtcccaccacttgaaagaagccaacagatactttgacccaccagcccgacccacatccctggagctcccgaaggccagggccctctctcctctgtgtcaactccggcagggacctcgactcaggctccctaccaatacaagtctctgcatgacccccacgcctttcccaagggtttccaagtttatcattctcaagcaagaacygggctcctccttttctcacgggttgggggcgattgtcaggtccctttcaccggaatccacacatcccccctccgctcctcaggccacctctccctccttcgtgccggacctggtcgcttcctcccccgcccccacatcaaagtccggagaccccatgtgccgctcccagcgacaagggactcggagcagcgacgacttcagactcaccggctggacggggaccaggactggggtggggtagggaagttgctacttccagggaacggcggcgaccgctacagcgcaggccgcggacccgaccgcggcaggcgaagtggggtggggggagtggaaattagggagggtggggaagagggcaacacgcaagcgccaagggtcaggtgccgcggtggatgccgggacacggagtccccggtagagaaagaaactggctaaatgagagaaagcgaactaccaatcccaggatgacccgcgcacgacctggctgtcacgaaggcccggaggagggcgcttgcgggcggggcacaacgagaagccaccggaagcggaagccaggtatggcgttcggggcccgggagtctgggcaatacagttttgtgctcactgggtgaagaggctgacttagggcggggaaaggaggragccaggctggatctctttccgcagctctcctcacgttcccctctagtcccggcgmggcgctgctgcccaggggactggcctatcctcggccaatccgctgggtccttattgcctgttgggcccctagtgcgaatcagtcccgccagagacccttgacgggcatactgtttcctccgggctcctgcctcatgaggggagaggtgcggcttggctccgtgcgtagggacttgggtggggtggggtgggcggtgtgagaactggaacgtcccaktgcgctaacctgaggtggtgccagccattctgctcgtccctttgcacttctccatttccycttaggctctaagtgtgaccttcgaaccctggtcagagtaatggtgaggggcagkcgtgacgttatttcattacacggcttctcggcattccacaggtttccctccgcctcctgagggcctttcctaacccacagagtggattcctggctccagaaaatgggcttggagcgggggccacgttgaggaaggcgaagggcattgtgggggcgttatgtaaaagtaggaccccaaccgacagatcctagtgctcgcgccacctgggcgcgcggagctttgctcgtttactattgaaaaagttccagcgcgggaaactgaacccggagctttgcgcacgcccgagccctcaagtaatgtgggttgtggtttttgttgttgttgtcgccacgcatgcgtcttcgtgccgtgtggctwtttgattgtgtcaactcttctgattagaatggcgccattttgcggtacggaagctacacagcaacacgtataggagactctccccgagatcttctagggagtgacccatctatttttgtttrggaagaggaaactccgaaatgggatcgcggaagamttaaagggccaggctgatttttttttcctactggtatgtcttacggggtgggaaagtggtttcagaaagaggctggtgtttattgttggtgaggatgggggtgggggccggacgcaggacctctggacaacagtctcatggagttttattaatctttactaaggagcaaagtcggtattgtagggttccatgtttttacgcaaagtctctctcccttaggccctgcagagtcctaagttgtggggttactttagtggcaggaaagtgtttttgactactttttctcatcccagcaggtctctgaggctgtggttgctacagggtcaccacgagcttggcttacttgtctcatccttcccttgcctggtatcattttctcagttctcccaaaagccatgtcccggcccttgctcatcaccttcaccccagccactgaccccagcgacctctggaaggatgggcagcagcagccacagcccgagaagccagagtccaccctggatggggctgcagccckagctttctatgaggccctgattggggatgagagcagcgctcctgastcccagagatctcagactgaacctgccagagaaagaaagagaaagaaaagaagaataatgaaggcaccagcagcagaagcagtggcagaaggagcatcaggaagacatggacaagggagatcccttgaggctgaggataagatgactcaccggatactgagggcagyccaggagggggacytgccagaacttaggagactgctggaaccgcatgaggcaggaggagctggggggaatatcaacgcccgggatgccttctggtggaccccactgatgtgtgctgctcgagcgggccagggggcagctgtgagctatctcctgggccgtggggctgcctgggtgggggtctgtgagctgagtggcagggatgcggctcagctcgctgaagaagctggcttccctgaggtagcccgcatggtcagggagagccatggagagacaaggagcccggaaaaccggtaaggggaaactttagctcagacccatgtctcattgtgttctgcctctcccagccacaccacaccagacgccccagcacagtgctgaagagttctttccttatcctcatgtgtaggttgacagggtagtatagtcaagtggttataaacatgagctccctggatttaaagcctgattccacttacttgggcaaacaacytaatgtctacatgttccagttttctcatcttagaaatgggggtagtaagaatygttgttaggattcaatgggttaatatatgtaaaatgctagaatagtgcatgccgcatagtatgcaatacatgaatgttagctatagtcattatgactaatgtccctccccttgcccaagagtttgctaggtctggttaccatttttttctttcaactattctgctctggatcccacaatggtttaaagaaatttgtttttaagacaagtcaagtgcagtagtgagaaggaggggaaaagtggagtaaggagtttgatctgtaactgagtgaacaattaattcagataactcaccaccacctttggaccagcctggatccctcactgttaagtaggaaggaaggcaatttgtcccttttttttttttttttttttttgagacaaagtctcactcatctcactctgtcgcycaggctggtgtgcaatggtgtgatttcagctcactgcaacctccgcttcctgggctcaagcatattttttgtagaaagcaggctttgccgggacatggtggcatgtgcctgtaatcccggctacttgggaggytgabgcaggagaatcgctaaggtggaagttgcagtgagccaggatcatggcactgcactccaacctgggcagcagagcaagactccatctcaaaaaaaaaaaaaaaaaaagcaggcgttgccattttgcccaggctggtctcaaactcctgagctcaaagccatctgcccgcctctgcctcccaaagtgttgggattacaggcgtgagccactatgcctagctggcaatttgttccttagcagaaaagctgaaaagatcctattctaccctgccagccccctctgaggcctcaactcttccccttttccttcccctgcccttaatgctttttcttctttctctgcaggkctcctactccctccctccagtactgcgagaactgtgacacccacttccaagattccaaccaccgcacatccactgytcacctgctgtcactgtcgcagggtcctcagcctcccaaccttccacttggggtgcccatctccagcccgggcttcaaactgctgctgagggggggctgggagccaggaatggggctgggaccccggggtgagggccgtgccaatcccatccccactgtcctcaagagrgaccaggaaggactaggctacagatcagcaccccagccccgagtgacacatttcccagcttgggatacmcgagctgtggctgggagggagagaccccctcgggtggccacactgagctggagggaggagagaaggagggaggagaaagacagggcttgggagcgggatctaaggacttacatgaacctcgagttctgactttggtaaagtctgaccctagtctgctgctgaagtctgaacttgggyctctgacctgggccctttgacttccccttcctgggatctgcycagatgcagatcctgaagtttttggtcaataggctctgtcttcgtgagagacgggctgagagtcagaaataaatcaaccatttgtggtttattcacttttctggaagctattttgaggaagccaaacagaagcctgggagccacatgcaagtcccacctgagtcagaaggggcagcctctccaggtggcatgataaggtcacctccctgccaatctgggttcactttcaggtcccagaccctcctgggagtcccccacctattctttcaasccccctggaccaagaattgcccagcttcgtgcaagtctcacttmccccaggaggagttccctgactacagccaattcactgatttcacaaacataagtccatatactatgtgccaagaatacaggtaaagacattcccaaccctcaaagagttcacagctggagagggaaagtgccatgttaycaatttttttcytttttttttgagatgcagtttcgctctcattgcccaggctggagtgcaatggcatgatctcggctcaccacaacctctgccccccgagttcaagggattctcctgcctcagcctccccagtagctgggattacaggcatgccccaccacgcccagctaattttgtatttttagtagagacggggtttctccatgttggccaagctggtcttgaactcccgacctcaggtgatccgccggcctcggcttcccaaagtgctggggttgcaggcatgarccaccactcccggcccatgttatcaaatattataatgcagggtgataagggaagtcaaggcctctagagatgagaatgggtagggttttgctggaagaggccagtgtgataggarggcccacgattatcaagcttgtacacttagttgaactgggaccagaactctagcccccaaatctaaactttaracttctttgttccacccatttgtctacacttttctttcccacacttccccactctcccaccacccacccccttgtcttgctcatgccgggtggtaggcacaagaagagctcactgttgtgaaatccaggaattcaaatttgcagacgggcaggggagggctgttcaagtcgcaagactcctcattttttcttttctgggaaagcctttcatgaagtcttggatgcgaaatggaggagtggtgggggatgtggaaaagaacccaggggcagggggctgtagggggcgaccragtttagggaagcatgagaaacccgggaaaatggggagctgggtttatattaaggtcctggtccttgctaatctcggtttggcggtccggcgcgcacagacagcgcggggtatacgggggcggtctattcgcagggtccgccccatgagctgcggcaccgcccccgcgggtccttccagtcctggtgcagctgcttccgggcttcgcggctcccggcggctccccaaggccgcggccccgacgctgggcccgggagcggtccccgcgcacagcgcccggacgcgtaggtcccgaagtaggcccgcgctttgcttcgtaactggggatctctgaggacatcttagttctgaccttgtggaggccgcgtctctgctgcgtgttcgcgggccagtcgggccactttgtagaaatcatagccctctaaatcaagggacgaacgctgctggctggagtttgctggacactttcattccacctcctaacaaagagaattcctattccttgaggtcccttrgggcagcagttaaagactacacgatccaggagcacctaggacctggggccaccttcctgcccgctttattggatggagcactgcctccccagtttctgggacaccktggggtgtggccttggtgagtgaaacttggggtgctgcctgctgggaaggaaatccggaaacgcagagaggactctctggtggtgacccaggccttgtcagatctgagattcttggaatctcagattgtgggggtgtggatggtgaatgaatttgggtatgcccccctttaccccagaactgaagaggaagcaaactacttgccacacttgaggctgcatgactattcagagaagggaggagccacttctgaattcagagtaggactgcatcaccaggcaaatacctgttctgagccagaaagactctggcttctgaggagatcctgagagtctgagtagtgccaggaagcagcctcagaatttgggggcccattacacaccccagccatgttcctgcgacggcttggtggctggctacctcgcccttggggccgccggaaaccaatgaggcctgacccgccttacccagaacccagacgggtggacagctcctcggagaattcaggaagtgactgggatagtgccccagaaaccatggaagatgtggggcatcccaagactaaggactcgggggcattgagggtttctrgggctgcttccgaaccaagcaaggaggagccccaagttgagcagctagggagcaaaagaatggattccctcaastgggaccagcctatctctagcactcaagagtctgggagactggaggctggaggggccagtcccaaactcagatgggatcatgtggattcaggtggcaccaggagaccaggggtgtcccctgaagggggactgagcgtccctgggccaggagccccattggagaaacctggtaggcgtgagaagctgttgggctggctgcggggggaaccaggagctccctcccggtacttggggggcccagaagagtgtctgcagatctccaccaacctgaccctgcatcttctggagctgctggcctctgccctgctggccctgtgctcacgaccactgcgggcagccttggacacactgggcctgcgtggaccgctgggcctctggctacatggcctactgtccttcctggctgccctgcatgggctccatgctgttctgagcctacttactgcccaccctttgcacttcgcctgcctctttggtctcctgcaggccttggtgctggctgtcagcctccgggagcccaatggggatgaggcggccactgactgggagagtgaggggttggagagggaaggtgaggagcagaggggagacccgggaaaggggctgtgaccgtggggtgggggcaaagggtgaagagagtgtgggctttaggagaaaagtgtgaggcatgacccaaattgtaagcatagggacctcagggatggggaagaaacccgagtacgagggtgcagggccccccttcatacacaggagagaacagaactatttagggtgtttgtgtttatggacagtgagggcactgctcttggattcaccagctgttatttttgcttttacttttctcccaccttcagttttttttttttttccacctccactttttaaaagcaaaaaaaaaaaaaagtatgatggtggtgaataaagaccaaagggtcctctctacctttgaaaactctcctggggtggaggagaccagggcaggatagacagacctctgcagtaagagagtggttgggaaacccagggtgttccttggatctcaggatctgagccatcgagggaagagtggggctgctaggcaagtggattagggggtctggatagggccccacaggtgacagggagcctgcagggcggatctggtgatcatgggagccagagggagtggggacagtgcaggcagtattggcaggagggccagtgcagaagggctggtagctcaggcagtgtgggggaagcactgaagcctgtagtccccacttgggggctaggggtttgctcactcagcaataaataactgtgtcacatcaaatcctaaatawamcactacaaagtgagagttactgccactctgttcttactgacaccgtccagctgggagtttaggtggtagaggatccagggggaatgttgaaatgggaggagtgggaatgacrtctggagacaaaccccagaatgagatgaggattgaaaaattatctttattatcttgagtgggagctggagctggaagtctccagcttctccctccaacaactcagctcccattgtacccatctggggacttagatgaagttacaggtcagttattggacagctcacaggcctctgtgatggggggagggaaaaagaaggacagaagggaagtccagggagaaaagcaaagttgatagtaatggggtgggggagaacgtgttctttcattccctgtgtcaaaggggagtctctaaggctcttttccctccacgtatgaccctctgccccctttatccagtgcaaactcagaaacctctcttttgagtagcccagaacccatcctgcctccctcaggtgacatcacagctcttagccacatccctctggtgacatcacacgagcctctttcaccctgtaacaccagaagacttkgtgagtcctaatcctgttttatgagattttaacmccttaccttgattcctaggagtcaataagaaggctttggagtccaggcaggaagtcagggacttgaattcctccacacacttttcgggaggatgtggtgagcgatctggaagggcaaggtggggtcaggccagtcaaaacccctggaagcacctagctcttcctgggagggtrtcataggacccagagtgagkagttctcctgccctcccttgtttccctccaacccttcctgccttgtatccctactcactgtagaggagaaagcgctggtaaccctggcctgtctcattcagcatgattccacctgggcatgagctggaaaagagctcagtcttcatgtcagggcggcctgtcaaggcaggtgggagaagtatgagaacagagatgcagaaccaaactcaagggagggtgagggctgggaagaaccaaccttcagttctgagatctgtgctcccttcagtcaggtggtagatccatttccggggcacacagagcccrtctttcctgcagaggtggtggtggcaaggaggaaagaatgagcatcaccccaaccatagtgtcccagcttcttttttttttttttgagacagagtctcactctgttgcccaggctggagtgcagtggcgccatctcggctcacygcaagctctgcctcccgggttcacgccattctcctgcctcaacctcgtgagtagctgggactacaggtgcccaccaccatgcccagctagttttttatatttttagtagagacggggtttcactgtgttagccaggatggtctcgatctcctgacctcgtgatctgtccgcctcagcctcccaaagtgctgggattacaggcgtgagccaccacgtctggcctgtcccggcttctatttactccattgtatttgttattgaagcccagctctccttgggtttcaagctaccaagcattggttaggcacatctttctccagagggcaattaatacagccactgaattccgtgggccaagcatagtagatataccagctaagaggccagctcttggtgggtggattctcacactttgggcagagactgaacccagtgatgcttctgcctccttaccactcacatgcggatggtagcacgaaggtggagctgcatcggggcagagccagcagccatattgaagacaatgttgtccacagggtcaaaagttgccaactcctccttggtgggagctgcccctgcgataaagtaccactggcccaagtggacctctgggaactggagagacaatgaagggagcaaaagagggtgggttccagcacaggatgggttcaacctcttcatcagtcaaaacagcaagatttaggggtagaggtgttggctgccttcctctttccaactggggattggatccatgacaaagagtcattaaatgacttttcctctttgcccctccccagtcaacctgggtaaccaccccaccccccaattctgccatgcctctgcattgatggccacagtactgatatttttcttcttgctttcattatcacaacactcacacccccttcctctcttcctttcccaagatggtctccagtcatcctaggccatccacccaagtccctcagagcctccaccataggcttccccyaatctcagtccatacctccttcccatccacgcccagagttgtcagttgactgtgctcagggcactggtagatggagttaaggataataccatagaagtagagcagagctgcccaaatttggtggaacatcttcaggcaggagggagctggtgctctgtgtgccttaactgctctctcccctactggctgctcagtccactctgctttcagctcccttgcgttcgacccttgaccctttcacctgctaatgagtaacttcaaccttgttttccaacccaaacctggattacttagtgtttgggacttcctccccctcttccggatgcaaccactccatagtacaccctggcatgtccagggtttctcaggagttatgaggagagctgagctgtccagggagaagcctgtggtctttgaacctgtatctgagctggttatttgttgcactgtgcagcactgaagggaagtagcttgactgggcctctcattcattcacttagcaaactgttttgaatcccaagtcccagttgtttcccaagaactagctaatccccggggacataaaaaaacgaataagacatagcccctgatcttgaagaagtcgttagagggaaaactagctgtgtagacaaaccattgcaatacaacttggtaaatgctttagaacaggtatgatgcaggtgctggggcacggtggattgctctctttagtttacaattagaaaaatatgtataccctggcagtgttcactgacacattcactcaacatttattactacaaagaggctatgtaatctggctgttagagaggatagatgttggtgtcaggcagaatgtgtccaaaccctaactacaggcagggcagg

SEQ ID NO: 1658 - DNA, 16834 bp, Homo sapiens
gaacagcatggagcccatgcagggcagccaggaaggacagtaggccatgtagccagaggcccagcggtccacgcaggcccagtgtgtccaaggctgcccgcagtggtcgtgagcacagggccagcagggcagaggccagcagctccagaagatgcagggtcaggttggtggagatctgcagacactcttctgggccccccaagtaccgggagggagctcctggttccccccgcagccagcccaacagcttctcacgcctaccaggtttctccaatggggctcctggcccagggacgctcagtcccccttcaggggacacccctggtctcctggtgccacctgaatccacatgatcccatctgagtttgggactggcccctccagcctccagtctcccagactcttgagtgctagagataggctggtcccasttgagggaatccattcttttgctccctagctgctcaacttggggctcctccttgcttggttcggaagcagcccyagaaaccctcaatgcccccgagtccttagtcttgggatgccccacatcttccatggtttctggggcactatcccagtcacttcctgaattctccgaggagctgtccacccgtctgggttctgggtaaggcgggtcaggcctcattggtttccggcggccccaagggcgaggtagccagccaccaagccgtcgcaggaacatggctggggtgtgtaatgggcccccaaattctgaggctgcttcctggcactactcagactctcaggatctcctcagaagccagagtctttctggctcagaacaggtatttgcctggtgatgcagtcctactctgaattcagaagtggctcctcccttctctgaatagtcatgcagcctcaagtgtggcaagtagtttgcttcctcttcagttctggggtaaaggggggcatacccaaattcattcaccatccacacccccacaatctgagattccaagaatctcagatctgacaaggcctgggtcaccaccagagagtcctctctgcgtttccggatttccttcccagcaggcagcaccccaagtttcactcaccaaggccacaccccamggtgtcccagaaactggggaggcagtgctccatccaataaagcgggcaggaaggtggccccaggtcctaggtgctcctggatcgtgtagtctttaactgctgcccyaagggacctcaaggaataggaattctctttgttaggaggtggaatgaaagtgtccagcaaactccagccagcagcgttcgtcccttgatttagagggctatgatttctacaaagtggcccgactggcccgcgaacacgcagcagagacgcggcctccacaaggtcagaactaagatgtcctcagagatccccagttacgaagcaaagcgcgggcctacttcgggacctacgcgtccgggcgctgtgcgcggggaccgctcccgggcccagcgtcggggccgcggccttggggagccgccgggagccgcgaagcccggaagcagctgcaccaggactggaaggacccgcgggggcggtgccgcagctcatggggcggaccctgcgaatagaccgcccccgtataccccgcgctgtctgtgcgcgccggaccgccaaaccgagattagcaaggaccaggaccttaatataaacccagctccccattttcccgggtttctcatgcttccctaaactyggtcgccccctacagccccctgcccctgggttcttttccacatcccccaccactcctccatttcgcatccaagacttcatgaaaggctttcccagaaaagaaaaaatgaggagtcttgcgacttgaacagccctcccctgcccgtctgcaaatttgaattcctggatttcacaacagtgagctcttcttgtgcctaccacccggcatgagcaagacaagggggtgggtggtgggagagtggggaagtgtgggaaagaaaagtgtagacaaatgggtggaacaaagaagtytaaagtttagatttgggggctagagttctggtcccagttcaactaagtgtacaagcttgataatcgtgggccytcctatcacactggcctcttccagcaaaaccctacccattctcatctctagaggccttgacttcccttatcaccctgcattataatatttgataacatgggccgggagtggtggytcatgcctgcaaccccagcactttgggaagccgaggccggcggatcacctgaggtcgggagttcaagaccagcttggccaacatggagaaaccccgtctctactaaaaatacaaaattagctgggcgtggtggggcatgcctgtaatcccagctactggggaggctgaggcaggagaatcccttgaactcggggggcagaggttgtggtgagccgagatcatgccattgcactccagcctgggcaatgagagcgaaactgcatctcaaaaaaaaargaaaaaaattgrtaacatggcactttccctctccagctgtgaactctttgagggttgggaatgtctttacctgtattcttggcacatagtatatggacttatgtttgtgaaatcagtgaattggctgtagtcagggaactcctcctggggkaagtgagacttgcacgaagctgggcaattcttggtccagggggsttgaaagaataggtgggggactcccaggagggtctgggacctgaaagtgaacccagattggcagggaggtgaccttatcatgccacctggagaggctgccccttctgactcaggtgggacttgcatgtggctcccaggcttctgtttggcttcctcaaaatagcttccagaaaagtgaataaaccacaaatggttgatttatttctgactctcagcccgtctctcacgaagacagagcctattgaccaaaaacttcaggatctgcatctgrgcagatcccaggaaggggaagtcaaagggcccaggtcagagrcccaagttcagacttcagcagcagactagggtcagactttaccaaagtcagaactcgaggttcatgtaagtccttagatcccgctcccaagccctgtctttctcctccctccttctctcctccctccagctcagtgtggccacccgagggggtctctccctcccagccacagctcgkgtatcccaagctgggaaatgtgtcactcggggctggggtgctgatctgtagcctagtccttcctggtcyctcttgaggacagtggggatgggattggcacggccctcaccccggggtcccagccccattcctggctcccagccccccctcagcagcagtttgaagcccgggctggagatgggcaccccaagtggaaggttgggaggctgaggaccctgcgacagtgacagcaggtgarcagtggatgtgcggtggttggaatcttggaagtgggtgtcacagttctcgcagtactggagggagggagtaggagmcctgcagagaaagaagaaaaagcattaagggcaggggaaggaaaaggggaagagttgaggcctcagagggggctggcagggtagaataggatcttttcagcttttctgctaaggaacaaattgccagctaggcatagtggctcacgcctgtaatcccaacactttgggaggcagaggcgggcagatggctttgagctcaggagtttgagaccagcctgggcaaaatggcaacgcctgctttttttttttttttttttgagatggagtcttgctctgctgcccaggttggagtgcagtgccatgatcctggctcactgcaacttccaccttagcgattctcctgcvtcarcctcccaagtagccgggattacaggcacatgccaccatgtcccggcaaagcctgctttctacaaaaaatatgcttgagcccaggaagcggaggttgcagtgagctgaaatcacaccattgcacaccagcctgrgcgacagagtgagatgagtgagactttgtctcaaaaaaaaaaaaaaaaaaaaaagggacaaattgccttccttcctacttaacagtgagggatccaggctggtccaaaggtggtggtgagttatctgaattaattgttcactcagttacagatcaaactccttactccacttttcccctccttctcactactgcacttgacttgtcttaaaaacaaatttctttaaaccattgtgggatccagagcagaatagttgaaagaaaaaaatggtaaccagacctagcaaactcttgggcaaggggagggacattagtcataatgactatagctaacattcatgtattgcatactatgcggcatgcactattctagcattttacatatattaacccattgaatcctaacaacrattcttactacccccatttctaagatgagaaaactggaacatgtagacattargttgtttgcccaagtaagtggaatcaggctttaaatccagggagctcatgtttataaccacttgactatactaccctgtcaacctacacatgaggataaggaaagaactcttcagcactgtgctggggcgtctggtgtggtgtggctgggagaggcagaacacaatgagacatgggtctgagctaaagtttccccttaccggttttccgggctccttgtctctccatggctctccctgaccatgcgggctacctcagggaagccagcttcttcagcgagctgagccgcatccctgccactcagctcacagacccccacccaggcagccccacggcccaggagatagctcacagctgccccctggcccgctcgagcagcacacatcagtggggtccaccagaaggcatcccgggcgttgatattccccccagctcctcctgcctcatgcggttccagcagtctcctaagttctggcargtccccctcctggrctgccctcagtatccggtgagtcatcttatcctcagcctcaagggatctcccttgtccatgtcttcctgatgctccttctgccactgcttctgctgctggtgccttcattattcttcttttctttctctttctttctctggcaggttcagtctgagatctctgggastcaggagcgctgctctcatccccaatcagggcctcatagaaagctmgggctgcagccccatccagggtggactctggcttctcgggctgtggctgctgctgcccatccttccagaggtcgctggggtcagtggctggggtgaaggtgatgagcaagggccgggacatggcttttgggagaactgagaaaatgataccaggcaagggaaggatgagacaagtaagccaagctcgtggtgaccctgtagcaaccacagcctcagagacctgctgggatgagaaaaagtagtcaaaaacactttcctgccactaaagtaaccccacaacttaggactctgcagggcctaagggagagagactttgcgtaaaaacatggaaccctacaataccgactttgctccttagtaaagattaataaaactccatgagactgttgtccagaggtcctgcgtccggcccccacccccatcctcaccaacaataaacaccagcctctttctgaaaccactttcccaccccgtaagacataccagtaggaaaaaaaaatcagcctggccctttaaktcttccgcgatcccatttcggagtttcctcttccyaaacaaaaatagatgggtcactccctagaagatctcggggagagtctcctatacgtgttgctgtgtagcttccgtaccgcaaaatggcgccattctaatcagaagagttgacacaatcaaawagccacacggcacgaagacgcatgcgtggcgacaacaacaacaaaaaccacaacccacattacttgagggctcgggcgtgcgcaaagctccgggttcagtttcccgcgctggaactttttcaatagtaaacgagcaaagctccgcgcgcccaggtggcgcgagcactaggatctgtcggttggggtcctacttttacataacgcccccacaatgcccttcgccttcctcaacgtggcccccgctccaagcccattttctggagccaggaatccactctgtgggttaggaaaggccctcaggaggcggagggaaacctgtggaatgccgagaagccgtgtaatgaaataacgtcacgmctgcccctcaccattactctgaccagggttcgaaggtcacacttagagcctaagrggaaatggagaagtgcaaagggacgagcagaatggctggcaccacctcaggttagcgcamtgggacgttccagttctcacaccgcccaccccaccccacccaagtccctacgcacggagccaagccgcacctctcccctcatgaggcaggagcccggaggaaacagtatgcccgtcaagggtctctggcgggactgattcgcactaggggcccaacaggcaataaggacccagcggattggccgaggataggccagtcccctgggcagcagcgcckcgccgggactagaggggaacgtgaggagagctgcggaaagagatccagcctggctycctcctttccccgccctaagtcagcctcttcacccagtgagcacaaaactgtattgcccagactcccgggccccgaacgccatacctggcttccgcttccggtggcttctcgttgtgccccgcccgcaagcgccctcctccgggccttcgtgacagccaggtcgtgcgcgggtcatcctgggattggtagttcgctttctctcatttagccagtttctttctctaccggggactccgtgtcccggcatccaccgcggcacctgacccttggcgcttgcgtgttgccctcttccccaccctccctaatttccactccccccaccccacttcgcctgccgcggtcgggtccgcggcctgcgctgtagcggtcgccgccgttccctggaagtagcaacttccctaccccaccccagtcctggtccccgtccagccggtgagtctgaagtcgtcgctgctccgagtcccttgtcgctgggagcggcacatggggtctccggactttgatgtgggggcgggggaggaagcgaccaggtccggcacgaaggagggagaggtggcctgaggagcggaggggggatgtgtggattccggtgaaagggacctgacaatcgcccccaacccgtgagaaaaggaggagcccrgttcttgcttgagaatgataaacttggaaacccttgggaaaggcgtgggggtcatgcagagacttgtattggtagggagcctgagtcgaggtccctgccggagttgacacagaggagagagggccctggccttcgggagctccagggatgtgggtcgggctggtgggtcaaagtatctgttggcttctttcaagtggtgggaccccaaagaatgtttaacttcaaagaaaaggggctgagatgtaaattagaggagctggagaggagtgcttcagagtttgggttgctttaagaaagggtggttccgaattctcccgtggttggagggccgaatgtgggaggagggaggataccagaggcagggaaggagaacttgmgctttactgacactgttctttttctagctgacgtgaagatgagcagctcagaggaggtgtcctggatttcctggttctgtgggctccgtggcaatgaattcttctgtgaagtgagttctcttcaacctccctacktgccagcttcacatatcttcccaccagacgttccttcacatattccacttctrcactgttctcttacatgctatttgaaaacttcctatcagcaaagagtcccccctataaaccccgacgaacctgtgctaaagtggcaaaactggggcccaagtcctgagtctgccaccgtccagcaatataacgttgggctagtcaatttgtgtctttttcttttttttgagactgggtctcactctgtcaccgaggctggagggtagtggtgcgatctcggcttactgccacctctgcctcccaggttcaagcgattctcctgctccagcctcccaagtagctgggattacaagtgcctgccaccatgcctggctaatttttgtatttttagtagagacagggtttcactatgttggccaggctggtctcgaactccagacctcaggtgatctgcctgcctcggcctcccaaagtgctgggattacaggcgtgagccattgcgcccggcctgtatcttttgttactaaagtggcactgctagtacttgtctcaggtggcctttaggaaaactgaaatgctacacattgaaatgttttgttcagaaaccatgctgttcagcttccaccttccttagccagctgagaggacaaaactggttcctagagacgggatacaggagtggagtagggacaaagatcttgaaaagaatgtctaagaaaaagattgctgtatctacttatccttagaaaagaaaagccaaagcttttatgggagagagtgtaggtgaactagggagagacacaagtacttctgctgagttgggagtgagaaacaagcacaacagatgcagttgtgttgatgataaggcatcacttagagcattttgcccaggtcaaagatgaggattttgatatgggttccctcttggcttccatgtcctgacaggtggatgaagactacatccaggacaaatttaatcttactggactcaatgagcaggtccctcactaycgacaagctctagacatgatcttggacctggagcctggtgaggcaccctcagggttgttttgtgtgtgtgcgtgcactatttttctcttcaaatctctattcacttgcctgaattttgaaatttcctttggttctctgatttctttaaccccaaattcatgctttattttgatcctccacctgactcttgtctagttttgtgacgtatatcacttgttctcatgttttctaartccgcaattcagacctattccaaaatgcgtttcctcatgggtctggtttgttgtctgtttctcctgctttgcaccttccagtctagartttcatcttctgcattgacattgttgcagttatgtattgaggagggagttgggagggagagcaaggagcagaggctgaaaaggtgtgaagggaaggcagagctgtcttcgtttgatgcaagggtcagaagcccaggtttctgggtcccatgcccagatgttggatggggtaaggcccaaaagtaggtgctaggcaaactgaatagcccgcagcccctggatatgggcagggcacctaggaaagctgaaaaacaagtagttgcatttggccgggctgtgtttcagatgaagaactggaagacaaccccaaccagagtgacctgattgagcaggcagccgagatgctttatggattgatccacgcccgctacatccttaccaaccgtggcatcgcccagatggtgaggcctctctgctcctacctgcctccttctgagcagtaagagacacaggttcctgcagcaagaagtcatgtttaagccctgtttaaggaagctagctgagaagaggggaagaaccccagaacttgggcctgggaattgaattctgattgggggtcatcctgaagggattgttttcagggagggagacagaccttgaatcagagagttgtgatagactgcctcttcctcaaggaacaaacaacaaatggctctgatggtttgtagcctgcctaattggaagaaaggcaacacagaagtttgagagcccrtctagtccagagaaggggcctctggacagaggtgggaggagtgggggacagagtggtatgggttgggctgcgaagggagttgcctcttctttacatctacctgccaaccccttccattgtattcacctcagttggaaaagtaccagcaaggagactttggttactgtcctcgtgtgtactgtgagaaccagccaatgcttcccattggtgagtgttgaagaagggaaaggaaagcaccgtgtggcagtcttatgggaaggagttggggctcaacacattggagcctgagtcctgaggggaggttaggtaggaatagggggatacctggcctgctgagtctggctgtctcccaggcctttcagacatcccaggtgaagccatggtgaagctctactgccccaagtgcatggatgtgtacacacccaagtcatcaagacaccatcacacggatggcgcctacttcggcactggtttccctcacatgctcttcatggtgcatcccgagtaccggcccaagagacctgccaaccagtttgtgcccaggtagggagcagggagagtcattaagggtcaaaggaaaggcccaagatcccccagagaggggaggacagggcatggccctttcttgaggtctgcttctcccagaatcagggcatctccctgctgagtgactgtgggaaagttatttgattatctgtgcttgagttaccttattgtagaatgttcttgagctgagaagttgggaaccacgaggctttagctctgarcaggtccatagaggagctcaggtggggaggtgggaatgcaggtgactggcagggcctggatggggctcatgctgctgcctctctgacctctgccctggcctaggctctacggtttcaagatccatccgatggcctaccagctgcagctccaagccgccagcaacttcaagagcccagtcaagacgattcgctgattccctcccccacctgtcctgcagtctttgwcttttcctttcttttttgccaccctttcaggaaccctgtatggtttttagtttaaattaaaggagtcgttatygtggtgggaatatgaaataaagtagaagaaaaggccatgagctagtctgctggtgcttgctgttggggaagggaaggtgatggtgtgttggactccaggggccctcatggcccagcccaccctccccagattgaaaaccaggacagatttgtgctcagtggattgggtggtgtttttagtatggagcagaacagaattcctaggactgcgtgtgatgaaatgcaaggtcaaaaggaaaagacaaagcatatttcaaagatgagaaatatttgtttggatatctatgactgtctgtttatactgtaaggggcttaatcagcagctccatcttttagttttagttctaaaggaaaagtagcctaaagtcagtmtaactaaagggtggaacgaggtgggacaaggtccggaattgctgctcagtgatgtgtgtgtgcctgccgctggtggagctgagactgctcatctcagaaggatggggatgcttgatttcctggccaggttgtcccagcacagtggggattggccctgttgtatgacgaagacagcacatggtggcagagatagatactaacccatggactttccaagggagggaataggtctttggagggtatgcaagacaaaggtagacactggataaagaacccggtagtgcccaggtattaccccatctgggccattactcccacactcaggaaccagacgttgtgggtgaggacatgctgtccctcctgccaagtaataacttccttcccagccaggatcctgccccaagtaggaatatagctctgcatttacagcagctcctgctcagaccttgtcaaaaccaccctgcagcttaggattaaggagcatggtcacaggaaggtggggtttcagggcatcccctcaggaactgcccatctccccagaattccaaaatgaaggtccatatgcttgtaggtgtgctggtcatggtgggcttcacagtaggaaagggtaagtggggcccaggggcagggagggaggaaggggtaactgagtccaggaagggggtggagcgtggccatggataatcgggcttcctactggcccagggtatttgagagtgacccagtgcctccatccctccttctgcctccccagttcctgttcccgacatccggacgtgccacttctgcctcgtagaagacccttctgtaggatgcatttcaggctcagagaagtgtaccatcagcagctcatccctgtgcatggtgatcaccatctattatggtaaataaggtcccaggaaggggctgctggtggggcagccaatggcttggtcttctctcctctcacaratcagggctgctccgggcatggggtacaagaagagaggaggggctgagtgcaatggctcatgcctgtaaccctagcactttgggaggctgaggcaggtggatcacttaagctctagagttcaagaccagcctaggcaacatagtgagaccctgtctctacaaaaaaatagccaggcatggtggtatgcacctgtagtcccagctactcgggaggctgaggtgggagatctcttaaactcaggaggcataggttgcagtgagccaagattgcgccaccatgctccagcctgrgtwacagagctagaccctgtctcaaaaaaaaccagaagaatcttggaaggaggggtctaaggttctagggggccagcagagctcacttttctagcctcttgaaggactctgggttagaagtaaattaggtctgggtgaaggatgggaaaagtcagtagcaggggttcttggactatgggaagctattggaaggggttatcagctttcccctctccctcagatgtcaaggttcgcttcatcgttcgaggctgtggacagtacatttcctaccgctgccaagaaaaacgcaacacctactttgcagagtactggtatcaggcycagtgctgtcagtacrattattgcaactcctggtcaagcccccaactccagagctctctgccggagccccatgacaggcccctggccctgcctctgtctgactmccagattcagtggttctaccaggccctgaacctctccctgcccctccccaatttccatgcygsgacggagcctgatggcctggaccccatggtcacactgtccctgaacctgggcttgtcttttgctgagctgygccgcatgtacttgttcctcaatagttcaggacttttggttcttccccaggctggactcttgacacctcacccttcctgaattccacagtgcaaatatctttctgtaacaccctcagcatcctgcactgccctctctgaaaacacccacattctttggtcactgtgatttcttaggcctccgtctgttgtaccactagcatctatatgacttttgtgtaattttctctcttgaactctggtgctgtttttttgtttgtttgagacaaagtctygctctgtcacccagggtggagtgcagtggcatgatctctgctcactacaacctccacctcccgggttccagcgattctcctgcctcagcctcccgagtagctgggactacaggcgtgcaccaccacgcctggctaattttttgtatttttagtagagacggggtttcaccatgttggtcaggctggtctcgaactcctgacctcgtaatctgccctcctcgacctcccaaagtgccgggattacaggtgtgagccacygtgcctgkctgagctctggtgctgttcttccccctagaaaagaatctctagtgtggattctgcccagacaggctgacctgagaaaggcacagtggttcctccattccttccccatcatctgagtgttccagtatcccccatccctctcaatccagtcacctgcctattgacatctagctctgtttcccctgtcttgtccatgtctctaagacccagtaccagactgaactagcagcaagaaggacgaggaggccgggcatggtggctcacgccggtaatcccagmactttgggaggccgaggtgggcggatcacttgagattgggagtttgagaccagcctggccaacatggtaaaacccgctctctattaaaaatwgaaaaatcagctgggtgtggtggcacacctctgtaatcccagctactcaggaggctgagacaggagaatcacttgaacccgggaggcagaggttgcagtgagccgagatcgcgccactgcactccagcctgggtgacacagtgagactccgtctccaaaaaaaaggatgaggaatagaattctgtgcagatgtcctgacttggcaattttgtgtccctgcctcactgtctccaccaacccccgcctgtcctrgtgttgttctgcctcctgtcctctcttgctctcttgtcagtctctggcttcctcggccccatttcacttcactgagtcctgacacccatctccctaggggcctgtgagaggagagggaagggtctgttctgctcagctccatgtcccccattttcctccacaataaactgggactgggctaaaactgtgtcacattgtttgtggggtcaggctcaggtgtgggcaggtaaacacagattaaagaggkttaatgcctggcgcagtggctcacgcctgtaatcccagcactttgggaggctgaggcaggcggatcacctgagattgggagtttgagaccagcctgacyaatatggagaaaccccatcgctactaaaaatacaaaattagccgggcttggtagcgcatacctgtaattacagctactcgggaggctgaggccggagaatcacttgaacctggaaggtggaggtggcgatgagccgagattgcaccattgcactccagcctgggcaacaagagtgaaactgtgtctcaaaaaaaaaaaaaaaaaaaaagggttagtgaggtttgggatccaaataggattgcagagccctctccattgcacttggcgtttgtcgcttcctctcggcctcctgtaaagggcacacatccctccccaccctctgcttagctggagatcaaagcatggggactgtgattcttcccagccttaaacataccctacaaaacctggaaagttagaccctgatgatgccaggtcttttcacctaagaaaagaaactttaggccaggtgcggtggctcatgcttgtaatccctgaactttgggaggccgaggtgggtggatcacctgaggtcgggtttgagaccagcctgaccaacatggtgaaatcttgtctctactaaatatgaaaaattagctgggcatggtggctcatgcttgtaatcccagctacttgggaggctgaggcaggagaattgcttgaaccggggaggtgtaggttgcagtgagctgagatcacgccattgcactccagacagggcaacaagagcgaaactctgtcttaaaaaaaaaaaaaaaagcctgggcgcggtggcttgcctgtaatcccagcactttgggaggccgaagcaggcggatcatgaggtcaggagttcgacaccagcctgaccaacatggtgaaagcccatctctactaaaaaaaaaaaaaaaaaaattagttgggcatggtggcacgtgtctgtgatcccagctactcaggaggctgaggcaggagaatcgcttgaacctgggaggcagagtttgcagtgagccgagatcgtgccactgtactccagcctgggtgacagaccgagactgtctccaaaaaaaaaaaaaagaaactttctctttaaaccagaaagactcaggaactcagagccacatgccagagttacctgctgctggggccctggactcctgccattccttagttcttttcaaggattctggcatccaggatgccctctcgaggggcccaatttgaggggcaaagtgctgagagcactgatgttgggctgcagtggttggatcttcatgctaatattttaattttgaaatagtgcaaacgtatagaaagcaaggatggatacaacagccttttccatacactggataaacatgctggacataacgctgctctgagtcaggcttggtattgagcagcaggactcccagatgagtatagccaggtgtctgcccttccaagtcttgcagcccagtgcttgggttatgaaacctttttctgaaaagcagtgcagctttgtggctgggaggtccaatcccagcccctctaccacttggatatgtcagtctcttcagccccaccttggtcacctgtcaagtagggatagtgcctcagatgattgagaaaacacatgtaaatgtgcatacacaagtagaagttaaggccttttccccctcaaaaaaatatatttgccctagagtcaaatgcatacacaatgttcagcttttttttctaaggttcttactatgttgcccaagctggccttgaactcctgggctcaagagattcttctgcctcagcctccaagtagctgggactacagwtgcacaccaccatgctcacctggctgatttacttattttcaaacctttttggtaaaacattcagaagcttgcacatatcacaagatggatttttgtaaaccacacatctgtgtaaccagccaccaaatcagcgtgaagacctttaccygcagccaagcctgcctctgttcccctctcccaggtgctcttcccagctctggggtagccgctgtcctgactggtagtagcttagatgagttctgtctgtgcttgatggaaatggcatcgtacrcatctgcttttacctatatagtgttttgcacacgtgttaacaaatctgtgtggcctgtactctgacggaaaataccaaaccaatgataattaagtcatgaggcagttggcgtacaaagagaggtacaaacccttaatgtgccccccaacccccaccttgctaagtccacccttctccatgacctctgacgtcagtataagacagagaaaggcccaggtttatagcaggtcaacctggaagacaccctcagaggctgaagaacttggcccagaattgaagagaccaggactccaataaggtctaacatctctttgagagtggccttctcgg

SEQ ID NO: 1659 - DNA, 19486 bp, Homo sapiens
tatgtctgtttccctctggtcagccattggagggaggagaggggctgtggatttcttgaaggcgtcccactcacctgagggctggggtctaggaggttgtgaaggcagcattgggakccatgcycccatccccacagtgcggggctagcaggagaggaggaggtagrtctcattgtacacatccgtcttctggagagaacaacctctcctaccatcccttccttctacaccttctctgcctgtcataggtggctgcaggaggggtccacgttgggagggacaggtgagctggcctttggtgctgacacactcctgactttgccctttctcctgcagggggtgccattcccgcagaatgaggctaatgccatggatgtggtggtccagtttgccatccaccgcctrggcttccagccccaggacatcatcatctacgcctggtccatcggcggcttcactggtaccagcctccctcccatcccccactgtagacacattcatgaccacccagccccacccgggagaggtggggaaatggggtggggtggaggctcaaggaagaagagagaggaagtagaatctctgagtgggcctggaagaagctatcctatttgcatacacttcacctttccttcccctcttgtgcccagtcattaaaaggaaaagcagacccaggtcctgggtggggagatcagggaaagtgaatgtttcctgcccattatcttcagtgcactatctccagtgttctatccccatcctctccagatagtyccctaaccaagtgaagtaggttaagaaaaaaacaagggataacatagggggaatggggttggcctatagggtcagtgggatgagagcatgggtggtggggagaaaggagcctttctcagttcttactcttcttccctgccctggtaccagccacgtgggcagccatgtcctacccagatgttagtgccatgatcctggatgcctcctttgatgacctggtgcccttggccttgaaggtcatgccagacagctggagtgagtgcagctcccaggcctgcccttcctgggaaggggtgggctggaactgggaactgttctgagatggctcccttttcttgggtggggagtaagtcgccccattgttggaagcaggaggaytcctttgtctgggggcctcagttttctttctccgtgaatagtgaggacctttatgttgggcaagggctttgtctctgccatcccttcacctttatcccactctagggggcctggtgaccaggaccgtgaggcagcatctcwatctaaacaacgcggagcagctgtgcaggtgagggccggccagcgtccggcattgaacacctgccccccatacagctctgctgggcgctcaaaccctgaaactagtactaaagtgcaagttggtaaaaggccactggctcacatcctgagtgaccctgccaccacctcaactggcctaacccctcccaggtcccctgggactctggaccacctcaggatctggcaaccaaagggttaaggcctggcacggcaggggtctcccagcagggccagactgaaccatgccccttaaataatcccctctcacccctgagtgaagggctaggtcaagggctgtgctatagcaaggggagggtaagaatgctaccagtgcagggataggggtgggccagttgtcacccgtctccctctgagctctcccttcccactgctctgttctctgaagataccagggtcctgtactgctgatccggagaaccaaggatgagatcatcaccaccacgtgagtgcgtgggaatctcggccctcaggaaccccagagatggccaggaacttgtcccttctacctctgcccaccagaaacctgggtatctagacccttcctcctaacctccagcccctccagggtacattcttctcacccccagggttcctgaggacatcatgtccaaccgaggcaatgacctcctgctgaagctcctgcagcatcggtgagagccagggtgtgtgcgcgctgggggcagtgtacacacacagatactgataccagcacagggaaggagggaggaaggttcagggatggtgaatgaaaaaaaatcagccctgacctgtcctggcacttcctccgtaggtatccccgggtgatggcagaggagggtcttcgagtggtgaggcagtggttggaggcctcctcacagctggaggaaggtgagaagggatccagtgaggcttggggcgggggcccagcaaggtcaggttgctgactggctgtcatctctctccctgaccagcctcaatttatagccgatgggaggtggaagaggactggtgtctgtctgtcctccgctcctaccaggcagaacacgggccygacttcccctggagcgtgggtaaggagctcctggggcaggagagagggtgggaagggcctaggaaggggatgaatacccagatgtgtggcctattttgagcgcctcctctctgcaggggaggacatgagtgcagatggacggcggcagctggctttgtttctggtgagctaaggagtgggaagtgggaagggttcttgaatggccagggctcacatagggggactggggataccctataagcattggaagtggcagcttttgtagagtgggtggtggatgcggaagtggagggtggggagggagtccagtggctgcccctcccaacagtgctctgtaccccacctgtcccacctcctttcctcaggctcggaagcatctgcacaactttgaggccactcactgcaccccactcccagcccagaacttccagatgccctggcacctctagggaccaactgggactcattatggaagaatggggtgagaggagacatgaggaaagaccctcttatttgtgattctctgtgttcatgttgctgtttatagtttgtgkaaagtgggggaccatcccccttctcaccactgttcctcttgcacgtttcccctcattcatgtggctgtacttaaccttctccaayatacatcctgcattacatgaatggattattcctaataattaataaaaaggtattttttctactatcwggctaattgtataacttctcaagtgtccagggagccaggggcaggtagtggggagagcagaggccccaaagagctgggctttgggaaaccctaactctagacaatctagctaatctaacccttcccatctctgtgtccccctaggccttcagcccctaacctgagctttcctcaggcagcaggtccccaaacctccccggtccctgatgtgcctactgttatcacaactgtgcagcctccytggcccctcccgcctccttcttcagttcttcctgcatacaacmaccccaggagcccatggttgccccctcctgcttacggctcatgagctttctaggatccgatttcacctacccagtgcttctgctggtttccaggttcaacctgcatggtgttactagcagtacccccaattttcattgctcacctcttgttatcttggtgaagagtgaggaagggcctgctccccacgtcttatgcagcaaaccctgcacacccaccttgccatgtcatcaagtctctgtcctcacagcctttttgcagttcaacaaacacaggccctgccagggacggagggccaggtgccaaggactcatgtcttctcagagccatactttgccttttggacggctctgttaggagaagatgcttaggttgtacctgaggaaattggttccctataactgccatctatctctaactttggaccttgtggaacacagtgaataaatccctcttccacccattggtttgttgcctggcagttttttttatttttttggagatggagtcttactatgttgcccaggctggagtgcagtggcacaatctgagcttgctgcaacctccacctcccaggttcaagtgatcctccagcctcagcccctctagtagctgggattacaggtatgcgccaccatacccagttgatttttgtatttttagtgaagatgaggtttcgccatgttggccaagttggtctcgaactcctgacctcaggtgatccaaccgccttggcttcccaaagtgttggggattaaaggtgtgagccactgcgcctggccgctggccactttcttcatttggaaacttctcttttccagatgaaagaccccaaagtttatcgccctgagtccatttttgttttgttttattttgttggggatggttttttgtttgttttttgagatggattctcactctgtcgcctaggctggagtgcagtggcacgatctcagctcattgcaacctctgcctcccaagttcaagcgattctcctgtctcagcctcccaagtagctgggattacaggtgtgtgccactacacacagctgatttttcgtattttagtagagacaggtttcaccatgttgcccaggctggtctcaaactcctgagctcaggcaatccacccacctcagccgactccattctttttttttttttttttttgagacggagtctcgctctgtcacccaggctggagtgcagtggcacaatctcggctcactgcaagctccgcctcctgggttcacgccattctcctgcctcagcctccctagtacctgggactacaggcgcctgccaccacgcctggctaattttttgtattyttagtagagacggggtttcactgtgttagccaggatggtctcgatctcctgacctcgtgatccacccgcctctgcctcccaaagtgctgggattacaggcgtgagccaccgcgcccggccaactccattcttttgagcaagatacttaacgtgggcgacaatgttctaatgtcctagatggagtctctggctaaatttctgtgtcttctccaaacccagtgcatgaagctcttcttgaaaccccagggcagaggctgtgtgtgcccccattagcgctgcaactccttaagggaagatatactgagtctccactggaagtggagatctgagacttaatcaggtgatgtgatgcctgaaatttggagttagaagaggcaggtgaccacagctccataatgctccaccgttagcaaacaggtggatagctgatactggtgccctctcctctatcccattccaggggggcaaacgatgggaagtgtggaacatgaagctctggagccagctgcacagttctgaatcccatcctcccagatccaacagaagagttaatcccctgaaaactaaatttttgttcagctaagggaagctccttaaatgcaaagaggagctgggcatggtggctcacatctgtaatcccagcactttgggaggctggggcaggaggatcacttgagcctagaagttcaagactggacagggcaacatagggagactccatcagtacaaaaaatttaaaaattacccaggcatggtggcatgcacccgtgttccaagctactctggaggctgaggtaagaggatcgcttggctgaggatcacggtaggttgaggctgcagtgagctgtgatcgtgccaccggactccagcttgggtgacagagtgagactctgtctcaaaaaaaaaaaaaaaaagcaaataggggtgcccagtctcacctcccataccctggggacaaaggacacccctccctggacatggccattagggactctgctgaactgcccctactgccactttcccccatcttactgcatgtaattgtagacaacagtggatgacctgaggggcccttagatacctgaaattgggtagggaaagaaaggtaggctcaacatgtgaattctgaacccccccatccaggggcctcagcctacttcagattactccctatgcaataaggttcagagcagctgtgtttgttttcagaactaatccccacccaggggtggaagcaggcccctgtccactcctcaccctatatagcaaagttccagcagttccaggggatgatcagcagagatgcagaccttcccagttgctggggcgctggaccctgctatactggacacaaggtgaggcctgaaagtccaggcaccctgaggagctgggcaaactagcagaaaagatggcgctgggagaaaggaaagttagactctggacgggaaatctggaaagaagtggttcccagctgggccaaaaagcctcatcctacgccgtctcatcgacctgggctccaccctgagtgcctccagtgtgaggtgctggactggctctgtgctgcctgtttgggttgagggtttgctcctaggagaggcatgtatttctcgtacagctgtcacaagcgagtgagggctccggaggtggagggcccaagagggtggggagctcaggcgtcagtgatagccagatttccatccatcggtccgtccgtccgtccatccatccatccatctatccaatcaacaagccattccggattcttcaggaatccagtcattcatttatatttaggttaaagaccctctctctggttcctctctagaacgcaatctcgagccgctcccccaacaaaccgtggccctctcccgaycgggtcatctacagccccgcccctcgtttgcctggctccattcccctaacctkggcgttctgtcctcaggccccgccttctttgtttcgtcactcggttgcttaccctcaggtatcccttaactctaggtaggagcactcagaagggacaccgtcatctgctgctgtcgccatggcgattattcaacgccctgcctcttcaccccaggaaaaccttcgcggaacccgtcaccatggaaacsaactctctggactcttagcgcgccctgggctggccctgctgggtggacaggagaggagcaaaacgcaacaaagacgggattaattactcggaggccgcgccccctccgaagaaggccccaccctgccccggcctcacccctccccgaaataattcgaggaaatattccgcgaatgctgggtgggtgtcttgccccccggttccctcaaggcccacggtcgcttgaattccacagcaagtcctcccggacctctcagggcaatcccctcccgaagcccagcctcagcctcgcaaagcctctagtcgttggccttttcgttgcgattatattcgagagggagcttcagagggcgccgcgaagttcccctgtgcttcccctttgccctttgccctcttcgcttcaagaggagccctggctctctttttttttttttttttttttttttgagacggagtcttgctctgtcgccaagctggagtgcagtggcgcgatctcggctcactgcaacctccgtctcccgggttcaagcgattctcctgcctcagcctcctgagtagctgggactacaggcaggcgccaccactcctggctaatttttgtatgtttagtagagacggggtttcaccatattgtccaggatggtctcgatctcttaaccttgtgatccgcccagctcggcctcccaaagtgctgggattacaggcgtgagccacggagcccggccctctgattctttttgtctatcactctgtgcactcattcattcaagacatttatgtaggtgccccgcgttcctctgcagttctccactactctggcttttctctaatacaatttattttgtgttattatttctttaagacagagtctcactctgtcgcccaggctggagtgcagtggtgcgatctcggctcactgcaacctctgcctcccaggttcaagagattctcctgcctcagcctcccgagtagccaggactacaggcgtgcgccaccacacctggctaatgtttttgtattttttgatagagacggggtttcaccatgttgctcaggctggttgcgaactcctgacctcgaatgatcccccaccttggcctcccaaagtgctgggattacaggcatgagccgccacgcccggctaatttttggtatttgtagtagaaacggggtttcaccatgttagccaggctgggtgcgaactcctgacctcaggtagtccacccgccttggcctcccaaagtgctgggattacaggcgtgagccaccgcagtccggccctaatatagtttttaaattcattcattccaaggcttttgggaggcgctcagtggcgtgcagtttcctctcgaatttctttcttcccgcagtctttctgggcgggcgtctcccgtctgtttcttcccatcttcccccttatcatcctgggactggataattcttgaatagtctgggaggtagcagggaacccgagttcggagcctcgaccagaacctccagacgggaaattggagcaggtggtgtcgttccaggacgctgaggaccacctcctcccctaacgcacagcccaacgatcctaaaagtaaaaaccctgagtttctgagtcaagactgagctggtggggtggggaccgagtaggcgtggatggggagcccagcgggtccccagcggagaaaatgggtgagacgcctggggccgcggtctccagaattcgcctgggagggagagtggcgctacggcgccgccttcctggggagccgcttcgggctccggatgtccgctggggcccgacgcttgggtcccgacgcgcggttcgcactttccaggtttcttccccagggaacagagcttgagcsgggggccacccccccgtcctaccggagttctgaggtgcggtcaggcgcggagagcggacgcccagcgccagattctgtgggctccggagttcaggcccactgagccgcagctgagcacaggcggggcaggaaaaaggatgaggtgagggaaggcgctgggttcctggaaccccaagggagcactgagctgagtacgtatcgcttgggatccaggtgtccttgttttaggatgtctgacaggtgtccccagggtatgagaagtgggactgggcaccccctatttgctttttttttttttttttgagacagaccacatgtttcctatcttggaaaatggtaccacttccttgtgcaagcctacccctgttccctcacccctcgttcagtccaacagcaaatctgtccagtcttctaactgtatctcaggttcattagccccgcttcctcgtccctgctcgtcttctgccggaccagtccgccatcttgtgaccggactcgggaatagcgtcctacttcccggcggcctccactcttgacccaaatgcaatgtgcagccatggcaatcttttataaacagaaatccgatcaagttactcctctgccgaaatccctctggtcagtggtttaactgtcgaggtgctcctggcagcactctgccctccccacatcattgctggtggacttgtctcccctactagactgtgccctgtgagggtggagactttgtgcagggttgtatccccarcatctgatgcagtgattcaataaacatctgtccaattaataggaaagacagttccttttctcattcccctattgctggtcccctgccctcaagcaggatgttatgccccagagtggctgtgggtgcgaacattctgcccctctggctggtctggcactgatttccaccctgagctggtgttgcctctctccttcctcttggccaacctctcttccaccaatataagcccaaactggaggccagcaggcagtcatgcgttttatggcaggccctgcagggagccagagtctgggtcccctgtgcttccacagcagcccccaagccctctacacggtcctcttaatagtgctggtcatgatgagcttggtgtttggtaagtggctccaagggttcagaagggtctcctggcctggatggagaaacccacagacaccaagtgtctgggtacacctgtccaggatgctcaggtaaacccatgcaggaggagagatgggacagatgggtttggtagggaatgcctgctcatggactgatgtgcaatctgaagatttttaaaaatttattattattattatttttgagatggagtctcgctctgtatcccaggccggagtgcagtggcgagatctcggctcactgcaacctccacctcccgggttcaagcgattctcatgcctcagcctcccgaataactgggattacaggcataagccaccaagcccagctaatttttgtawwtttagtagagayggggtttcaccatgttggccaggctggtctcgaactcctgacctcaggtacctgcccgccttggcctcccaaagtgctgggattacaggcgtgagccaccgcacccagcctctgaaggagatttctagtgaccaccccagggctgtctcacttcacagcagtgacctgaatagagatactgaaggaatcctctctggatctgagggcaacatagaatagggagggttagggagtgtgctggatgagaaaaccagaatccacaggatagaacaagactgagtccagcctgctgggctccccacttggctgcaaagcaccagccacagagacacaggattcaaagtgttggtttagcactttcctctgcctaacaccaagtgctctgctgggtctggggatttgttaacatgtggtctggccttaggaccagaggaaaagggggatgtatgtgtatgcagttggggaaggaagcagagaattggggctttgatggttttctgagacaggaagggagggaggagtggggctgagtggcctggaatcaggcagtggtagggtgtgaggtagaatggggtgtgagtggggtcagcacttctctgtgttctaggtaagtttgttcctgtcaattgggaaccccctcaaccacttccaytccccaaatacctgygctgctaccgatgcctcttggagaccaaggagttagggtgccttctgggatctgacatctgcctcaccccagctggcagcagctgcatcactctccacaaaaagaacagtaagtggccttctcctgtcatgggcccagcactctcccaaacggaaactctctcagcctcctaagctgcaccccaagtcttgttcccataatcccataagacattgctccratcctgtcttttttttttttgctgctctgtcacccaggctggagtgcagtggcgcaatcttggctcactgcaacctccacctcyccagttcaagcaattcttgtgcctcagtctcccaagcagctgggattaaaggtgcacgccaccacgcccagctaattttttgtatttttagtagagatggggattcaccatgttggccaggctggtctcgaactcctgacctcaggtgatccacccaccttagcttcccagagtgctgggattacaggcgtgagccaccgtgcccagcctctcttcccttttcttcagagccacactctgtctccacttccactaaccttctctcctcaatctgtagctgaatakcttctaccctatcaaggtgcgcagctttgacggggaccctccagatctccaggtgcccttgcctgtcctcaagctgtctgcttccgcatctgtctgcagttactgctggtgttgctcttctcctgcatcctccacggcttcttcagtctccttcatggagcgttttctctctgacccttagtggttcatgttcaccaaggtttggtccttagctgtcttcccacttcatatactcaaaagcagaggattttatctgctttgctggcttcaaccagcagccacataccacttccttctgaatctgaatgttatgtcaaaccgctctcctcatatcccgttgaccactggacatctccctcgctgaaaattgactccttcccgatgcctgctcttccaccgaccccccacctttcttaagttagcaaaaacgtaacacataatatgtgctaggcactgttctaaacacttgcaatccrctgaggcaggtattattactatgtgcattttacagatgaggaaacaggtgcagaaaggtcataaccttgcctgagtctcacagatgctgagccagaatttgtgatggctccagagatggtgctctcaacaaccactgcatgcagctgcctgtgttcaagtcctcttactacccttttaacatagccgatgcacagatgtgggtcaaatatcagagtatacaataccatcaaaccaaagtctcccgctactaccctaacccacctggctcccctgcacatgtgaccactttttttactttctggatgatccctcctgcaatcttttatgcacattccaccctgcacaaatatgctgtttactattttttcacctcttcccccgccccaacccaagatagtagcatcccactgtaaacattattccacatttaagttaggggaactgaatgttccgatatcagtttgtaaacagcttccttgttttattgacctgctstatactactccatagcatgcgcatatcacagctgatttccccatcccactattgatgggcattttggtcatttctctcaagcagggcagcagcaaacatccctgaacatgacttcttgggatgcaggcacaaagatttttctctattatgtataacagcagcagacatcatcttattctcttttggtctgaaaaataaataacaatacacctccttcctgccacccaatctccaaaacatttcccagctttttctcacatggtcctatggtgctagttctcctcacttggctcagtaactcccaactccccctccaaccattacatttcatatggctcttttcctccagccttgcatgggaacttcagtggagttccatggctggtgaacactgggcatgtccacccatgcctaactacaggaatcttttctttttcttttttttttgacttatgagtgtggggatgagaggatttggggctcttcctggggacttccgtatcactggtgcccactgtccctccccaggcagcggttctgacgtcatggtgagtgactgccgaagtaaggagcagatgagtgattgttcaaatacccgaacttctccggtgtctggcttctggatattctctcaatactgcttcctggatttctgcaatgaccctcaaaacagagggctctatactccttagtgtgactgcagcaaactttggtgtaaaattccaccagtttccagccaccttcctgacttctatctgggcttggccaggacttctagtccctcayaccagccctccttgcctccctccagccactggaccccagccttggctcttcctcttggttgacgcccttcagcacacttactgctactctgtacccccagccctactgcccaccaggtttcctctcttgtcccctagtccctggatgtttctcccaaataaatttgtgtgtaaactgtttggtatgtctctttcttctggtggaggtgaaggctgagggaggtgcacctgcctaactgccctaccatgggtcaggtaagggacccccagctctgctgagctgtcctcttgtcctgccttggtatgtgatttgctctagacacaaaaagagaaagaggaaatgaaagccctcctatggygaatgccagaaagttagtgggcatcctcggcagtgctgtcagaccagagctgtgtgggggctaggggcgtttagagggctatgttggtgggaagggggctgcgaaaggaccaggcccaggtagaaggaggtgggtgagaaggccactctttttttgagacagtctcactgtcacctaggctggagtgcagtsgtgtgatcttggctcattgcaacttctgcctcccaggttcaagtgattcttctgcctcagcctcccgagtagctgggattacaagcacatgccaccacacctggctaatttttatattttattagtagagacggggtttcaccagttggccaggctggtctcgaactcctgacttcaagtgatctgcctgcgttggcctcccaaagggctgggattacaggcgtgagtcaccccgagccgagaaggccactctcaaagagatgttagaccttattggagtcctggtctcttcaattctgggccaagttcttcagcctctgagggtgtcttccaggttgacctgctataaacctgggcctttctctgtcttatactgacgtcagaggtcatggagaagggtggacttagcaaggtgggggttggggggcacattaagggtttgtacctctctttgtacgccaactgcctcatgacttaattatcattggtttggtattttccgtcagagtacaggccacacagatttgttaacacgtgtgcaaaacactatataggtaaaagcagatgygtacgatgccatttccatcaagcacagacagaactcatctaagctactaccagtcaggacagcggctaccccagagctgggaagagcacctgggagaggggaacagaggcaggcttggctgcrggtaaaggtcttcacgctgatttggtggctggttacacagatgtgtggtttacaaaaatccatcttgtgatatgtgcaagcttctgaatgttttaccaaaaaggtttgaaaataagtaaatcagccaggtgagcatggtggtgtgcawctgtagtcccagctacttggaggctgaggcagaagaatctcttgagcccaggagttcaaggccagcttgggcaacatagtaagaaccttagaaaaaaaagctgaacattgtgtatgcatttgactctagggcaaatatatttttttgagggggaaaaggccttaacttctacttgtgtatgcacatttacatgtgttttctcaatcatctgaggcactatccctacttgacaggtgaccaaggtggggctgaagagactgacatatccaagtggtagaggggctgggattggacctcccagccacaaagctgcactgcttttcagaaaaaggtttcataacccaagcactgggctgcaagacttggaagggcagacacctggctatactcatctgggagtcctgctgctcaataccaagcctgactcagagcagcgttatgtccagcatgtttatccagtgtatggaaaaggctgttgtatccatccttgctttctatacgtttgcactatttcaaaattaaaatattagcatgaagatccaaccactgcagcccaacatcagtgctctcagcactttgcccctcaaattgggcccctcgagagggcatcctggatgccagaatccttgaaaagaactaaggaatggcaggagtccagggccccagcagcaggtaactctggcatgtggctctgagttcctgagtctttctggtttaaagagaaagtttcttttttttttttttggagacagtctcggtctgtcacccaggctggagtacagtggcacgatctcggctcactgcaaactctgcctcccaggttcaagcgattctcctgcctcagcctcctgagtagctgggatcacagacacgtgccaccatgcccaactaatttttttttttttttttttagtagagatgggctttcaccatgttggtcaggctggtgtcgaactcctgacctcatgatccgcctgcttcggcctcccaaagtgctgggattacaggcaagccaccgcgcccaggcttttttttttttttttaagacagagtttcgctcttgttgccctgtctggagtgcaatggcgtgatctcagctcactgcaacctacacctccccggttcaagcaattctcctgcctcagcctcccaagtagctgggattacaagcatgagccaccatgcccagctaatttttcatatttagtagagacaagatttcaccatgttggtcaggctggtctcaaacccgacctcaggtgatccacccacctcggcctcccaaagttcagggattacaagcatgagccaccgcacctggcctaaagtttcttttcttaggtgaaaagacctggcatcatcagggtctaactttccaggttttgtagggtatgtttaaggctgggaagaatcacagtccccatgctttgatctccagctaagcagagggtggggagggatgtgtgccctttacaggaggccgagaggaagcgacaaacgccaagtgcaatggagagggctctgcaatcctatttggatcccaaacctcactaaccctttttttttttttttttttttgagacacagtttcactcttgttgcccaggctggagtgcaatggtgcaatctcggctcatcgccacctccaccttccaggttcaagtgattctccggcctcagcctcccgagtagctgtaattacaggtatgcgctaccaagcccggctaattttgtatttttagtagcgatggggtttctccatattrgtcaggctggtctcaaactcccaatctcaggtgatccgcctgcctcagcctcccaaagtgctgggattacaggcgtgagccactgcgccaggcattaamcctctttaatctgtgtttacctgcccacacctgagcctgaccccacaaacaatgtgacacagttttagcccagtcccagtttattgtggaggaaaatgggggacatggagctgagcagaacagacccttccctctcctctcacaggcccctagggagatgggtgtcaggactcagtgaagtgaaatggggccgaggaagccagagactgacaagagagcaagagaggacaggaggcagaacaacacyaggacaggcgggggttggtggagacagtgaggcagggacacaaaattgccaagtcaggacatctgcacagaattctattcctcatccttttttttggagacggagtctcactgtgtcacccaggctggagtgcagtggcgcgatctcggctcactgcaacctctgcctcccgggttcaagtgattctcctgtctcagcctcctgagtagctgggattacagaggtgtgccaccacacccagctgatttttcwatttttaatagagagcgggttttaccatgttggccaggctggtctcaaactcccaatctcaagtgatccgcccacctcggcctcccaaagtkctgggattaccggcgtgagccaccatgcccggcctcctcgtccttcttgctgctagttcagtctggtactgggtcttagagacatggacaagacaggggaaacagagctagatgtcaataggcaggtgactggattgagagggatgggggatactggaacactcagatgatggggaaggaatggaggaaccactgtgcctttctcaggtcagcctgtctgggcagaatccacactagagattcttttctagggggaagaacagcaccagagctcagmcaggcacrgtggctcacacctgtaatcccggcactttgggaggtcgaggagggcagattacgaggtcaggagttcgagaccagcctgaccaacatggtgaaaccccgtctctactaaaaatacaaaaaattagccaggcgtggtggtgcacgcctgtagtcccagctactcgggaggctgaggcaggagaatcgctggaacccgggaggtggaggttgtagtgagcagagatcatgccactgcactccaccctgggtgacagagcragactttgtctcaaacaaacaaaaaaacagcaccagagttcaagagagaaaattacacaaaagtcatatagatgctagtggtacaacagacggaggcctaagaaatcacagtgaccaaagaatgtgggtgttttcagagagggcagtgcaggatgctgagggtgttacagaaagatatttgcactgtggaattcaggaagggtgaggtgtcaagagtccagcctggggaagaaccaaaagtcctgaactattgaggaacaagtacatgcggcrcagctcagcaaaagacaagcccaggttcagggacagtgtgaccatggggtccaggccatcaggctccgtcscrgcatggaaattggggaggggcagggagaggttcagggcctggtagaaccactgaatctggkagtcagacagaggcagggccaggggcctgtcatggggctccggcagagagctctggagttgggggcttgaccaggagttgcaataatygtactgacagcactgrgcctgataccagtactctgcaaagtaggtgttgcgtttttcttggcagcggtaggaaatgtactgtccacagcctcgaacgatgaagcgaaccttgacatctgagggagaggggaaagctgataaccccttccaatagcttcccatagtccaagaacccctgctactgacttttcccatccttcacccagacctaatttacttctaacccagagtccttcaagaggctagaaaagtgagctctgctggccccctagaaccttagacccctccttccaagattcttctggttttttttgagacagggtctagctctgtwacycaggctggagcatggtggcgcaatcttggctcactgcaacctatgcctcctgagtttaagagatctcccacctcagcctcccgagtagctgggactacaggtgcataccaccatgcctggctatttttttgtagagacagggtctcactatgttgcctaggctggtcttgaactctagagcttaagtgatccacctgcctcagcctcccaaagtgctagggttacaggcatgagccattgcactcagcccctcctctcttcttgtaccccatgcccggagcagccctgatytgtgagaggagagaagaccaagccattggctgccccaccagcagccccttcctgggaccttatttaccataatagatggtgatcaccatgcacagggatgagctgctgatggtacacttctctgagcctgaaatgcatcctacagaagggtcttctacgaggcagaagtggcacgtccggatgtcgggaacaggaactggggaggcagaaggagggatggaggcactgggtcactctcaaataccctgggccagtaggaagcccgattatccatggccacgctccacccccttcctggactcagttaccccttcctccctccctgcccctgggccccacttaccctttcctactgtgaagcccaccatgaccagcacacctacaagcatatggaccttcattttggaattctggggagatgggcagttcctgaggggatgccctgaaaccccaccttcctgtgaccatgctccttaatcctaagctgcagggtggttttgacaaggtctgagcaggagctgctgtaaatgcagagctatattcctacttggggcaggatcctggctgggaaggaagttattacttggcaggagggacagcatgtcctcacccacaacgtctggttcctgagtgtgggagtaatggcccagatggggtaatacctgggcactaccgggttctttatccagtgtctacctttgtcttgcataccctccaaagacctattccctcccttggaaagtccatgggttagtatctatctctgccaccatgtgctgtcttcgtcatacaacagggc

SEQ ID NO: 1660 - DNA, 16421 bp, Homo sapiens
gagcagcaggtagcgttggcagttttcattttttgaatcattaatgtttgctgtcatcctaaaacgtattatgcccttttgcacataatgacagggtagtacattggttaatataggcctatatcactatagctacttggagtgccccgtgtttcacagtttaatgaaggtgatatacagtaaggttactaagattgatagagacaattcacatgacatacaccccactaasacygtcattctttactgcccctctctccaccccctttcccctgtcttaactaatttttttaagaacccagtttcttttttcattaatataattaatgtggccaagtccactccttcttctctctctctctttaaaatttaccatcaatggcacaaaaacctccaaaaggttaatggagaattatacttaattataatgattcattatcatcagtgcagttaagctaatttattgtctgctccttaactaagagaaaagtctgttggggtgaaataacatacaataattagccttttgtgtttagtgactgctttatcctcttaaatcttattataaaattgaggctacagttgtgaaatagctgtcatagttgcaaagaggcagtagaatgtgtctgtgtarttgcaataaagcacacctgttacagaggtatagggaaacagtaaatatcagcatgtcagatgaggacagttacagggcttggactgttaagtctggcattgtccaaaggccaaatataaattaataacaggaacacttgctaccactaatgtgttttagattagcaggataatgccacattcagaagcacagattttattagcatgtcaacattggcaagaacacatgcacttttctcaaccataacataaaagcaaaatgagagagagagagagarcgcacgagcgaacaagtgagaggaaggaaaggaatatgtaaatgacaagatagcaccaatacaacaaattgacctggtcttttcaatggttttcaaaagttatttaaaaatacatatttatggaaggttaaagggttatgagcaagtcatgccaaagagggcagttaaagagagggacaggaagaagttgtccacaaatcagtatgcyactttagcattccaaaacatggttggttcctaagtttcacaacaggaacttaagccatatgtagacagcctacattttcttgattatttttacttttgtgttgctatttttgttgttcatgttttttttttttttttttaaagactatgcccctataaaatcctagtgtatcttgcaccgttgaaaaagttctcccccatctctgaattggtgacattgaggaaaagttaagatagtgtgtttgggcttggaggatcagctgtgtgggcaagaatggagtctgggcagtgttacatccacaaccaaatatgagcattgtaccagaacgagatctcttcagcccagcctccagttacttatatgccttgtcaagtatactgatctgtaattttgggctaactcagataataaaaggaaagaccaataaaatgataaggaaagagttttgatggtgaggagggccctttctttgcattcccttgtccctgctgccagggatctcactggggtccaatggtcttagagaaggatggcaatgattttcagtctccccccatcctccccttaccaactgctgactccattacccagtacttacttctcagcgtgttgcttttgatcacgctgctgcatatgacctgtgtaatgtggcctgctaggaatccctgccagggataacaggggtgcttgagaaagaaaatctgcataaaacttatttcattcaaaatgtaaatgtcaaggagcatctttcattttatgcctaactgcagcctggatgtgaacaattccacagcatctctcctgaccttggaaggcagggccatgagggtgctgcgtcagtgtgtgcctcctgatttagacacccccacttacaggtggatgaagtccttactgttctggcaatgccagacccctgcaataggagttcctgcagtgttctttactgtctgcggactgacattagcggttaggtagccaattcaagtttaggagaccacctcattggtaaggggagtccacttgcctccaaaagccgcatggtaaaacagttaaaaagactgtctatttcatgtaaggggatgaaatgctttgacaatctaaaataatcttggtgataagcagcccagccatggtagagatattttaaacctctcaatatgtagamattattttaaaactctaaacaaaaatagttattttgaattcacgtagagcacagtttagatatacataaataatgaacaaaatatagtgatggtatgctattgtgagttttcttttccaggtactaggtgattccaaccgtacacacacatacrtgtgcaaacacatacacacacacacamcatcttgcaagttacrtacaaaagccgtatagaaaaaaaattatgatttttgtccttcatcttaaggaacttgcttttgcctttaaggatgaagtccagaaagtcatgaagagtcaaataagagtaaatgatttaaataacaattcaggagaaccacagatgagtcaaagggctttgcatcattagttgctaaatgaattatttggattataatgcttaaaaggagtgtaaatggagaaaatttttcctagtgtagttcctctgttctttttccatttagcaatagtttattgagtgtctattatgtgtgataaaatttccaaggtaaaatcaagtttgtattatggttaactataagacagtttaraactttggaagcagtaactatcaaacaggtatcaaggattttgtacaaagaggtccaaaaatatctagttgatttctaactggaagaatcagagaaagcttcgtggagcttggtatttaccatgtgtttggaggtagcttttggatggaataaagcagggaaattatccttcaggagccaagtgagtaaagattttaggatgtttttcctggtgattaaagtgccagaaactagctttggtagtgtagttgaattaactaggcttaattcctatcacatgctattgcagtttaataaattcctgtggttaatggaagcttttttaaattttttttttctgcctcctgcagtgtgctgctctggttggtgaagaccagcctctttgcccagatcttcctgaacttgatctttctgaactagatgtgaacgacttggatacagacagctttctgggtggactcaagtggtgcagtgaccaatcagaaataatatccaatcagtacaacaatgagccttcaaacatatttgaggtaaggacatcctttggaaacattaatttttcattgagtttggcttgggccmgactaacatggtaatagacctgaatgcataatgagttcttactttgctatcatcaaaagacttttcatcacagttacatactttctaatttatggaaaaacagcatttggaaaacaaatgttttgtttttatttttttaaagatttaaaaaataaatcaactagggactaggaatcaacaactgtgagtgagttaaactgtgttgaaatactaaagggttgtgaaagattagtgacaaagaagaacaaaagtctaaacctgtttattcctgtctatttcccacagaaagaatgagcaataaatggtacctcatataaattaataaataagaaggcctttctttttaaccaagggggtagatgtctacctttgtttgctttactaattaggtgagctcttttgattattattattaattatatttttggttcatatctctaatttctttatataatgggaattgctaaacttgactaatctactgtatacttataaatcagtcaaaattcatttacttttcagtagcaagaattacctccgtgactccggactcttattataagcctaccctataataaagaatgttaatctattcctattaaagtgttactttgagaaaaggaattctttcccacaagatcagtactcatttacttgaaatacattattttttataggaacaaacatttagtgagtactctggcaagtgaattaaacgaaggatgacatatcggctagttttctttatcacaacygccagtgccatcatcatcatcatctaatgttttctgagcacctactatgtgctggacttttcttattcatcagcaaagacatttcttatacttccatgttatttggttgaaatctgagtcttaagaaagccaagtttaaaatattaactgagttttgctggaacccagcatataatacatgctgaataaatgtttgttaaatcatgagagaatgatgaatatattaatgttgataacaataatagtaatgacaataatggccaacattttggtatactcatgcttaatatatgtcatctcacttatccttgaaaacaacctattgttaggtcctattgttatcattcctgttttacatatgcagacactgaaactcagagaggttatttgttttccccaaatcacacagttgacaataaagacctgggatttgaaccccaaatttatcggacttcaaagtttatatccttgataaaaatagagaacccatgaatttgggtgacagccatcctttacaaagacatatcaagctgcttctttgctcaatatatttaaaaatagaacagaatctttcctttcagtgttggttggcacggaggtagagttagctggtgagccgagacggctgtaggttctgcctatggctgagattttgtaatacctctggagattaagtgggttttagaagaatgcttaaggtagtagagtttggactggggagacagaacaaggtggagggaacactgaaggttgtggttagttctactttcccaggcttctcagccgggtcttagaaagttcatgtgaggacttggccagttagaactggtaaattgaacattcctcactcagtacayttgtcaagttacaggcccattctaagtcatgctgcattaaataaacaatgctttaaaaaatgtccatctccatagacctcttatctaaaaatcacctatttcatatcaggtgaatgccatgcattttgtagaggctagagaataacttagcggtaggggagatggcataggagtcaatgcctctctgrtgggctactttaaaaaaaatacaactttctccataacttttatgtccctatattttgtgttgtggtatttgtgagaggtactttgcatttataccttcaggagacttggttcagcatctagttaattatctacatgtaggtgcttaatatatgccatgccaccctttttgtctccctgtatcatattctatgctaataaaattattttcagcactctaaaacagaagttcatttaatttagtctctcattaggtcattttaaaccaatgattctcaaccaaaggcgattttggtccccgccccacaccccaattcacgggacatttgacaatatctggaggcatgtttggttgttatccctggggacaaggggatgctacgagcatttattgagtagagactagagacaaggaatgctgctaaacatccaacagcctacaggacagctcccaccacaaaaaatgattcagcctccaatgaaaaaagcactgaggttgaaaaaccctgcttttaaataaagtcacaggcttcccctttataaattactaatgattaattggtcagatttctgagagaagacatagtaagctactggatataaagaatgagaagtcgtataacgatatcgggatgcctggggctccaggactaatatgtcaggtatcctcttagtgtcagagggcaaaagtgactgtttaggtaagttcccataacagttttctctgaygtcacaaagcccattctttatcgaggcaaagggtaaagtcatatgtggcaatgcccttaccaacagcagcagcttcaggagtatttgcatggcatgaggacacctccactctttgccctctagtgttaaactcaggcatcttttctgtaatgtgaaaggaaagcgtgttttcagcacaggtgacattctaaaattgggtcttccctgtgaagaaggttcgtatgaaaccagataactctttcatggccacaggtttgtgttgcttctaccaaagcagcatttcagggaagtgccttcccagggccggccactcacagtggacttttcacctgcactcaccttcttccaatttgcaaagccctgcctcatcacatttgagaaggccttgtacttgagtaagttaaacagtcacgggctctgctgtctctgatctgacaataacaagcattatctactttggattcccagaataaaatcaggcactgagtagttaaatgcttttccctgactcaagtagcacgtcaatgacaccactggaaactggccatcgactgaattctcatcaaagcagaaagtgggatttagggatatataatagagtggcagagtcttaaaatgttgagagtaaattatgtatctcttctttttgtttcttccatatgtttgaatctaagtttaatttttatttaacatcacaaacttaataatgataaaaaatgaagctgaatgtcacaatttgagaaagggaattctgggtggtggcagaggggtagcaacatgcaatagcacatgttggttgagtaactggacacgcaaacaatgttctctgcttacgcaacctgtgtttggatgtgtaaatgcaggtgaccaggtacgattcagaagccactttaaaaaacaaagcaaaaggctcagaggtaacagcctccagtgaatctgatccatgtgtaaggaaaacaggatgcgtccctggaccggctggtagcaagatttatgtttcagaatattgcaacataacttccttccctctgttgcctttgtgcattgtttgaaggaggagaataaaggactacttttrcagcacagcagtctgtaaagatggatggcatggggttagtttaaatagcatattggcctttctgggtcactgtgggcaaccttgtccctggtttattttaacacctgctttaatgcctccatgatacaactgaatgggcatctttcattcattcgtctgttacttctgaatgaagctacttggggttcgttagaatgayggcaagtgagaatgcagtcrtctctaggtcattacttgtaatacgttctgaggactgcctttgctgatggggggagaaggactctcacagctgtagccagcgttcatgtttggtcattgctggaactctcaggaagcctgaaactgtgaactttgtagcagaaaagggtgagtggtggttttgtatttgtgtgtaaattatcctgctatatgcaatcaaggaaatgaatgtggacgctttcaaggctacttggttattctagtgggaatatagatactttacttttcttcatttggctttcagttatattctaaattttgcaaaaatggacatatattatgtacctatcaaaaagttaaaaataacaaatattggcagttcaacagaccatgagcatttgaggagtagggaatctgcctgtcttgttcactgacatttttctagatattttctcagaaaatagcagaaagtaagaactcaacaaatacttgttgcataatgagtgagttgatcttcatgtgtttattgatagaatgaactgcgttaggtaatgtgaagattatatacaaagcacaaaagaaggcctgtgtcctaaaggactttaaatctagtttgggaggcaaaatgaacaaatgtaaaacaattaggaaaccatgcaaggctgtgtatacaaatatacaagtatatgcatatgtttttagttcttagcaattcgaaaacaatacaagactgtatattcatgtatatgtatatatgtgtatgtacctacataggattatatatatatttgcaatttgcaaacattgcgagctcgtgtatgcatatatgcatgcatatatatgtgtgtgtatgtatgtgtatttctagctgaggagataaacagcaagaataaattcacaaagccttgtaagagaagagcagagcgttttcatagacgggatgtggaggtgagcttggtttactcaaagtaaaatacatattaatgggaacgtggcagtagtgggagtaagtttggatgtaaggtaggtacaaaattacggtgggtcatgagaacccagttggaaatgtttagagtctgtttagaaagtaggatgtcattgaagattttttagcagatcaacataatggaggtggtatttaagagtgataatgctgacagtcgtaagaggtrtaggcaagtaggaaatacggaaaatcagacagcaggcagtgctgcattccaaacccaatgtgatacaggtacagggaagggacaaggtgatagcagagggggtggcattcagggaacagattcaaagtaccttgaaggaaaattccatcagccctgataactctgagttcggatagagagagaggtggtaaggaatgctaactcaaagatattccaaagagaagcagaacctcgtggatatcgttcctggttaagtttctgctcacctttaggagctgaagtactttcctagactcgtgagtcattttacaaaggggccctctatctttccactgcctcagggacagaacatatttaacccaatccacaaatttacgtggtgtctgctttttttcacttgtctccttggaggaaatcctgcagccttccatggtaatgaattcctgcttctgactgtgcctgtggtcagacagacttttctatgaatggcaaacctcctggaattttaacaaaacaaatagacaagaaaaaaagaatgcatgtatatacaacctcaccttaatttaatcattggaagaataaattcttttttgttatgtgggaggactgaattaatttacaataatcacttttataagatttctgggatttccaatttgcaatcaataaatgtttgtcatttaaattaaatttacggcccacagccagatttttgccacacttggtaatgacacttacagagaacatagacttcaagtaagaaaataatagccatttaagtggagagataattggctgtaacataagaacattgaagaatgttgaaactcatrgagacttatggagtattttaaaaatttatgttgtacttatctttgcatttgtagtctaccacaaaattccaaattctgggtataaatcagttagatgttcatcttggagagtcataaatcaggaagcaacaatctgacccagcctgtgtgctgctttattttcagcctctcctgtcggcttatcttgcagggagactaaatagtgttgttcgtttgtgtgtgtgtgtgttcatctacacacctcatttaagcactgtggttttagacttctcggcttgataacatctggcttatcttgggaacatctggtttatsaccctatttcttccctgccattatgytgaccactgkraaaatatggcwmaggagttctgacccacagggctctgyctcttggtatcaacccctgctaataaatagcaactcacaggatgcaggttacgtgaccatctttcactggcacwaactttcctgctggtggcttttgttaatggaaggtgtggctaggagagatgaaattggctgctttttttttttttttttatggacgttgattcggttcttagccatttgcagtttgcaaagtgagaatgtgtatgtttcattaggcacaaggatttcagaaagtgctattttgtattttgggataggagaaaccaatgatttcatgtcagatactctaggcactccagaaagtaaactgggacattttatgggcttattgtaggtttttccaacctcccggagtctcaactggctcatcaaagttactctgcctggatatctttggggccaaaatagtggagacccaaattcacaaggaggaaatcttggagcagaatcaggaaaaagtggctcattgcttcttagatttacttcaaagataatagtgtaggtgaaagtaatcacaaggttcagggtgctgcattggacaaactgtctatttgtatagcaaccatgtgtctgtgtggagaccttatacacttgctgtgtttatttgtccatgccccactatctctacgccaggtcctggaagcacagcccagcagatgactcacctctggatggaatcaacacacaaagcagataaaaagctgaacattaaagaccacattgttaaagcagagagccaaattgttcctccaccattccctatcccagacttcacatctaacaaggttaatttgtccctataattatgtgcctattctttgagtaatgaaaaattttattgtgggttttataaaatgaattgcctgtgatgtaaaacaatttcagtaagggccatttttttttcttcttcttaacctctcaggttccttttaactttttttttttttttttttttttttttgagakggagtctcgctctgtcgcccaggctggagtgcaatggcaagatctcagctcactgcaacctccccctcctgggttcacgccattctcctgcctcagcctccctagtagctgggactacaggcgactgctacaacgcccaactaattttttttttttttttttttttttttgtatttttagtagagacggggtttccccgtgttagccaggatggtctcaatctcctgacctcgtgattcgcctgcctcggcctcccaaaatgctgggattacaggcgtgagccactgcacccggcctccttttaacttttaagactgtgcgctcagaggtacgtttgaaagcaaggcagcatcctatgctttactgtagctagaawgagagcagggaaaaggggagagagatccacaatgaaatacacactcttattcttggcaatggcagagttgtttgaagctaaatgacttcttatccattaagccatttgtcccaaagtgatgatagaagatacttttgtgccttttcttttccaaaatgatggagtgatttgcacagtttcagattctaaacactaatattttgtagacctgcccatctccattactactgcaagttattcattcaaggtttgcagccagatggattaatgaattaccagatcttgcataaaatgacttggcctgacttaaacaactacttttttttttctttctccttttctttttttgggggttagggtggggagcagtcttacaatgggtgttaatgggctgtagagggagtgagcccccattgagtttttttaaactagcttttttaaagcttcactgcactttttcattcttttctgaacttctgctcagaaaccgtcagttcaaggaggagcaatcaggctggtagggcagagaggaggaaggagactcagtagtcaaatccctggtggccgatgcccttccctgcgccaaatcagcatgatttatcagagccctctcttcagcacagagttgagagtgagttccagggtcctcctcacacaatatgcatagctggagctctgaactttgaaggaaagcctcagagctatttgcaaaatgctggtgcttagtgaatactaaattacatttaggaaatagtctactgctaccagttatacttcatttttattcttgacacagacacctaaatcagagaacagtaacatttcagagattatggaagcagtttgggtatgctccagcmctataataggatcagaattttaaggccttttgtattattaccaatagtcacttagtttctactgcagtgtactttgtagggaattacagcttttactaaaaagattaaaatgctattatgcaaatgattgcagtatgttattatgtttacaaattaacatccatggctcaacacacaaattaactaactatgctatctgtgttattaaggatttaataaagtaactgttaataaaaatgggtagcttggaactttagtagaaagcaattgtgatttaacacgtggaacttgagcattgtgtttaatgttctaggtgatataatggtaaaataaagttgaaaaaagcacatagaaaaaccaaaactgtgtgaacagcagagctgcttgcctgagaggctgatgaacgtgaactaaatagcttcaagctacaatgtacagtgggcagcatagcaataaatctaagcaaagcacacaaaacatcttctattaataaatagttcattgaaatgataattaccctccattacgtgtttgatatgttccatacacacagagaatacttatattattctaaaatggatctcagagcaaattttgctgtggcgaatgggatttagctgaagaatatcgctgggtgataaaagagaagaaggctgggttcagactaagatggctttacaaacaggctgcaaattgctattccgggctgttcataagagatcataaaagcaaggagataagagccgccaaggtccctgagaaatgaatgtatgtgattatgttatctcgtaggttggatttactagacagaccgacaacaccttcactttagcccaacaggaaaagtagaaagagatacaggtttggataacaaactttgttagaataggaaattccaaaacactgtaattcaaatgtttcagaagagagccaggattccagtcactgacttctgtgctggatctcaaaaaaagagctagggatatgacctaatattaagcaaataaacaaaaaagaaacaaaagaattacaagaacatcctggagaactaattctatatttcaaatattttggactsatgtttcttaattctcaaataaagatgttgaggacttctaagtccacaaacaattatctttttaggtctccctattgagggatactaacttgaacttcttagtaggaatatctggatgtgcttaagaaatgtacaagcagggaagacaccgcaaagttggtcaaggtttgtacccttgcatacaatacaagcaatttattttgttccaaatagcacctctgtggttgcaaaactacttatgcaaatttttgatatctagctttagcaaggtgcctggttccttcatttcatcccacatttggataaattgtgttgttcttcactcttccaaatttgtccttgtggaagcgaacacttgtaaattggttgaagcttgctaagagaaagaaagggaggaggtagggaagaggaggaaaaaacttgaccaaaagcagttgctgtgacagcttatgatttgatggtttgtggtcttgtcctgttctcargcacctgatcaagaaagtggtacaatcctgctatgcagacattctggaaatcttgccaacattcacctgacatgaccaaggtttaaagtccttgctgtaattttacaaagcgtagtgagagtgtgtgcctgtgtatgtgcatatacactctctcatatccttttttttyttttagggggaaaaaagtgatctttgccatagaagggtggtaaaataattagtccaatagacaaatgtcttggcccatgtttaaacagagctttaaggacacagtgttcccaagagtcacatatctaaatacaaaccagtgtcagctgccatgcagaccaaaatgtaatagcctgctttcacataggtcatcgtcaatccattttggtcgcagtcacactgcacatctgtttctgcgagctgcagcttcttaaggtggcatttggacttcatcagaacacaaacaaccaagctataaattgccacttctggagttactttgaataagtgtatactgtttcatatttataatrgtgaagcttcataatattcacagtgaatatgtaacaccgatcagttcaacaagcatgaaattgtatgttgtcaacctgtcacataaatagagtcatattctggcttgcgataatgttgaactaacattttttcccccagaattgttgagaggttcacaraaaagtgaggaggtagcatttcctttgggtagataaccagtcaaggctattgtaaagttgatattactgttgatgggttccttttctcccctccctccaaagcactagcttttctygggtgaatgctaattggctaatctggtgtgtttctgctgtcatctaacggtatcattttcagctagtacttggaggctctttttgggttgtgtatgtgtgagtagctttttttcccctttaaaacttctttttttttctttctattcttgtagtgcaaatcagtgctaattgtcatgaaattctctaactatactctggcaagctttcttgttgccttttcaccccagttaactcttaatgtattactagagcattaggaaataatgaaagctggacattttattcaaacttagttgagatagagaatcatctaaagagatgcagaaaaaaattattgaaccaaatttgcaccttactaaaaagataaaggaygaatgaaatgtgcttgccggtagctacggagaaactcagagaccagtttccacagtggctgatatttctgcaccagaggcatggtagaaactgatgcaagtctgttttcacttttgagaaattcttagatgtgttcaaccttcctcatctttcttccaatggcctgaagacaaaaaggcattgcaatctgtattacccgcttaarctgctaacttcaacaccttgagatagtacttcagtttctctaaagcactatgcaatattacwggggattattaccaacacttttcttttcatcccatatcacttgggatatggctggtcacatttttttctttattttttwttttttwttttttwtttttgagacggagtctcgctctgtcgccccggctggagtgcagaggcacaatcttggctcactgcaagctctgcctcctgggttcatgccattcttctgcctcagcctcctgagtgagtagctgggactacaggtgcctgccaccatgactggctaattttttttttgtatttttagtagagacggggtttcaccgtgttagccaggrtggtctctatctcctgacctcgtgatccgcccacctcggcctcccraagtgcgggattacaggtgtgagccactgcacccggcccacattttcttagacaagaaccaattcactggctaaagctctcagtttccaacttttgcaacatcgtcacatttcttcttgcctgtggattttaaaagttcatctctcacttatttacttacccattcatcaaaatataattgtcatccattagcatgcttagtgtctggccattttagggggatacagtggttaaaagtaaacctagtctctggctccatgaaaattttggttagtgatgaagacaggccttttacaaataagataagctgtctgtttgaggaagtagagcagggaatttctccatctgtctgttacccagttatcactagcagataaattctgcccttctcctacttattgtctttagaaatgccttcaccttgaaatggaattctgctggagagcatttctcctagctagaggaatattctattccaaaccaagatctgtcccactgccccaacaaatgcagggcagtgggacagaatatttgaggttggaagacctgaaattkatgatgtcctacacacagtatattaaaataacagtttgctcattggaagtgctgggtggccagggagtgtggagggaaaacaagaggaagccaaccaagggaagagagcaagaccgtcagtggagagttctttaaccagtgtgcaagtctgacctgaccagagtgctgtgcccttggtggggcttctrtggatgagaactgtttggtaccattttaggtctgttgacctttctatttgagaatggtatttcagtccagctggaaggactgacacgctttttgcctgtttgagacacttggtgtatgtggcttttctctctctctcttggatccatcatctctaagtgatagctccttgcttcatggggtaatgctattcaggggctatcctgcacccttgggagaggcatgtgcaggaagaatgctaccgatccctttcctcttccctctggaggtaccaggcattacatccctaccaagccttactcaattaggtctctttcagattcctataatactcgagcttaaatcctcttctccacagttctttctgagaaatttatttctgctttgaaacggctcttgtataggggaaaagtgcctctattatagcactgcccttggtttttccatgggctcttggcttaaggacattagcttccctgggtgccatctcatttgctcagatgtgaagttagagct

SEQ ID NO: 1661 - DNA, 21752 bp, Homo sapiens
gcccaaccccctctcacctccccactcctaccacacacacacaccccacacacactacacacaccacactcacacaccacacccaccacacacacactacacacactcacacaccacacacaccacactcacacccacacctaccacacaccacacccaccacacatgccacactcacaccacacccacaccacataccacacaccacacacacaccacatgcaacacacaacacacacataccacacgtgcgccacacatacatgccatatacaccacaaacataaccccccacacacaccacacatgccacaatgacacataccacacacacactagagaggctctgctcctgctggagaagacttgaagtctcctcaaaggaacagatgctccattcaggagcacaggtcaaaggctgtgccttcccttctctccccaaggtgaaaggccctgcttgtcatcttaggaagcagaaaccagcactgtgcctggcagagggtgatgagtggtgattttgctcctgccactggtgctgccctggggatggggtagaggtgggcacagctatgaggcaggctggggtgaggaccccagaaacccctcacatcacacatcccattttccaggcccttttttcttccctagttttgtacctgagggtgatgtttctctagaagagatgcagccctcagtcatgataaatcctgaaattttttttttttttttttttttttgagacggggtctctcaatctgttgcccaggctggagggcaatggcttcatcacggctgactgcagcctcaacctccctgggctcaggtgatcctcccacctcttcctcctgaataccttggaccacaggcatgtgtcaccatgcttggctaattttcttattttttgtagagatgggttttcagcatgttgctcaggctggcctcaaattcctaggttcaagtgatcctcttgcctgggccacccaaagtgctaggattacaggtaccagtcactgggcccacccctgaaggtctttgatgggggtgaagactcaggcacttcaagaagcagacctcaggccaggcgcagtggctcatgcctataatcccagcatttagggaggccaaggtgggcagatcacctgaggtcaggagttcaagaccagcctggacaacatggagaaatctcatctctattaaaaatataaaaatcagctgggcatggtggcaggtgcctgtaatcccagctactcaaaagctgacacaggaaatttcctgaacccaggaagcagaggttgcagtgagctgagatcacaccaatgcactacagccttggcaacagagcgagactctgcctcaaaaaaaaaaaagcagacctgtagggaacaggaggatcaaccaactgagataccacaagaagataggttctggctgggcacagtggctcacacctataattctagcactttggtaggccaaagcaggaggattgcttgagcccaggaattcaagaccagccgggacaacagagtgagatccctgtctctacaaaaaatttaaaaattggctgggcatggtgacacatgcctctgcctgtggtcccggctactcgagaggctaaggcaggaggatcacttaggcccaggaagttgagaccgaagtgagctgtgattgtgactctgcactccagcctgggtgaccgagtgagaccctgtctcaaaaataaataaataaataaaggaaaagaaaaaaggttatctgctcagacatgtaagctggccttgtggccaaggcagagagactctcatggcctatctcagaacagccacctaatgaccatcaaaaccttgacacactggcggggtgcaatggctcatgcctgtaatcccagcattttgggaagctgaaggaagaagactgtttgaggctagagttcaagacttggccaacatagggagactccatctctacaaaaagtttttaaaattagttgagcatggtagtgtgtgcctgtggtcccacctactcaggaggctggggcaggaggatcccttgagcccaggaggtggaggctgcagtgagccatgatggcacactctagcctgggtgacagagtgagtgagactttgtctaaaaaaaaaaaaaaaaacccaaaaacaaacaaaaaacaaccttgacacattcctctacaccccagtgtcccccttttctgttgtttaattttttaaaaactgtctctggcggtcaggcgcagtggctcacacctgtaatccgagcaccttgggaggctgaggcaggcagatcacctgaggtcaggagttcgagaccagcctggcccattaatgtagtgaagccctgtctctactaaaaatacaaaaaattagccaggcgtggtggcacacacctgtaatcccagctacatgggaggctgaggcaggaaaatcgcttgtgccagcaggtggaggttgcagtgagctgaggtggtgccactgcacttcatcctgggtgacagagcaagactctcaaaaaaaaaaaaaaaaattttatctggcctgcttaatgcttaagtgtttgaacatccccaccattttttttttttgtggcactcaagaggccatcccttccacctccatactagtcagtctgattttttccacatcccttctactcaagcatcaaagactgagaaaamtgagtcataaaagaacagatgttctagggtttcaacrtttattmctggcatgactaagaggacggaagagcctgctgacctcatcctacagctatacagggactcccaggccttgccccaagacgtacccttatgttttctgactgtagtaggtgggggcagactctaccttcagaaggaactacaagatgtttctttgttttgagatggagtctggcactgtcgcctaggctcactgcaacctctgcctcctgggttcaagtgattctcctgcctcggctacccaagtatctggcattacaggtgccctccaccatgcccagctaatctttgtattttagtagagacgggatttcaccacgttggccaggctggtctcgaactcctgtcctcaggtgatccacccacctcagcctcccaaagtgctgggattacaggtgtgagccattgcacccggccaggaaatacaagatgttaatgaaagaatttgagaacatgagcgaggtggctcatggccataatcccagcgctttgggaggcctgggtgggcggatcacctgaggtcaggagtttgagaccagcctggccaacatggtgaaaccccgtctctactaaaaatacaaaaactagccaggcctggtggcgagcacctgtaatctcagctactcaggaggctgaggctagagaagcaggctgaggctcttgaagccaggaagcagaggttgcagtgagccgagatcacgccattgcactcgagcctgggcgacaagcacgcaggaagtcaggggacctagccaggatacactgccttttccatcaactggctgtgtgtccttaacctccctggtggagccacttaacctctttggtasttccgtaatgtgaatgaggaggatagatggatataaggccccttactgctctaagaatctatgggattggatttcagttcagcatccatttccaggtttgcgctcatctttccaatgagagacacctgggcaggtagagcaaagagcaattctctggctgctggtatagtagacctaaggcttgagcaagtgcctgatacaagaagaaaaggaattgcccctttttcttggcagccaggacagagacccagtgcccarcctgcttatacctccaaccctgcccatccatcgcctgacagacaggagtgcaggacaagttctcgcccctcattgccctccctacctttccagttctggcagttccttgcaggctctccccaccttgggtttcctcccagccccgtctctgagggcagcaccttcccacatcctgacgcaggtcagtgtagctgtgaaggaggcagaggagtgagtgtctgagacacgagtgatccaggtccttcaagctgcagagtacatccctcacacacatactcaagattcctccagatggttgtcctagagaaggtggcgatgtgatttcccaggttctccgtgaagtagtcaagtattcaaactcctctatgcccttcttcctcttaccccttcattccctctatttctcctgcctctctcattgccattctttcttacattattttgcttccttcctcagttctccaggatcttcacctatttgtttattttgagatagcgtatgacttgtcacccagactgcagtgcagtggaatgtcatggctctctgcagcctcgacctcctgggctcaaataatcctctcacctcagcctcctaagtagctgggaccacaggtgcatgccaccacrctcagctttttttttttttttttttttttttttkagacaagttatcactctgttgcccaggctagagtgtggagtgtggtggtggagtgtggtggtgatctcagctcactgcagcctcgacctcccaggctcaagtgatccttccacttcagcctctccccgagtagctgagactacaagtgcacaccaccacacctgcctaatattctgtatttttagtagagacagggttttgccatgttgcccaggctggtctcgaactcctgggatcaagcaatctgcccgccttgccctcccaaagtgctggggttacaagcctgagccactatgctttgccgaagattcccgtcttcccactgaaccttcytctttccttctcctgggccattcctgagccctggctgaggggagagaagggaaggaaagcccctcctgcggccatctcagcatccaaggcaatccttctggggctgctctgtctccagggccccagccatccccagacactgagtgcctgaggggggaccctcactcctgtggcactatggtaagataggaaacagtggcttctcctcaaagcagcctcgccggtcggtcagctgactaccaacatgggaagtggccgaagatccacatggaatgacactgataagcactttgcagtgtctgaaactcttaaacatcagtgctgtcttcctagttttacagacacaactctgtgggttggatgaggtttttctaaatgtacaaatgcagaaatatacggagggagtaaagggactgcctacaaatcacatctagagtgtggtgtacctgatttcaagtcttttattttattctcgcagcaacgggagaatccgcagtcgagggaggtgaaatgacttgctgaacgccacacggcggactccaagccccgagctcctataacagaggaggaggaaggcgggctcagctcctgccacccagcagcgggggagatgcagcccgggactaggctgggccatggggacagatccaggccccgccccctgaccttgttctctgcccgccgggaagtggggaacttgcggggagcagcctcagctagtccctggggcagagtctccacttgggtgcacgccctggggtggggcttcttcgggaagccgggggccttcaactctgctcaggagctcgggccggagaaaggccccgagacttgaagcccttgcccgggagggatgaacacgcaaaggaacccgaggaacggggtaggggaccaagagtaggaccagcttctcctgcgcggggacagggcctgtggagcggcctggaggaatctctcccagccgcgaagcccgggaaggctgcgaggccccagcgcggagcggcccctcccacctccccgagggcaggcggagcgaagcctcggggcccgggcccaggttttgtgcctacggaggctggacttccccgccaccccgaggagtcaccgagagccttctctccctcgcaggggccctgggaggcccgcgctttctctgaaagtggaaggagtgggcggggggcgcggccgaggcggggcgcgggcgtgcagcggcgcaggctccgccccggggccgtctccagccgggggcgccgagccgctccagtccccggcgcgccgcgggctggtgggctcagcggcggcgccggcactgggaaatgaccctgcccgggggcccaacgggcatggcgcggccggggggcgcgaggccctgcagcccggggctggagcgggccccgcgccggagtgtcggggagctgcgcctgctcttcgaggcgcgctgtgcggcggtcgctgcggccgccgccgcgggggagccccgggcccgcggggccaagcggcgtgggggacaggtccccaacgggcttccgcgggctcccccggccccggtgatccctcagctgaccgtgacagccgaggagcccgacgtgcccccgaccagccctgggccgccggagcgggagagggactgcctcccggcagcgggctcttcgcacctgcagcagccgcgccgcctttccacctcgtcggtctcctccactggctcctcgtcgctgctcgaggactcggaggacgacctgctgagcgacagtgagagccggagccgcggcaacgtgcagctggaagcgggcgaggacgtgggtcaggtacgggccgcgggggcggggccagcgccgggcgcgggggctgcacgggggacctggctgggtgctcccggaggacccgctcctgtccatgctccctccagcggaaggtcctgttctcgcggtttaggaggaatctgggggtcagagggaggcgcctggccgacctctcgcctgggcaactttcacctcggctccgccggcgggtcgtggcgctggccctggggcgtctaagaagcggggcgaggagcaggcgacccgccgcggggactgggcgaagcgggggtagcggaccttgttggctgtgggttaggacaggagggatcggaggggctgagccttgccgggtgaaccctcggaaggagagaggcgaaggagagtttcccttaccccccgccccctctccggtgccgcggccgcacccccgccgttgccacggtttccctctcctgagtgggagtggagcggcgctccaggctctgctcgggagccgctgccgtctgctcccagcgcccgcacgaggcgtggacgcaggggagggaggggcgtgggcctgggagctctggctgggagcggaacgcagcccacccagtgcgcgccctgcctcccatcttcccggctcgccgctcctgagcgcggcagagagsggcggtaaactgaggctgcaagggggcaggatcactctgctagtctctgcctctgatagcctgggtgttctgggaccaggtctgaccctcggaaaacacagccctgggcactgttaagtcattcctgacgcccgccacttagggatgtgcggctcccgggacaccctccttgttcccctcgttttaaccaaggccaaataccttgaataactgtccgtggtcagcgcgaaggactttctttagatccacgtttcgcaagtgtccctgaggccgaggaagaggcgaggggcgcccccggcctcgggcgtctggggcctgcccataagkccgggtcggcgcggcggggcggggagagctgtggccgcgcgcctgctccgccgcacaatcggctgggacaaggcagggaagctgtggcgacctgcaggggttcacaagcccggaggccgatggggtttgtcagtgacaccagaggggaaaagcctcacagagcaggaacaccccccgccgccaggtgctgggtgcgccggctcggtcactagcctgccgcttccccttcttccccggtggtcagagcagccccggacccaggatcgtttctggggtaacccttgcctaggtcggggggcggatgccggggcttcccaggatgtggagtgtggggcagtgagaggccccccgccccgcctcttcggaaaagcctgagcagcagctccsggggcgcggaagctctgacacctgagagccggtgcaggcgaaagggcgcgaagcgcgggcgcgtcccgcttccctcttccgcccgcagggactcggcgaagtgcctgggagagggagtgcgctaggaggaggtcctgcggcccaagcctgggtgtagagaccgccccggctaaggtcaagcctcggggacctgggcgaccccgccgccctccgagccgtcgggagccggtgcaaatcgccgctgagggcccttccagctccaaggctgcggcttccaggccttccccacccccaggcccgccggggcctccccgaagtcaaacagccacagcggcggcagataagccaggggctgttgacagaggctgcctgagtccgtgtggaagggcccagggcggactttgcctcgccgcaggtcccagagccgcacagcgcgccggcccaggccaatttagggcttccccaggcaggaagcaaggctggtccggctgaccgtgaaggatgcacgtgggccggactctaggactcccggcttaccagccccttacgcgcggcccaggcaggccggagcccaggaagtttctgcctgcctgcctgcctacctctctgcctggggcatacgtagtccccttcacctcctaggagccctctccagcctgcccagagcagggaaattgaaactgggcagcctcactccggcagaggaaaaagtcacaggcaggcttttcctaaccagccaggggagaagttggaggcccacccgcaaggtcagctgcatgactctatggccttgcctgcctcctcaaacaattgtggggtattgctggaggaaaagagagggtgtttggctcctgttcatctggttttcttctttctgtgctccaggataggtaaggagacctggatgccatcccctcctggactcagaattcccacacatcgctttccactaattatagagcagaatttaggttaacagacttcctttttaaacagctaatgcccatgggaaggtgaagtcgtgggtcacttataccttagtgcaaatcgttttataaatttaaactgattgctcttcccaccaccacgaccacagggagtgctagtttgatagggcarttggaacatggggagggtattgggctggtagagagcttcaaccagagcctggatgactggaggcagggagcaagggtgagtgccaaagacagagcactcacccacctgctggtctgctccrgcagaagatacactgtgtatctggcatgagcaggtgtcttcaaggcttccgaatggagcttagacaaaggagggtctgaggctagtatccagccaagccctgcccagagagaggtactccctgttcagccctaggagtgaggaattatcagagggccctcctgtgacttcattaaagtctctcacacagtcagcaatcctagcctttgcctcaagatacccaggtagcctctggctgtgtgttagtctcccagagagggcaccttcatggagggaggcccgagccagaggatgttcaagcttctcccgggttcaagcgattctcctgcctcagcctcccgagtagctgggattacaggcacctaccaccacaccggctaagttttgtatttttaatagagatggggtttcaccatgttggccaggctgctctcgaactcctgacctcaagtgatgcatctgccttggcctcccaaagtgctgagattacaggtgtcagccaccgcgcctgggcttacattcayttttaaaagcgtgatgttctctgggggaggtatctccctaaggtggaaggtggcagtgatttgagttccatgacacttgcacaactcctgccatgcttggccatacccattactggcaggggggctaaatcctgtcatagcaacctcaggtggtaggacggaggactcagatgagataataggtatgaaaatcttttgtaggctgggagcagtggctcacacttgtaatcccagcactttgggagtccaaggcgggaggatcacttgaaccccggagttcgaggccagcctgggcaacatagcaaaatcctgtctctactaaaaatacaaaaaaaatgtcacggtggctcacacttgcaatcccagcactttaggaggccatggcaggtagatcacttgaggccaggagtttgagaccagcctggccaacatgatgaaaccccgtctctactaaaaatataaaaattagccaggcgttggtggtgcacgcctataatcccagctactcaggagactgaggcaggagaatcgctcaaacctggaagacagaggtagcagtgagccgagatcgcaccactcaaataaatatgtacatacatacatacaaaaatacaaaaaatcaaccaggcatggtgactcacatctgtagtcccagctactctggaggctgaggtgggaggatcacctgaaccctggaagtccaggatgcagttagctgtgatcgyaccactggactccagcctggacaatgggagtgagaccttgtctcaaaaaaaaaaaaaaaaaaaaagtattttgtaacctgctagctaggactggccttagttgctgctgctcttgattcttatgagatgcagaaaaccaaggtcaagagagtaggtgatgacaccattttacccctgcttgggagcaggtccatcaatcaaatggtagtagcccaggtttttagacacacatcaaatcctcttctgccaggcccacctgccagccctcctcactgtttctgcacagttctaaaaggatggttcagttccctcaccctgcctaacccaaggcaagtttcctcttcactaagtccattctggtcccactatcccctaaattcttctagcaggtccctacagccattaaactcattcttttggataaaggcaaaggtggccatccagtagagaagggcccccaggcaggtctcagtgttccccagaagtcaaaactcagactgccttattgctgcacatcacttcaccaygcacaaagcactttctcaggccacatcccatttaacccccaaagggaggcaggatggtagcatcctgctggggatactttggaacctgctggggcagttggaacttggggagggaggatgggctgatagcttcagccagagattgggaggctggaggcagggcatgaggggatgtaactccccttgatttccttctgtaaaatgggaatgataccacttcacgcacttgctatgcatgtgcattcattatggctctcaaactgagtgtgggagaagggggtacaggatggtgctgctgaatatacatggcacatacatcatcttcctggaattttacttgagggtttggaggtggtgagttttataataaaacttggatttattatgcagcagaatgcaaacctggtgtgtatttaaagattttaaaaggagttttgaaagtgatgtcatgcttctagtgggctgcttctggctacacccccagatccctggggattgggcacgtgatcacaccctagtgtgccatgtaagggcttcagtaggaaagtgggagcaatgctgcctgatggaagatgagaaagtgcctgacatgcaataggcaggtagcatttgatggttcgtgttacggcagcagctatgtcctcccaggggaaacaggcccacacagatggcagtacttggttgggttcactcagctggaaggtgacacagccatgactggaaccaactactgacttcccacccagtgctctaccataacttccatctcctccccatgggaaagggctttatggtcagcagccctcttctacttaggccacctcctcagttctctctctccctcttagaactccctcttgtcagggaggtgtattcctctgggggtacaacatgtgtaactgtgctaaaaggcaagtgcctctgtggggaggcggcagacacagttgacatgagccaacctgtgtacttcagagaggacacagggctgccragttgcgggtggtaagaggagaggtccagaggatgggatgctctcaagattagctggaggctagaagagataaggggcacaccaaaaaaacaaaaacaaaaaacaaaaaacaaaaaacaaccctcgtctccttcccaggtttgtctaagttgacaggccctcaggtttgcaccttattttctttctttttcttttttttgagacggagtctcactctgctgccaggctagagtgcagtggctcgatcacagctcactgcaacctccacctcccagattcaagcgattctcctgcctcagcctcccaagtagctgggaccacaggygcatgccaccatgtccggctaatttttgtatttttagtagagacggggtttcaccatgttggctaggatggtcttgatctcttgaccttgtgatccgcccacctcagtctcccaaagtgctgggattacaggcatgagccacctcgcccagcccggcatcttattttcatggcttaagatttctaggtccagataaaaaccaagggtgccctgggccttgccagctaatgagtgcatagaatccagggatagcaagrgaggcttggagagccttttctttctccagccctgttctttctccaggccctgccaggctggccttcctgccctgggcctgtgtacaggtttgtttctgtgtatgtctgtctccctaaatgagaggaaccaaggtcctgagtgaaggaatcagtgattgagatttgttcagcttctgcctcataccatggaatgggatgggggagctgggcgcctatcatgcttaagccttatgtactactcacagcaacccagtaaggatagttatttcctcattttatagatctttttcttacagatgcacagaggcttgtttcttgggccctggaatcttttgaggcattggtagtaataaaaatttggggggccgggcctggtggctcacacctgtaatcccagcagtttgggaggctgaggtgggtggaacacctgagatcaggagttggagaccagcctgaccaatatggtgaaaccctgtctctactaaaaatacaaaaaattagccgggcatagtggtgtgcacctgtagtctcagctactcgggaggctgaaacaagagaaccgcctgaacccgggaggtagaggttgcagtgaggccagatcgcgccactgcactccagcctgggtgacagagcaagactccatctgaaaaaaaaaaaaaaaaaaaaaaaaatggccctactctagaccaacttagaacatccctgcggtaggcctgataatctgcaatttttaacaagggtgaccatcaggtaattccgatgttcacaacagttcaaaaacctcgacagagcattttcgtaacctgcccacgcgttcttcagtggcagagctggagcgcaaaccgggggcttcagatgctaagtccaggctcttgacagctcactggagacgctggaatcaccttcactgcgcctgtatcagcacccgccacwcaggcgcacaaataaaccttcccagagtgaatgaatgaattaatgactcatccagccccagctgcttccggtgggtcgggggcgtggcgagaccctgtttcagtggagggagggcttatgcattgccgagacgccgattatcagaccttgaccctgtcgctttcagaaaaaccactggcagaagatccggaccatggtcaatctgccggtcataagccctttcaagaagcgctacgcctgggtgcagctggcagggcacactggtgagcagtggggcgggtgggcgggtgcccgcgacgggaaggggctgggcggcgctgacggatgccggtcctcagggagttttaaggcggcgggcaccagcgggctgatcctgaagcgctgctcggagccggagcgctactgcctggcgcggctgatggctgacgcgctgcgcggctgcgtgcctgccttccacggcgtggtggagcgcgacggcgaaagctacctgcagctgcaggacctgctcgatggcttcgacggaccttgtgtgctcgactgcaaaatgggcgtcaggtatgcgtgccctgccaggtcggttggggggatcaagtaggggtccggggccgggacagctgcttgagggggacccggggcgagtgctcgaaggggtctccgtgtgcgccccctcatgccctggccgctgcctgcgcccccacaggacttacctagaggaggagctgaccaaggcccgtgagcggcccaagctgcggaaggacatgtacaagaaaatgctggcggtggatcctgaagctcccacggaggaggagcacgcgcagcgcgccgtcaccaagccgcgctacatgcagtggcgggaaggcatcagctccagcaccaccctcggcttccgcatcgagggcatcaaggtgaggcaggcgcgcttcgctggcaccgccgcagccccactgcgcgctgtctttyccgatcccccgctcccgccccgcctgcccctccgccctctcccaccgcctcgccgtcccctgcaactgggaggtaccgctgctctacgctgtcctcttccccactggcgggcccggggcccctgacactcctgtcccacatccagaaagcggacggctcctgcagcaccgacttcaagactacgcgaagccgagagcaggtgcttcgcgtctttgaagagtttgtgcaaggagatgaggaagtgctggtgagagcgggatcccaaaccctgaggtgttggggagcctgaagccgaggactgcccctgtcatctggcccagtgccctcggctgtgtccccaccatggccctcaccgcgctggctcgcaactgctctacgctccttcccttctgggccacgctgggcggggccctgggtcctcctcctggcggcatttgccaagcacagcgtgggtcccggctcctcatcgttagcaggggctcatttggcgtttagttaatttgccctcctctcccaccccaccctctgcagaggcggtatctgaaccgcctgcagcagatccgggacaccctggaggtatccgagttcttcaggaggcacgaggtaagcggcggctgcccgggtgcccgggccgcgagggctagggcgggaacccggcaagggcgtctctgggcagggccgcggcctgacggtgcggggctcgcaggtgatcggcagctcgctcctctttgtgcacgatcactgccatcgcgccggcgtgtggctcatcgacttcggcaagaccacgcccctccccgatggccagatcctggaccaccggcggccctgggaggagggcaaccgcgaggacggctatttgctggggctggacaatctcattggcatcctggccagcctggctgagagatgaggctggactcctgtccccgcgggccgctcacctgacatgtggacctgcagctttgtccccactgtgcatgccggcttgagactggagccccgcggtgcagggcagttcaccgggtcctgcaggaccaggtgccagccactaagggggggcaccgccgatgccaggggttttgcccacccgggccccagcgttcccagagccaaatgacactaacttatagaaggggagggggcaaagggcttcttcctcaggccagctcttctgaggaggctctgccctctccagaggtgccagaccgcggattttatttagcaagcccagaccttccggtctaacgtctcacaccacgacggactccccttcctaataaaactcaaagacaagatgcagcttcctgtgcctcaggcctcagcccctccctcctccggccccctcttcctcagttccggtccctggcatccacagatcgctggaggatgagaagagctttttattagaagcatctgcagggtggggggtctgcccagatgaaggaygctcataatgggagagcaatccagtgctccccatggacacctggggtgtgtgtaaggcggcctctggccccaagatcaaaagctggaagtggctgggcccttccctgggaggcctgggctggtttccagcatggcaagtgcagcgctgccaggccagccccgagacaggcccagacacacagcacagactgcagggaacagaggccgctggcataacaggccacccaggagcctgaggagtatagggagggaccctcagtgcctcagtccttaccctcagggccccttggggctcaggagcgataagtgggattccaaaggttctgaggttggaggcccctggatttgaggggcttgaggccagaggacagccaggggccaagagggctacctccccagcttttcaacttctctggactcagttcctggggctgtgggggtcttaggcactccaaagatctgttccccagcccagaagtcccttcctcctctggggtgggccccagctccattggcaggagtgaattcagcacatccgggtcctgtaatggaagagtcagggagcaggggggcatagagttttctggccctccctccwgacccacaagaccaggatgttagattaggtcgggggcacacctgagtgcagtactgcagacgctccaagatgctggcaaagctagggcggagctcaggctcgtgctgccaacactgggtcatgatgcggtacctggggagaggcaggagttcatgcccacccatggttgtgaaggacctcccttcccgggcagcactcaactcacacaggccctgggcagcccctaggagggtccatccggcctcctccaacgacgaagtccagcacctcctggttggtgcgcccaggatagggcatgtagcccagtgagaagatctcccagagcagcaccccaaaagacctgcatcacaagtgggggaaccaagtgaggcccgtcaggtgtagcctcccctcacatgaggtkgctggaaaggacaggattagcctcaggggaggggaacagtggggaaggggaggggaagggtgttatcacyaggaatctgtcttggatgtgaagatgccctccaggaaggcctctgggggcatccacttgactgggagcaaggcccggtcccccctgcggtaataactggccctacaggagggaggaggtgaatgatgagttgttcaccaccaaggtgcggggaaaacccccttggagcaagagccttcccacctcccaagtcccgcaccggtagatatctcgtgccatcccaaagtccccaatcttggccactcggctgggtccagcgcagctcagcaggcagttccgggcggcaatatccctacagagtaggcaaaaaaaatcactgccagaayctagaagttcttgctcttcctgatctatttccttaaaagctgtgtggaagggctgttccttggggagggagttgggatgggggtcccctgagccaggactgctcctaacctgtggatgaagtgattttcctccaggtagtggcagccctgggctatgtcctgggccagttgcagcaggtcccgcatgaccagaggtgatggctggccctgggtcaggcagagggggcatcagtccatgtaggtctcagacacatggacagggtctttagaggggcctggggggggctaagacaagggtctcaccaggtgtggccgactgtgcctcaggaaactcttcatgtcccctccagacatcagttccagcagaatgaggcgaggggtggccctgaggctgagccccacacaccgcacaatgttctgatggcgaaacttgctgagtgrggtgggggacatatcccgttaccaggagggagacggaaaccatgttttaggctccacaaagctggagaggccctctgtgtcccctgacttgctacctcagcctcagggtgaagagaaactgttcccgggcattcccctcccgccttccagccctgcccctggtcccaggtgcacctgatgatgagggcctccatgaggaaatccagctcatcctgaggcgagcagagttctggcagggtctggggaggaaaagggcacagtttctgagctgccctgcacgcttcaggagagggggttaaccctagctctagtcattgtccttcccttcagggtgttccgctctcctacccccagccagaagtcccactcctctcaccttgatagctacctgcaggggactggagtycccaggaaggccaattaccagtccctcatacacctccccaaaggcaccatggcccagggctctgcaggaagacaygttggaagggagtgggcaggcggcctggagaagagtcctagagagtctagtaccccctttacctcccctgcccctgccatatgcccagctgaccctatatagactctctccataccatggcatgtccccaggtagaagccctgcaagggtggtgctcactggcatagagccagggcaaaaaagagggcagatgcgggccagagtcaaggtgggagtgcatgatgaggacttccctggtccctgcagacgccctgggcgggaggcaatycctgggctccaagagtcatgattttttttcttttttaaacgaagtctcactctgtcatgcaggctggagtgcaatagcgcgatctcggctcactgcaacctctgcctctcgggttcaagtgattctccygcctcagtctcccgagtagctgggactacaggcaagcgccacaacgcccagctattttttgtgtttttagtagacacagggtttcaccatgttggccaggctggtctcgaacccctgacctcaggtgatccacctgccttggcctccsaaagtgctgagattacaggcgccagatcatattytttttttattgagacagagtctcactctgtcgccctggctggagtgcaatggcgcaatctcggctcaccacaacctccgcctcccaggttcaagtgattcttctgcctcagcctcccacgtagctgggattacaggcatgcgccaccatgcccagctaattttgtatttttagtagagatggggtttctccatgttggtcaggctggtctcgaactcccgacctcaggtgacctgcctgcctcgacctcccaaagttctgggattacaggtgtgagccaccaygcccagctgagagatcatattctaagaactgggacggagaggtgacattgagcaagttacttccccttctggagcttctcagggcctccctctcccttacacaagggatgtgggccagattttttctgggacttataattcactacagcagggagagaatcagaggtggggattcagagtgcataggttctcagaaggaggcagaagacttacctgagcagagtaacattggctggggaaacctcggtgacacctggtggcagaggccaggactgggccgggccaagccccacctggcaataatagggattgggggctgtcctgatggcagaggttcgaagcttgctcagctcaagctcagggctcggcagcctcatctcctgcaggccctgccacttcttctgcttcactgggggtgggaagaataacggcacaccctccacctgcccatcaactctccctcccccacctgcccaggacacccctccagatgctcattaaggtaaacgttttccccaggcctccccagctccttcctatcttagaatcccagaggagtctaccacggctctgctgcggtgagtggtcttgaagtcagccccgggaccccgcagaaacccatcccagctcaytggagaggagcagccttgaatcaactgtgcctgctagacgcttcgtacccagaatcaggaccccacacaccataaggaggctcagtgttgaggttgccaccacagccaccatcagaaccagagggcctgggggcttrtgcaggtctagggagaaagagagacacctccagtgggaaggtcttctctgttcctttaccctcaagttttacccacgcttcaagactcagctcaagtgttaatttttccatgatgccttcccccattatcctgggcaaaagcaacctctccctcttgaacacccctaaagcactttatacctcccacaacaatcgtcacttgagatatacatttacatagctatatctaaacatcctcccacactggacgacaggcctctgaaaggcactgtgcaccgatgaatctccaatcccctgcccagcacccaccacagggcctggcacacagcaaatctctataccatctttcccagtggcctactgctcctcccagtctgtgaccccaggagtccagaccttgggcaaaggtaggacatacccatgcaggtgacgttatccacagctagctccatgccttctgggcacaggcattcagccagctggagctctgcctgccattggcagtctctcaaagggcagtgactgcagttgaggtgccttcggatctctacctctccgtggttctcggtgactgtgagtaaaagaactgatatgatatggtgtggtagggctgggatatagtaaatacatgcctttggctgggtacagtggcacacgcctataatcattgcactttgggaggccgtggtgagcggatcaccggaggtcagaagttcaagaccagcctggccaaccccgcctctactaaaaatacmaaattagccgggtgtggtggcgcacgcctgcaatcccagctactccagcgactgaggctgcagaatcacttgaacccgggaggcggaggttgcagtgacccaagatcgcaccactgcactccagcctgggtgacagagcgagactctgtctcaaaaataaaaataaataaataaataaataaataaataaataaataaatacatgccttttccagccacatggttaattctagcccaggactttagagcaaagagcagcaccaagcttacaagggtggtgagagaagctgggggacttctgtcaagcctgcacactcccaggtatttgaagcgaattcatagcaagggggtacttgaaaagcacgcagcatgccctgcattgccatccagcacgactggcagcccactttccttttttttaagacagagttttgctcttgtcgcccaggctggagtgcaatggcatgatgacagcccayttttcaaatgaccctatgctatgcaagaatcctgtgctatgcaaggttattcacagtgcaggtggctcttcagtgcagtgcaggagtgggctcagggactgcggaagaagtccaggccaggctcagaggtggggttggggccaatacctgccagaggctgcaggaagagctcgctgctggggtgtatgaaggatactccatcttccccatcagcccagaggttgtcagtctctgaagcgtcgccccctggaagtggagagtgatggagagtttgactacaaaaatgggggatgggggagaagctggaatctcccggtggaaatcccagtgtggccctctcttctccagcatcatgatgcaaatgctgtctgttcacaagtgggagtgaaggaggtgaggagggggtaatcagctggagcytgaaggcctckctgaggctggctgggatgcctcctgcctgcctgagcccctcctgtcccatgtcctcacagtccctttctgtgagaatgtagatcatgtgtgtatgtatgagcagtacagcccagacaggcacaaaggcatttacactagttatttgatcaaaacacagatgactgggactctcccttacagtttctgattcagtatgttagagaagggctgagaattcgcatttctttttaaaaa

SEQ ID NO: 1662 - DNA, 40000 bp, Homo sapiens
aaaataaccaatgggtactaggcttaataacctgggtgatgaaataatctgtacaacaaacccccatgacacaagtttacctatgtaacaaacctgcacatatatccctgaacttaaaatyttaaaataaaagttaaaaaaagaaacctctttctgtaktaggtttgaatgcctaatacacacattttcyctcycctgccttttaaaacttcatgcttatgctttccccatatgtttcaagcatgatcttgtgtcatcttttttggaggtaaaatgttgggttgagtgggttaggaaactgacttgtgagtgtgacattggagatgggtctaatcatgatgttggcctggacatatctcatttcttcccatgggacccatctgatttgatttgactttaggaataagagttcagatttgggattgtgcttggtttggagctggcttggtgagcatgaaaatgctcttcagttatcttggagctaacacatgtgtatattaaccaaacagaaaccaacttaggaagtaaattatagtagtaattgtattagaggtaaagcatatatacagttatgaacagtgccctgtgtccaaaaaaatgcattacataattttcaaaaatgtaatgtatttattaacatacttatccatagtcaggttccacaggagctaattctgaatatggttcactcaaggccactctgcccaggaagttgggcagaagggatcaattcccttaagaggcattgatctgttaggttctttcttgcctatctagacttgagcagactccagaagaataaagccaataatttctaggaattcaatcttgtaaacttctgggtcaggtaaagayagcaggttgcttttgatagtttttggcctcatttgaattctaagcttatgaaaacactgtagttgtgaaatactttagcatgaagccgaggctggtgaaggaagggtaccttttctctcccacaaaaatcctctccaactagatttgatatattttgcatggattaattcataaacaatcactattgcccatatggaagctatgatagccaacggactgtaaagtaggctgaaatctgcagttggccctcaggttttgacccactgtcatttgaattyctgctttatgtcagctctcatagggaataagacattccaaagggttacccacacaataaaggactttgtctatgttcatgtgttttggccagtttgaaaatcttattgcgtggtctgggctacacaaatagacaaaagtaaatagagaaacctgcttcatggaatagctttggaaactgtggttgctaagatatagataggctttaagtagagagaatttccattataaatatactaaaaggatcagaaaagtgaatttacatgaaaaacatacactgggtgtttggaaagtgctttttctatagacggtgtgtaaaacgcatatcaagggaactctttgggggaagacaagaatttacacaaggtgttgggatgaaaaatattgctaacttgttttaattattggctgaaacttgatggaaagaggaaaaartcctccagatgatacaaagtagacctttcttctcatgctccatagaggtctttygggaaaaatttcccatttctactyatgtttggaaaaccttgggtgtgtattttcactgtgtatttaaccttctttcctggcttctrgaactgtgctgtccaatatggtagacactggccaygtgttgcttttgagcacttaaaatgtggctactgtcgctgaaaaacagaattgttaattttattgaattttagttaatttaaatttgaataggcacctagggctaatggctatagggacagtacagatagagaacatttccatcatcacagaaagttctgtttagacagcaccctgctctggagggtgaccggacagtaatttttgctcataagacttgtttttaatattgaagatttagttttctcccaactgatgaagtttagggaaaaatgccacgaagatggcattcagatcttattaacattttctcactacttattttttccctcagttctgagtaattctgtctatttttatctataccatattatatttagttccttctaatgtaattaaacaaaaatatcttaatttcagaaaacacttctttaattagttgtgtttgaaatgtccttactaatccttactrtaataactgaatggccaatttcatagcctcagtgggaaaaacraaaaaagagaaagacctgtgttcttgatctgtgccaaacaggaaaatactgtggttcagcaatagaaaatgaagagggaggaaatgtttcaggtcatcaaatggggtcagaaatacgcatgtcartgtacttttgctgctctcgcgaatttctcaaaagggtatctgtgaatacctaatttaggtttttttggtttcaytttaagtacacatgagcttctggaaagggcgatatttatatatttttttcactgtggtttacgatccagtgtaggtatatttcaggatgtcactcacaatttcaatgtggtcatagaattattcagagaaagctaattgaaagcaaaatgcattaaaatgactaggattaagctgcccacggacaccaactgtcttgttttgtcmccattgtaaacacaagtgccccagaagtgcatgtgctgaagttggcctctgttgaatgaatgcrtttaaatgtggaagtttttgtattattataggataagaaatgttgcaattgcaaaaatgttggggactagagccatctctgggaggttttcctaggacgtaagctctgttgtttcggagttcagggagtggggcagtgacctgcataaagagcccccagggwgaaggcccagggtcctggcttctccrtgggactrtttcccgggtcacagaaagggagacccaagtgtcagagatgggcagattgaactgtccctgccggtgtttacaagagacacttgaccttgatggaaagcagagggaggacagcaagagggagacgttctctgtgtccacatcagcaccctttcccccttccttgccctttatcttgtctcatccttaccttgttggaaaaacacattggcaacatcacagcccactcaaaaggttgccaacrccttctcccaataatagcgatcaacatatgtaatagacttcagctgtctttttgggagatctggcaacaaacttaactgaaaaaagtcagatttttacaaagaaacactgctttattgcttaaatgtggaaataatacagaacaccagctaagctaatagctttctgagaaagaaagttcaaagtgtccattgctacttcaataacacatacataagtggaaggtgaccaaaaagatgaacatgtaaagaggggccctcatgtgtcggcaaattgttgctattctgagctctccacttgcagcaattatctractgttgttggaagaagctaagaaacaatcctccagccctcccataatgccctctccaaacaaatgaaaacacagtgcaattggcttttcagtgtttgctcccaacctgccccttcctgtgtttctccctgaacatgattctttacttcgtaggtcatcctctcatccttgcattctttgtgtatattactggctagctgccaatcagcaatggacacctcccagagttctggcagacctggcttgtgaagttaagcagggcttggtgaatttagctcacttaactgagatatgagarcagtgaagtgatgtatgtagagaaaggcacagttctccagagctcttgagaatccttaaaataaatatatgttccttacaarttttcatcgtaagcttggtgcacatttctaaggcagctggggaatcatagagcagctcatcttttcttcttctttttttttttaacagtctatggactaattaagctctgaaaacccattaaaacacaagtaggccatgatttcaacacttctaaagaaaaaaaggcagatttttgaaktctcgttttctctggctctgcctctaaagcctcaaaaacattttataataagtggataaaactccactgagggattgggcgtggtggctcatgactgtaatcccagwwctttgggaggctgrggtgggcagatcacttgaggccaggagttcaagaccactctggccaatatggtgaaaccccatctctactaaaaatacaaaacttacctcggtggggtggttcasacttgtagtcccagctacttggggggccgaggcccaagaatcgcttaaactctggaagcagaggcttcagtgagctgagattgtaccactgcactccagcttgggtgacaaagtgagaccctgactcaaaaaccamccaattaaccaaccaaccaaccaaccaaccaacaaacttcactgaggacagaaaatctgcctcctcaaccccaatcattttgtatttactgggacccttgtctcttttaacttctgagtttatggggagcctcttttaaatctccccagctactcaaattttatatatggaagggaggtgggaactattcagtcttggaaraataaagtttaaacccctgtgaatctcaaaatatcaataaatgaaaggacacstaactgtcaattctgagtttcccaactggatcagttktgacttttatttctttygcacctgcctgtctcatcttttttttttttttaattgtatccaaayacagacagcaggtttctgaaaggatctcactctgttgcccaggctggagtgcagtgacacgatatcaactcaaagcaacctctgcctcccaggtgcaggcgattctyctgccwcagcctcctgagtagctgggattacaggcatgcgccaccaygcccagctaatttttctatttttagtacagaccaacaggtggggtttcaccatgttggccaggctggcctcgaactcctgacttcaggttgatctgcctacctcggcctcccaaagtgttgggattacaggcatgagccaccgcgtccggccactgaaagaatattaacatattcaggcttcaagtttgtgaacaagcagctccccacttctaggctcacttaagagaactgtgaaagtatcctgatttgctgttccattgcactaatgaaggagcaggaggcaaagatagctaggctttgtgaggtggagcagctaggaaatagaggtgggttatcctacttcacggacagtgtgggcctgacatttcttgcttgtccttccatattctcatcctaataactagaagtgggctctctctgcaggccaccttgttgcagcaagagctatcataaggcattgagctgcctggattttttaagtctcatatatcctgtctgtagtagattgcaaaatctggtgtcgatctataccccttccttgtgtctaccctccttgtaatgtgcccttgtagctccttccatcaaaaggtagaatctgttttcccaccatttaaatttgggctgatctgctttagtttttagtatggggtagaagggccaatgagccggtcaagcccaggcttcygcaggaggctgaattccaccatgacccttactcttgtgtaatctccttgccttcactgtggttggcacttgtgaatatgatgagctattactcttgtcattatgttatgtyatatagcaaaagagattttgcagatataaccaactttccaaatccgttgagcataagatagggaggttatctgggtagacctgacctcatcacatgagttctttaaatctgagtctagtggtcagagacagaggcagtccaaggtctgaamccaatcaaccaacaaaacgtcactgaggacagaaaatccgcctccccaaccccagtcgttttgtatttactgggacccttgtctctttttacttctgagtttatgggaagcctcttttaaatctccccagctgctcaaattttatatatggtagggaagaacttgacataccctgactgtcttggagatggagggagctttgtgataaggaaygtgggtcatctttagtggctgaaagtggcctctcactaacagcctgcaaggaatcagggacctcagtcctacaaccacaagtaactgaattctgctgacaccaagaatgggattggaagcagattttcacccccagagcctccagctaaaaacttagcccaggtgacaccacaatttcagccttatgatacccagggtagagaacccagtcctattgtactagacttctgagttacagaactatgagctagtaaatgagtgttgtgttaaggtgctaagtttgtagaaattgttatgcagcaacagaaaaccaacatagccccaaaagacctcatacamttctattctctctcttggaaccttggcaagatcaagaagccatgcccagactagccttctggggaatgagagatcaatgaagcagtgccgaggagcccccactgaagctggccaacttccagaagcagggccacctgaccaacccacagttgatcacagatgcctgagggagttcagccgagtatagaaccacacagtttatcctactctgacttgctgacctccagaaccatgagttatgcaagtgattgttgtttgggccattaagctttgggttggtttgttacagagcaatatctcattgatataaagtctgtctttataagcagacaccaaacttgtcttaatgctgagcgtgcacactgccacatttagaaaggttggaactgatgattcttcagatagaaagcttttgttgactcatgatgagacccacccatttcaatgaggtacttaggcagcacaccgtcacagagctgatcaaagctctggcatgggttcaatcaggattattccatgggycatatcaaagttcctcactgcaccttcacttcatgtaaaaacaattcatttataattgttttacacttcatgtaaaaacaattcattatataaacttctttctatgatcaggagctcagggtaaattattttaccaactcaccttttcaccattataaatatgattgcaaattataaataaaatattaaaaaaattgtcttgccaaatttctgattatagttgaaagcagacatgccgtggcagacaayagatataaaaaacaaagatgaaaacatttcagtggtgtactcatgctgtcagagtttaaaacgtatatttataaatatatgcagtgtgtctctgtgtggagtctaaactgttttcaatgaactcagcctgtttgcaaacttggatttcttcttcggggggctactgtctactttatattcctaagataatcaggcaggtgtgtgaagcaaatgtgagtggctcagtttcattttgaactcctgatacggatattagggatcttggacttagaaggtttgattgctatagtatttcagtaataggaggtctgcaatggcatccgatgttaataccctctctcaggaaagatgataatggcttttctccatccctaaatgaaccaaaaaatgatagaacagacatctgtggatggagattgctggaagattagtgtgaaggggaaaaaggatcakcaatagcgctgccgttgctgggaagggggtggggagaggctgtcgcagaggaagactaaacagtgacgagttaatgggtgcmgcacaccaacatggcacatgtatacatatgtracaaacctgcacattgtgcccatgtaccctagaacttaaactattattaaaaaaaaaaaaccagtggcttgcaaagggtggcaatcaggctaccaaaaggttacatggggcaaaactcctgtgtgtgaraaaaatggggttggggggagtgggtasgcaacttaaktcaaaacattggtgacccagagagaaaaggaagagcaaaatgtaaggtgtgggtggaggaaatacatgttcaggttcaactgtagagaggtccacaagtgcatcactggttcctttatcatgagacctgcgtgtatgtcccaggaagaggcagttattggatgtttagggtacatgatgggattttcagctggagactgttgtggatgcttagctgagaaaaaaagccaatgttatctaagaggaattctgctacaaacagggaaatggaagaccacacaattcrtgtaaacaatattgctgcttattcttaatgtttttgtttgtttgtttgtttgttttttgagacggagtcttgctctgttgcccaggctggactgcagtggcacgatctcggctcactgcaagctccgcctcccrggttcacaccattctcctgcctyagcctcccgagtagctgggactctaggtgcccaccaccacgcccggctaattttttgtatttttagtagagacggggtttcaccgtgttagccaggatggtcttgatctcctgaccttgtgatccacccgcctcagcctcccaaagtgctgggattataggtatgagccaccacgcctggtcattcttaatgttttygtttgggagacgtgatgagtagagcacaagttgaccccagtgaagcttcaatattgcacagtccttattctggaggtacccgggtattaccgacaagcaaaattttatctagaggcagacagaggattttgaaagacatctgggagaagggaataatggtcaggtctgagactcagcagaaatcaaggtttttcttgttcagacagagtctttccctctgagcagtggagaatctcagatgatttgggtgcacatactggatatatgctggtgatcctttctgtcrtctccttgggaaacattatttacacaagttccttcatccctacctgtggcccccctgccagtccctttcatgcttacatccactcctcctgcctacagccttctttttttctgggcgagggaagagtatcttagtgaactgcgtcccagagagggaarttgatagtgatgtccacaacccacagtvttctgcctttgtgaatccccttcacatatgcagtccatcctaggagatgctaygtgacctgggacatcccttgatgccagcacatgctgtattatctttgggaattcacactagaccatgtgtgcttctgctttattcatcagttaccctcagcacacatcacagtgcctggcacacagtrgcactgaaataccatttaataaagaacactaactgtgacagcacacatagaactatacagcmattcaagtaaatatttttcccattctctttaacacaggacatgaaatcttgaagagacgatagtccctgggcattctacttctatgcagcatgtagggctagaaatagccattgtccagccctgtacctcaaaggcagcaggaagccaagtgtcaccatctgtgatktwgccyrcgtcctagaacaaaayggcaggagaggctgggtggctgatgaaagcaagtatcttgtctcaagttcaaagcaacgcttttccgacctgctaggtttctaggagtgacacgtaccacccagggactctggacaagttgccttgcatgtcaccacctctgtgtgggctaccagctactggcaaggttcatggctgcaggyacaggctgtgcagtcctagggtgctctgcagagttcccagacagcttgcaggtggctccagggactgctcacttctcttttctctctagccctatgtcatgaagggactgctcawttctttcttttttttttttttattattatactttaagttttagggtacatgtgcacaatgtgcaggttagctacatatgtatatatgtgccatgctggtgtgcggcacccattaactygtcatttagcattaggtatatctcctaatgctatccctcccccctccccctaccccacaacagttcccrgagtgtgatgttccccttcctgtgagcaactgctcacttctaagccaggtgtgtattttgtttcctggccaagccattgtttcataaaactttagatttaggggacatctaaggacacagagagaatggggcagcatcattcctgaaaygggatattttcatgggcaagtataaatgtcttcatcagatagctgcttccaacagattctgagtatgggacgtataattattacacagaatatggcactttttcagaaattggatatttatagattctagctccattacatagtatctatgtgaccttgggttactcaagctctataagcttcaagttctttatatgtaaattgagyatcataatataaacagkgtattgtgagaattagcgggttctcattacttactactaatgctcctttcgatttgaaaagatctgctccttccctcttctcccttcccccaacttttttagcctaagcctctmtccaccacttcctccctcattcaggatttatttatgcaattgatgggtatgacacagcatgtgcyrtgtatcccatcctctgtcatttcacccatggacaggcttcttatagggagsgtgagtttttcctgctgggatggggtagagggaggcctccaatcctcccagagcactgcttgacttgtctgtcacggtgggctgcctctgagaagggcccctatmatattcacacacatgtataatctcttcctcttgaatgtggctggacttagtgacttgcttctaacaaacagaatgtggcaaaagtggtgagatatgacttctgagattaggttgtaaaacattgtgacttctggcttgcagtcctctctttcttgctgtcttggagccctgctataaaaggaagcaagctgccatgttctaaatagccctatggagaggtccacatagcaaggactcwcgtctccaagctaacagccagcragaaactgaggcctcagttcaatarcctgtgaggaactaattcctgccaatagccacatgagtgagtgtggaagcaggtccttttccagtggagccttgaggtggccacagcctggccaacaccttgattatagcctggtgagaggccctgagccagagaagccatgccgtacccagatccctgatycatagaaattgtgagaaatgtgtgtgtgtgtgtgtgtgtgtgtgtgtgtgtctgtgtgtgtttgagacaaggtttkcccaggctggagtgcagtggtgtgatcatggcttactgcagccttgacctcccaggctcaagcgatcctgctacctcagcctcctgagtagctgtgactacagsctcatcccaccgtacctggctaattaaaactttttttttgtggcaatgggggtctcactatgctccccaggctggtcttgaactcctggactcaagtgatcctcccgcctttgcatcccaaagtgctgggattatagrtctgagccaccaagcccggcaatgtttgttcttttaagctgcttagctttgagggattttgttacaaagcaatagataactagtacagctgggtaggtctggctaatctcgtgttcagtctgaggaagccctttgcccctcagatgtaagtggatactctgaccttccctatattgggtcgtaaagatgacagtttgttctccacgtgtgttttgcattatttcccaattattttttaattagaaaaactgggcaagggagtggtgtgctgtttatcactcgacaacccgtcttctaaaaacctcaacgtgaaaactctccatagatattagtttcttgcaagaatttctgtaggccaagcttgtccaacccacagcctgtgggccacacgcggcccaggacaacttttaatgcarcacaaaacaaatttataaactttcttaaaacattatgaaatttttttgtgattttttttttttttttgcttatcagcaatcgttagtgttagtgtattgtaygtgtggctcaagacagttctctttttccagtgtggaccagggaagccaaaagattggacacccctgccgtagacatttctgcaagtgaaatmgttgggatccagctttgcctgagacagtgctcttccagtccctctgctatcaacaaaaatgcccacgctctttytaggcactgctataggacttggcagaggcttatgtgctttgaggtccctttacctctaagcccattcacaaacattttctaggccacggtcttggttttgccatttgctcctattaaaacccctcccattcaaggcctagatctcaggcatgaacatctcaagtgcatrcaaagccagcgtaggaggaattttggggcttaagcagcaactaaatttggaggttacttgaagaggagaacaacaggctttcgcacctgcccatgttattttggggagaagyagagacagagaaacctagaagattattaaayrattaaagactttccagaaagcattaataaggccacaagtatttgggtgccctttgctttttctcatgcattctcaattcagggaaactaaatgagtacactctcagycccaaagcttcagtgttcctggccatgtttaaagcatggtctgggaatggacactgtatgaatagcccctcaccaggagtcacagctccctggagggtggrgagtgggcactgcttgatcccttctgtagggaaagagggagagatctgtgtcctggcagcttgagaagattaaaatgtactgtcttcagtttcttcccttgtgtcctatttcagaatctgttaaaaaagtatttaaatcagaaaaacagcatttggattttataaaatacaacagatcaattcctacttgtggttttaccctggagcttggcatggagaacagttttaacagacatttttcaaaaatcattaggctcaccaaaattcaagctggcccatgacatttggattggatccattttttttaagctaatacttttccaccccctgtggtctgtagcttttaatcattccctctacatcatgagtttagaagaaaacaagtatttgcctaccgaagacatacttaagagttcttccatgttcatggatttctgggcaaacataaccacttgaataggaaagaaaagcacagttgataaatttcccaccctttagggaggccccatgatttctaataactcctgatttctactgctcagccctgtcaatttcctttgggcctagcctggtgatacactcattttcatatctgtattagattatttagggcaatccaaagtcataggtgataattattaaaatggaattttattttagaggacattaawtacttttaatgtaggatgattatgggatgtgtctacatagttaatttgtaaaggcatgtcattttattagggcactgaattagtttcctattgccactgtagcaaattaccacaaacttagagtttaagacaacacaaatttattattttctagttctggaggtcccaagtctgaaatgggcctcactgggctaaaattgcaccctgcattccttggctcatggccctgaatcgctccaatctctgtttccattgtcacatgtattgctataattaaatagcagcagactgcttcagattattatgtgtatgcatacacacacttcaygaaaaacagaagcatttttaaaatgagggatattggccctatttttttaattgggaacagaagaatttatcagtttatttcaagcaagccctcaggcttacttgaatgaaacaggtctggtctgaattgattttcttcccaaagaaatcaggcttataaacaagtggtcctatttgaacatmaaatttacctacgcattgcaggttatctaataagtccatgcacaggcatttttaacatccccacaaattaatctattatatgcacttcttttcttctccaataaatcttaaatctacaaactaaaggcccaaatcaaatgattgcacttcatgaattctatagcatccataatggatgtggctcctttgttattttgagcacgcagggtgcaactttgaaaggttagctaatgtattttttgttgctagaaactatttgtcctctatccttccctcctttccaggcagctgcctgggcattaggttttactaacttctcctgaggatgatgtaaccaaaccaaagarttgattcttagtttttgggtttcaaacgcttgggctttgaatttcataaggcaaaactaagaaagactttgggaccatacaattattccaaagccactgaagtgtatgtaaatgtgtgggtgtcctggggatgcatctccttcccaagggartacgtggggactgagacagtgtcaacaaaatcaacctccagatcctcaaatcccctatatttgcttttctcagactcatctctccataggcacccttatgacttgcagagtttcttgcttattttttctccccacacttgcccttttcrtgttcctacttccatcctttgattcactccttatcttgctatggtggaaaaacccaagcaaagggaccctgtgaactagtactgatattgagaaaactaattgatctgataactggggaccacattcttttacaatgattttttattctttgctcagaataaartttgaaaacctacttaggatattctaaataattttttttttttttttttagatagggtcctactctgttgcccaggctggactgyagtggtgcaaggattctcatgcctcatcctcccaagtagctgggattacaggcacccaccaccactcccggctaatttttgtatttttagtagagatggggttttgacatgttggccaggctggtctcgaactcctgacctcaagtgatccacaggccttggcctcccaaagtgctgggattacgggcatgagccactgtgcctggcctgaaaataatctttgacggtagactactatgctatgtttaggatgtaactctaaaaaatctcaaagaagtgaaagacactgctataataaaatcgattctattttcaactacttaaataaattctttttggacaagtcttttcagtgctattttttaaacaaagarcaacattgatattaacctctgtctcattctattgataaatagtattcattcatggagagattaactaattasaaaaatcagaccagtcccrcccatttcattgagatgattttccattaaaatttaaatttttaagtttatttattaatatttaaaatatatttgtattgttttgatcarttgtgaactaagtaaaacatagtatggtaattcccmaaataaaacttaaaaatatacatttgaacctatatagtcaaaggaccttttttaaaaaatgttaatttatacccttttctgtggtgaattatgttaataattagttaaattcttayttagttaaatttagttaaattatttcaagtatattattgtattagmataaagttctgtggggaaaatggaatggaaatatgactttaaggaacattataaaacaagataagcatgtacatttatatcgttaagtgaacagtgatgagtatcccatttctttggaatttaaattccactggaaacatttgaaggatctgagtaacaattttattttagactttcaatatttacaatttactggaagtcacttttagcaactacttaaactgatgaccaagaaagyctatagatgtcaacctaataatgtgctagggggtacaatgtcttttgaaattattttagggaatagatgagtaaaaatagacaaattgaagaccarattataaaaatcatccagaattatttaaaagcaagacttgaaatgagattgagaatctggactgcggatggcagagagcattgcttctgacagtaactggggtctgagtcaggacatgatagaacttgcagagttcagtctgagagttggcagcacctaagccctcactcttgtctggtatccctggaaagctgttgatgtgtggttaggagaaggctaagggggagaaatgcctgagatttcatcaagttccctccatgtgtttcctcccagtattcactctgagtttgcagctcagttgtctgcagtgattacctgtctcatgaatgtatcccttttagtttacctcccttcctagtctcactttctccattgccctacctgtgctttctgaggttwtctcccaaataaactacctgcacccagcttctatctcagaatctgtatttgggggacatcaaaaccaagagatgtgccataagtcacttacttacatggaatagatttaatttcaatacaatttagcatgcatttattgggtgcatgctaggttggctctagggayacccaacaacattgattgacttattaatcaggatggaagtcaggactatcagctggtcctctgtactgagtgtacataragagatttagggaaaactgaccttaaagaaattaatcttaaaaagrtgtgataccactttgggaggtcaaggagggcggattgcttgaggccaagagtttgagaccagccgggccaacatgacaaaactccgcctctaccaaaaaaattcaaaaaattagccggcatggtggtgtgcacctgtagtcccagctactcaggaggctgaggcaggggaatcacttgaacccaggaggtagaggttgcagtgggctgagatcatgcctytgcactccagcctgggtgacagagtgagaccctgtctcaaaaaacaaaaacaaaaacaaaaacraaaaacctgatacatgtagtgaagaagctgatctgtcaaaagccagaaagcaaatgcagaggcatactaaagtcagatgtttaggggaattcttttggaataactaatttttcatcaaacaggtttttcttcttatgaaatttgctggcgctctgttattataatcaggaactataaggaacccaaatgtagcrtctggttaaaaaacaaacaaacaaacaaacaagcagttaagttttatttgtaagagcaaataaaaatcatgttctattatggagttaataggaaataagcaggttttcccccttagctttcattacagctcatgcaaatgctagtaatgcaattatgtaaatatctagttgaggtttggagtgctgcctttattatttaactctaaagttataaaatgccttatttgcatattacattttacagcaatggtataaagcttataaacaaggttctattttttagagaaktgtttaaaacagaggtttctgccagtgagaatatgagccttacctagtatttagccttgagctttgagcaagggattatgttgatagccataaatgaagaaaaccaaaattaaagaaaaataaaaagcacgttaataactctcacaagtaattagcaaacagagtccaagggcttgaggaagggattgagtttctgatctctcttgggtggttcctcaacrtgtgtgaccttgaccaagtattgtcctcacttcttccatctgtgaagatgaaagcaactcttaatacttagaatcattkytgaggccttggtgtcagttggttcactttctgatggtcaaagttacggaataactccttttctcaccacaaagttgcagcattttaataaggaacaggcttgagtcagaaaaaaagacacaccatggcaaggcagtgctggctgcgtatcttcatagcatgtctgagctggaaagaagctgaattatcatctaattttaaaaaatcatttttgggttcgtagtacgtgccaggctaaacactgtgctaaaactttacaaagatgatctcactccttcatttcatcagtcccatgaggcggggatgattatcaacatcttattgatgaagaaacaagctccaagaggtaatgtggyyaacgtcttaaacttgaagttgaagagcaagaatctgagccctgttttagatttttaatctctgtgtaaacttcttccttttgttccatcttttctctttagaaataaagcccttggaaactctgtgatatgccaagatccccagggtaataagtaacagagagacttcgaatgcaggttttctgagtcccaggctggtgatgyggttcagcaacacctgctactaatccaggcttccctgtgtagcagaggagttgtctccatgcaagtgtgcagtgacatgtagactaattgttctcagtgttttaaaatgaaatctaggccaggaacagtgtctcatgcctgtaatcccagaactttaggaggctgagatggaaggatcttttgaagccaagagtttgagaccagcccaggcaacataacaagactctgtctctacaaaataaaaataaaaaaaaattagctggtcatggcagtgtgcaactgtaggcgccagctacttgagaggctgaggcaggggattgcttctgcccaggagttggaggctgcagtgagctatgattgcaccactgcactccagcgtgggtaacagagagagagacttgtctctattttttttttttttaataaaagaaatctacaaggcctgtatggagttctgaagatgcagatcctgcaggtataaaagagagtcaggctcctctcatggcctttctggatgctttttgtttgtttgtttgtttgtttgtttgagactgagtttcgctcttgttgcccaggctggagtgcaatggcgcgaccttggctcaccacaacctccgccttctgggttcaagcgattctcctgcctcagcctcctgagtagctgagattacaggcatgcgccaccatgcccggctaatttttttgtatttttggtagagacggggtttctccatgttggtcaggctggtcttgaactcccgacctcaggtcatccgcctgcctctgcttcccagagtgctgggattacaggcgtgagccaccgtgcccggcctatggawgcctttcttcccaggaataaccagcacaggagccaggtcattgkcctttgctaataagtgaatataatcattattttttaaatggaaacaactctctcaaataattttcaattgatttttgaaacaacaaacaagcagctttatatggtcagcttaagcagttttgttttacaaatcctaagtctgtttatttagcacatttctgcctcttccatcggactcctgttcctgctggcttggttcttcatttacctagcaccttagttcatctgcaaacttcactgtatgctatctcttctcatttgaaaagttctttttctaatatttatccccaaatccccctttaaatttttttgtattctcttttatcaattttttttaaccagtaaaatcggtatatttttactctatcttcctaccttttgacctgcgtttctatactagatctagatggaagacaacacaatatcctcacattcatggtggctcaatttttgcaaaaccttgcaaaacttttggaagttaattcctttataaaaatgtctgtttctttttatatcttcagagaatgcaactgaggcataagctatgatttctatttactgataagtaatttttattttatgggtttgatgattgcatcaaataggtgtrkgtgtgtgtgtgtgtgtgtgtgtgtgtgtgtgtgtgtgatggttaagaatgtgagctatattaattaggtcaaatctggctcaaatctagtgtgacctggggcaaatcacttcacttttctttgcctcagtttttcatttgcaaaatgaatagcatctatccctgagaattccagtgaggatcagtcaagttaatatatgtaaagtaatatatgtaattagtaatatatgtaaagtacttagaacagtgcctggctcagagtaagtaggatgtaagtatagctgttatatggtggtctagttcactattttcactataaattcttactataaatcctcccaattcagctgtttatttcaaatcagcactgtctaatacaaacacaatgcagtccatataagccatgtaacrttttctagtggccacatttaaaaaaggttaaaaaaagataaaattaatttcaatacttttaatgcctattatgtaaaaatacttcaatatggaatcaatagaaaaattattcatgctgggcgtggtggctcattcctgtcatcccagcattttaggaggctgatgtgggaggataccttgagcccaggagttcgagaccagcctgggmaacatggtaaaacctctctctacaaaaaatacaaaaattagctgggcatggtggtgcatgcctgtagtcccagctaccagggaggctgaggtgggaggatggatggagccctggaggtcgaggcttcattgagctatgattacaccactgcactccagcctgggagacagagcaaaatcctgtctcaaaaaatattcacaagcagttttacattatttttatcatactgtgtctgaaatcgacatctcaatttggactagccacattcaagtactcagtgactacttttgctggtagctactatactgagcagtagcaatccatactgtcaaacattaagtgtaaaatcctaagataatacctcttttgccatggatagtttgtgtgatattattaccagattatttactaatactatatacatagcaatagggttgggctcaagaagtatggagaagaggtacaagtttgtctggtgtttctccagctccagttgagtgctctcctatttcgcatgacactttcttagtttctcasggtggagcccatcaaaacctccatccaggcccttatatatgtattttttgagatggagttttgctcttgttgcccaggctggagtgcagtggcgcaatctcgkctcactgcaacatccacctcccaggttcaagcagttctcctgcctcagcctcctgagttgctgggattacaggcgcccgccaccatgcccagctaatttttgtatttttattagagacggggttttgctrygttggccaagctggtctcaaactcctgacctcaggtgatccgcccaccttggcctcccaaagtgctagaataacaggcatgagccatcatgcctggccccaggcccttatattttaacattactgtctgttctgggtcctattcatactccaggaccataatgtgatgcagttcagttgattctcattattcatagtaattgtcttctataaagtcactgtaaacactgaattagcaaatactgaaccattgctcctaggggaaatacagggttatgctcccaggagcctctggtcrcagtatgttcactatctgatcatcacataccttatgtgtgtttctatttaaaatcaccttatttactgtctattgttggattgttagtattgaactcatggccaacaatactgtagctcaggtttgaatgaagcttgcytaacacatatactagacarcacttcagcactgtgcttgggaactttttaagcagtgaaatcatcaaaccgaagcacacaaatgtaaaaaacagggcagtaaatagacagttaaaaggacacttgttttacagtatgtccactgaaacaagaaggcagcatgttgccttgttcaacctcagctgggaatatrtgtgkcaagtgactcagacttttttcctgttctatgcaaatctgtgaatggccatgaaagcactgagagaattgattttggagttacaaataagtgaatctctgaataatgagaataagctgrgttgcttttcgtcaacacttgcatgttaagagatgctttccgtgtatttgggtgggcagctgagaagctactgggttccttcaaaccctgtcacttggatattcataatggtgaactgcccactcctactcccagggagtggaacagccaagtgagtgtatcatagagcttggttggtgtattattctgttctcacactgctagtaaagatatacctgagactgggtaatttgtaaaggaaagaggttcaatggactcacagttcagcatggctggggaggcctcacaatcatggcaaaggcaaaggaaaagcaaaggcacgttttatatggtggcaggcaagagtgagcttgtgcaggagaactcccatttataaaaccatcagatcttgtgagacttattcactaccacaaaaacagtatgggggaaaccacccccatgattcagttatctccacctggccccacccttgacacatggggattattgcaattcaaggtgagatttgggtggggactcatctgaaagatatcagttgggcagagtcaactgtaaacagagccagaaaatgagcaatgcccctacttggcaaaaggcaaaagcagataaacccaaagcataatgatgctcaattgcaatgctcccacaggggctggagatgaagtcaaaagatgagagcccataaaagaaggcatagaaataagagccagacatcagccaggaagaaattgaaaaggccaggactcatgggtgaatggactgtggygcccattgttgccttttttggggactggctttgtggggcaygagtaggtttttctgggataaaagcataagattgtgagtgaagacattaaccttgactcatacctaagcttgctgtgcacaatcattgacagattttgcaagaatttttgatactttcatctactcttttgtcttatcatgaatcaggttgactggattttctgaattcattaggacctcaccttttatctcttttgttaaacaattttctttgtttgaaacaaagaaaaatatatgtatatgttgtaaataattctgattttattgagaaaaatgcagcatatttaaaatatgtagtgattctattatataagcttatctgttttcacataactctcctttggataaatctcaagcagtttatttttttttttaaagtggagattatgttggagcactgagattcataaaacaagtacttctagacctaaaaaaagacttagccacacagtaatagttagagacttcaacatcccactgacattgttagacagatctttgagtcagaaaactaacaaagaatttctggacttaaattcaacacttgaccaattagacctaatagacttctacagactacttcagccaatagccacagaatatacattcttctcatttgcaaatggaacatactstaagatcaagcacatcttcagccataaagcaagtctcagtaaaataataattwaaaaaaccatactaagcatactctcagatgacagtggaataaaatagaaatcaatgccaagaagatctctcaaaactagacaattacatggaaattaaacaacttactcctgaatgacttttgagtaaacaacaaaatttaaggtagaaatcaaaacaatttttgaaataaatgaaaacagacacaacataccaaaatctctggatgcagcaaaagcagtgttaagagaaaaatttatagtactaaatgcctgcatcaagaagttagaaagatctcaaattaacaatttcagattgtacctagaagagctagaaacacaagaacaaactaaaaagctaccagaacagaagaaatgactaaaatcagagcagaactgaatgaaattgagatccaaaatccatacaaaggaccaagaaaaccaaaatgcttttttgaagggataaatgagatcaatagacggctaactagactaacaaagaaaaaagagagaagatccaaataagcacaatcagaaatgactagatggccaagtacagtggctcacacctgtaatcccagcattttgggaggccgagatgggcagatcacctgaggtcaggagttggagaacagcctggccaacaaggtgaaaccctgtctctactaaaaatacaaaaattagctggaggtggtggcatgcacctgtaatcccagctacttgggaggctgaggcagaagaattgcttgaacccaggaggcggatgttgctgtgagccgagagcatgccactgtactccagcctgggtgacagagtgagactccgtctcaaaaaaaaaaaaaaaaagactaaaatgrcattacaactgatcccatagaaatacaaaagatcctcagagactattatgaacacttctaggtatacaaactagaaaatctagaggaaatgggtaagttcctggaaagacacaaccaccctagattgaatcaaaaagaagttgaaaccctgagcagaccagtaataccagtaatgagctctgaaattgaatcagtagtaaaaaaacacccaaccttaaaaaaccctcgacctgatggattcatatctgaattctaccagacataaaaagaagagctggtcccaatcctactgaaactattccaaaaaatcaaggaggagggactcctccctcattctacaaacccagcatcatcctgatagcagaatctggcaaagacacaatgaaaaaagaaaactayaggccgatattcctgatgaacacagatgcaaaaatcctcaacaaaatactagcaagctgaatcccaaagcatatccaaaagttaattcactatgatcaagtaggcttcattcttgggatgcaaggttggtttaatatacacaaatcaataaatgtgattcaccacacaactaaaaactgaagacataactgcaaacaaaactgtatgattatttcaatagacacagaaaagctttttcataaaatccagcatcccttcataataaaaaccctcaagaattaggcatgaaggaacataccacaaaacaataagagttgtctatgacaaacccacagccagtactgaatggatgaaagctggaagcatytcccttaagacctggaacaagatgaggatgtctagttttgctgcatagtaccggaagtcctagctacagcaatcmggcaagagaaagaaataagaagcatccatataggatgcttttatcattgtttgctcatgatatgatttgatatctagaaagccctaaagactctgccaagaggcttctagaactaataaatgacttcagtaatgtttcaggatacaaaatcaaagtagaaaaatcagtagcatttctatgcatcaatagtgttcaagctgagagccaaatcaagaacacaattccatttacaatagccacaaaaaaammcacaaaatacctaggaatacatctagtcaaggaggggagagatctcttcaaggagagttacaaaacactgctgaaagaaatcatagataacataaacaagtaacaaaacattctaggcacatgtatcagaagattattagtaaarcagccatactggccaaagtaatgtacagattcagtgctattcctatcaaactatcaacataattttttacagaattagaaaaactaaagttcacatggaaccaaaaaagagtccaaatagccaaagamatcctaagcaaacgaataaagctggaagcatcacaatactcaatttcaaactaaactgtaaggctatggtaaccaaaacagcatggtacaacttcaaaaacagatacatagatcaatagaacagaatggataacccagaaataaagcctcctgcstacaatcatctgatcttcagcaaagccaacaaaaataagcaatagggaaaggactgtctattcaatcaatggtgctgggataactagctagccatatgcagaagaatgaaactggaccactgcctatcatcatatacaaaaattaacttaagatagattaaagacttagatgtaagacctaaaactataaacrtggtagaagaaaatcaaggaaatactcttgtggacataagccttggcaaagagtttatgactaagttttcaaaagcaattgccacaaaaacaaaaattgacaagtgagacataatgaaactaaagaacttctgcacagcaaaataaactatcaacagaataaacagacaacctacagaatgggagaaaatattcatagactatgcatcctacaaaggtctaatatccagaatatgtaaagaatttaattcaacaaacaaaaaataaataaccctattaaaaagtgggcaaaggamataaacagacacttcttamaatgaggtatacaagtggccaacaaatatatgaaacaatgctccacatcactaatcatcagtgaaatgtagatcaaaaccacaatgagataccatcttgcatcagtcagactggctattaataaaaagtaaaaaaaaaaataacagatgcttgcaagrctgcggagacaagagaatgcttacacactgctggtgggaatgtaaattagttcagctgctgtggaaagtagtttggaaatttctcaaagaactaaaaatagaattaccatttgacctagtaatcaaattgctggatatatacccaaaggaatataaatcattctaccaaaaacacatgcacttatatgtttatcacagcactattaatatgagtaaagacattgattcaacctaggtgcccttcagtggtggattggrtaaagaaaatgtggtacatatacaccatggaatgttacaaagctataaaaaagaatgaagtcacattgattgcagcagtgtggatggagctagaggtcattatcctaagcaaattaacacaggaacagaaaaccaaatatcacatgttcttgcttataagtgggagctaaacactgggtactcatgaatataaaggtgagaacaattgacactggggactactagaggggagagagagcaagggtttagaaactacctattgagtactatgctccctacctgggtgacgagatcatttgtatcccagacctcagcatcatgcaatatactcgtgacaaacctgcacatgtaccccaaatcaaaaacaaaggtttaaatttttaaaaatgaagattatgtttggccttctgtgtattagtcaactctttgtcacagtagacactcattaaccatgtttgtttctttaaccatgtttgttcctttaacctgaagtgttatctggtttcattgtttccaacctggagctgatttttcctactctttattctatgtataattcagcctcatctcattgtctgtacctaccatatttcagaacactctccacaccctaactatataggaagatagtgatattttgagcaaaattaataggcctcaatgggcatattttctcaatttattgcatctttgcaaaaattaaggagaacagaggcaaagagtagaaataatatatctagaatgacataatatgatacaatgggaagccaaataactaacctggaaaaaagttctaagaacacaaacaatacattagaatttgggtaagacaaagcttagaaaaatttatccatcatttagaaggctatttttatggaagaggcatcaaggcaatgacatacaataaaatgttgagaaatagaaaaatggccccataactcttaacatgaagacaactctataactgttacctattattctggcgtacagtacaaggtgttggtcaggagcgtctgctcaagccagactcatggacaaattccaggtccattattcctgatgaacaagtaacttaagagtctctcagcctgagttttcttagctatatatgygtatataatgtgcatagaatgcatatgtacatattggccatataaaatgatgaaccatataystgaggcaaggtaacatataattgaaataatttcttcacacacttatttcttaagcccctgctatgtgccatcttcacagagttcatggtctaaagamggaggtagacagtcacatgggtccgtaggtagataataacagacagaaaaggaaaagcgcagaaggttacaaacttccaatagggagacctggtttggttcccagggacagggaaggttccctgagaaagtgmtactaggctaggatgcaaaggaggaatgggagttaaatgagtaaagaaggaggggcctggggaaagagcatcctagcaagaggaactgtacatgcaaagcccccagttggggatcacaggttttcctggggaactaaaggttggccattgtggctggagcatcaagaatgagygagggagkcctgagagtcaacgcggaataggtgggcagaggccacttcactttatcctaagtgcagtgggaaccaatgcagggctttaagctggggagagacatgagcttctgtgctgttaatagagtggcgsagtaagggtgaatgtttgctctcgctgtcctcccggtgagagatgatggtggctgtgactgggtgatggcatgagcaatggagaaaagtggaggaatctgggagatatttaggaggtaaaatggatgggactttgtggtgggctggatatggcagtggaagaagagggaggtgctaagcatgaatcctggtctcccaaattggaaactcagcctgtggtgatgccattcattgcaaaaggcaataccagaaaagtactgactttgcagagtacctttgtccttatttacttgcagacatatttcacagatctgaaaccttagtgtaccttttgcctaaaatcttattttcattcatgaaagagcatcatattcgtatgtatgtatctatggaaacaaatatacacaaaaatagtaggtttgccatgattggtgtaaattagtcaaaacatttatttagctttactataaatgtaagtaattcaaacattttatactcttattattttaaaaaaccaatttcatatgctttcttcatagttaggtttctaaacaattgtaatgtatcaattccctgatcaaacatttattctcttccccaatgtctatggaatgaaatgtatgctctttgcaattaacatcatatccaaggtcttgagtcactttcctgcctcatcttcatggcttctctattgcccccaagggtgttcttggctttgattgttggttcctctgcctgggatgtcctctaaacacttctgcccagctgaatcctactaattcttcaaagcctccttgaaacattgttgcctctggagcttttctggatccctgtcaaattgtttctgagctttcttatgtgggtttatatcacaggcacacttgaattaaagttaaattgttcacatcagccccttcctctagatcaacaagttctccaacttattttgcctcttcttctctattactaaacattgtgagcataccctctgattgaagttgggcttcccccagaagcagatcctgagatatggatttgagtgtaagtaatctgttttgggagatgatcccaggaagtgcttttgagggagtggggaattatcaascagatcatggyggtgggcaaccagggatcctttctgctgggacctctcaraggctgtgtakaacatgcctcatagttgtgcaactgaaggcaaagatgctggggagattgtcctctgctatggactcaaagtttgtgtccttccaatattcctgtgttgaaatgtaatccccaaggtgatggtattatgatgtgttgctttgggggaggttattaggtcataagagtggagccctcaggaatggggttagtgtccttataacagggacctcagagagttgcctcaccctcttttctgccatgtaaggacaagtgaaaaaatggaagtctgcaagacggaagagggctctcaccagagctcgaaaatatgggcaccctgatcttgtaytttcagcctccagaagtgtgagaaataaatgtttgttgtttaagctaccctcgctaggatatcctctaaacacttctgccgagatgaatcctattaattcttcaaagcctccttgaaacgtcactgcctctgaagcttttctggatccctgtcaaattgtttccaagctgctttgctcttatgtgagtttatatcacagacagacttgaattaaattgttcctatcagccccctcctctagatcaacaggttctaaaacattttttgcctcttctctatcactaaacattgtgagcacaccctytaattgaagttgggctccccaactgttctagcagcccaaactgaaaaagacatcctctcacatcaggcagtggttgagggctgttctgaggaaccatgactccccagcacttcttgcctggtttggcctggaccaaattcacttcagcagccagagggccccctcaagcagagatacacagatatttgatgttgaaaaggcactaatggtgtctgcaatgccccccagccctcatatagatagaatattttcttatttattgctcatatacaataatgaaagcgtctcattcctcctccaaaataattaagaggacatagtatttggaaaggaaaatgggatattatccgaagggagtgtaggaggtagggacttggattttttattttttaattaaaagtacttagagtttctagctaatatattttaatagttgaacatattaaaaatcaggatctagtatttatagtagatgtagaagaagtaaagtaaaaaataacaaggctctggagcttgacaacttttagcatataggtgccaccagcagaaaagacgggttataaaatcttatggaatatgggaggcattaaaccacgtagtttaaaaaaggagaattttctcatgaacaatgtaatggaaagcctgattaatgaaraacttggaatttgggtgggatcttcatttaggaatgtgttttctgaagttttaaaaaatagcaaaaatactatacatgaagcatattcattgagacaggatcacttgattctttcctattgaagaaaagaaaataactgatccttttctttccatcctccatatatttcattccattctccactgcaccctctcttcactcctactccttcttcctcactccccagcactggctgctttttaaggtgatgtgatttctggatttgtggaggatttaatgttttgagaaatgaaacagcactgaaatgctgtcatggtgcctgagttataaagtatttaggtgatttgtggtccacacacatatggagaaagtatctttacttgaggaaaagcatatagattcttttgtacatctgcaccattttttaaaatcacgaatagcattttaaagtaaaaaagaggtaaagtcttggtgggtttgtgttactttaaattactttcaagaacaaaattagaccaccattggctggtttttctatttccaaatcatattcccaacaggatgccaatgcagtccagcagtttaattcattattatacaaagtccaagggagtgaaattttaacctttgcttctaaccacttcgtgttggttttatctgtaattaacttagtgaaaggcatctgatgacagattcttccctgtgctccaattacctaacttaggaggttatccaaggagcttatttaaccactttcttctgaaaagtgtcatgtggtaaaacagaaatcataagtaggaattctaggtgttttaacagggaatcccaaagagtattattggatgagcccacatgggaatgtttgtaaacccttgactggtgtggttaggtctggggcagtatcatggtcaaaagaacacagcactgaaaccaaaattagcttcaaagtaacctaaatcctttacatctgtcaaaagcaatgctttctaatatcctcttttttactcctctcccatcctccatgcatattctctgtagttatacccagacttttattttcaggtgcccttcacctgggaaaatctcttcctctcgccccagccctctagtttcctgtgcttttctcccctgccctctgtctgattttgccttacaaagccttacagggtcagtctggcaaaggtgggagctccttagagggtggaagaaaggaagacagacaaggaaaagctagaatcttttttatagggcagaaggatgggaaaggcaagggaccctcataagataatctttgtatttaaattatataaataaggatataagaaatttttctatctgacagcaccaagggacattttcttaacagtagacttggttgtcttttataacagccggttggaaatactagagaagtgcattccgaagttccatcctatattatgactctcattcatgactttaccctaagcccttcctgaatctacttatattttaaatttgtgccactcctgggttccacaatggaaggtaatttgagaattctcagatttgataaacaactctaaatttgcctccatattaactctgtattctacatataccttttgtgatttcaaagactttgcaatggacagaatgtttgtgtgccttcaaaattcatgagttgaaatcctaatccccagtgtgatggtattaggasaatgaaggcctttgggtggcgattaggtcactagggtggagccctcataagtgggattagtgcccttatagaagggaccccaaagaactccccagctcttttcacyatgtgaggatagaacaagttgatgacagtctgcaacctggaagaaggccctcaccaggaccagaccatactgtcaccctgacttccagcctccaggatactgagaactaagttgtttataagccactctgtctttggtattttgttatagctacctgaactaagacagtcttcatttacacatataacctttcctttttttaatctctcatttttgagaaaccactccattcttttaagcattttagttaatcttcttggatttcatccagtttggctatgcctttatagaggtcacagttgctcacagtgttctaggtatggtatgaatccgttttgaataaagaatgacagacttgtatgatttacttttaacacccttttttgctattacctagcattatttttgttaatagctttcctaaggacaaatatctttcaaaccacaccataatactttctatttttccttggtcataaccattgttgacaactgtcatagctatccttctgtacatatgcttggaattaattgttgtacctgtttaacctrtgcccacatgatatcttatttgccatttcctttcatccctgggattataaccataccctggggattgtgatccaagaacaacttaatggaaattgtaagataaattataatcatttactacataagcatgaataacataatgagtggaagaagacaaagaatactctttggcaggaggcaaaaaaggattaatagtaggagaaaccagtaaaaataaaacctgattttcaaaagatctttaagtttccacatgtaagtttcatatggtagaacagtttttttttttgactacattaaagttcctcattttatttaaaccataaaaacattgtgtcaagaagatattaacatgcattaatgttatttaaacatgattaaaaatcatggaatctggaattttgaaaatatgggtcctgaaaacttttggccatgggcttgtttttaaagtaattgcttttttcacccatgcttcccaattagcagcagatccagcaatctggaatcctcctagccaagttcacaccgatcatctcaggcttgttctttgctcccacttttgttttcatcatttgctgcattctataactatattcagcttctggtcctttattttttaaaacaatatttaattgacaataaagattgtatatattcaaggtgtacagtgtgatgatttgatatacatataccctttgtttttatttcttttctgtctaaatccactcccacccaattcattattgacattaatgaatacatttgacttattctcggtaaccctcagctttatgtagggatacagtgtgtgtgtgtttatatatatatatagtaggatagtttattgagaagagcattttaactaaatgtagtagaaaaactatttacaagcaggcaattctctggtgagtctagctgccttctactagggtgtatgttaaagagataaaaatatttacatcgagtgtggtggctcatgcctgtaataacagaactttgggaggccgaggcaggtggattacttgaggcaaggagttcgagaccagcctggccaacatggtgaaatcccgtctatacaaaaaatacaaaaattagcccagtstggtggcrcatgcttgtaactccagctacttgggaggctgaggtgggaggatcacttgaatgggggacgcggaggttgcagtgagctgagatcatgccaccgtactccacactgggtgacagagtgagacttcatctcaaaaaaaaaaaaaaaaattaaaattgtgcaactcttctaagttttgtgatttggaaaatatagtaaattttcattaagatgttgtttgtgytaacctttaatgtgtttattgtcgttttaaaactaataaatatttaaacattctcaatgtaattttctaatattagaaatatcagtacacacaatccacatgaactttgaggcccttcacttttgagagtgtaaagggatgttgaggccagaaagtttgagaactgctagactttagagaatccaaatgtcatttccaccttctttgtgtacattaagtatttactttttcaaagggtccattacatttcattcaccagagtatatttatctgagagcatagagcagtttcctactgactgggagtttcaaaagtagagcacagtacatagaacaataaggaaatacagtagcagagaatacagctaccaagaataatgctaatttcagtttttttgtggttcagagtgagtatctgaaattccatatttagcctccaaataataattttataaactgggcttattttatagtcttgaaagtacaagcsttgctttttctgcagtgataacgttcatgaagggaaaagaaaactgcaaaatcaggaaaagtcatttaatttttaaaaagtttaggaaattctgtgctttaaaagatgagttaaagagaagcctcaatatttcaggtagagaaaactgaagaggtaaagaaattaagtttatgaaactagctcattttttctgtttccaagatgagtaaagatactgcaagagtcacctcatggccatattttacacacactccccttctaactacatgtgaaataagacatgaatgacatttgattgaggcccgataaggaccataaatttctcagaaaatataactaggatgttatagagtcgttaaataatccttcaatgtaaccaarccattgtggaacagatgaaatgaatttgtagttgcaactgtctacttctgaatgctcaaagatatacactaacaaaatctttagatgaaaacagaggagatttagagacaggtttgagatttcttacgagaacttagagttacgtcaaatatagaacaattaacctgtgactttgtccgtgtagaatgaggcactgataggtggtgtggtaggtagaataatgaccacttcaaagatgtctacatcctaattcttggaatgtgtgaatatgttgccttacaaggcaaaaatgactttgaagatgtgatattaaagactttaagatkyagaaattatcttggattatccaagtgggctcaagctaatcttaagagcagacaacctttcccattgtgatcagagaaaggaagatggaattacagaatggtcagagaattgcatttctctgcatttttgttgcatttggctttgaagatgggggagggagtcatgagtcatggaatgtggaaagyctctggaagctggaaaaggcgagaacgttgatttacccttagagtctccagaaaggaacacagtcctgcagacaccttgattttggcccagcgagagccttgttggacttctagcctacagaacygtcagataatacatttgggttgctttaaacctctaagtttatggtaattcattatggtggaaaatgaatacagcagagtctttgaagttggacatttttctgactcccaactcttcactctcaagtacagtattgtgtaggctgtactatgcagctaacatattaaccaagtaataagagaagaagccaagagatattatgttggttttctatttctgtcatgaggaacacatgggaacctatttctaagtctttccttctatcaatgaatgagttaggaaggtagcctcctgaagaaattatttaaaaatcttgatttttctttgggtagataaagaaaagaaaagtagtaaaaaagagtcttaaaattattcaaatcaatgaaattcttcattgtagttatttaaagtccatagacatatagatttcaatgtataggagagaatgggctcagtaaaatgttaaaaaatatttgttaatattttgagccttgatctagtagtatgatagtggtaggaataagtcaaggtaggacaagaaaaaagaaaagaaatgaaaatttaccaagctgcttggagagaaaactgcagtttctatttctttcaccctcacgtaattttgttgacttcaagccaaagatgcctagagggagaccagcaagtacgaacgatagcagcagtgaagagggaaggaggccgttactccgaatgtaaaattagaagtgccaaagcagtttgaagccagtgaggcagtttgccaagccaggaaaacatcagtgcttgctgcctttacatgctccacctggtacagggaccaggacaaattaagttgtgtttacattcagcatttttattttgaaacttgtatactttgtcatcaacatttattttaaatgattggctttaaattggctttaaattacttcagagtaattttagtacatcttaggggtgacagttttcctatgaatgaccgctgaaagtcaggggtaaattaggsktacctgaagcaatttgamttttttttaaacgsttgttcccttctgtgtccattcaaaacctacctgcatttcataaccctagtataatgggaataagttttttttkkkttttttttttgccaaaaccttctggaacatgctgaatatcatggtatgaagaaaatatttagtaaaattgctaagcaaggggtttagagctaacaccctaatcacttgtktctcacccagatggtgtcccagatccaatataaattttctaccaggacgtaaaaaaagcaaacctttaaccagccatgcgttttgtttgaagtctcagggcacttaggaaatgcctcatgagtataaggagatttaattgcttgagcagtgcattaggaggtctgagaagggataaaaatggggaaaaagtgttttctatgtggtctgaattatattccccagctgggcttagtttatagaaagtcagcattttgaactacctctggcttccctctacagttctaggaagatgcagctaacttagctaattttcaaggcacgagaaggtgctagaaacatgacctccmagctactgtttatatatcaaggggtttatttcttcagtatcttaacttccaaaacaatagtttggatagtgtttcaatgctaatgtgacatgagcagacatgttgtatgggttcacaatattaattagcattaaccatagtcaagtaagcttcaagtccacgaaaacagcatgaaatgttggtgtcctgacctaagagaataatgtctaaaatgccaagagaaggatggaaaatatgtaacacctcattaaatatagtgttacyacactgtaattttttttctgtaactctgaatcagagcatccaataaattttacacgggacgaatgtacttctataaaaacaatgttctttcctgttccagaggatgctgataaaatgtaagggatgtggaacgtaagaaatgaaatacagtaacagctaccacagggaagtgctgcctttggcttggacccatggatagagcactggaacagaagtctggggtttcagcctgtctttatccatagataaaggatgagcagataaaagatgsttagttcctctcatgagcttcttatttcataatacaatgtcagtaacatggagcattattgtaaagactatgttagaaaaaggaagcaagacttccaatgtggtgcctgacatctggtgcttaatgaggttggctttattcwctccctggccttaacctgcaaaaccaggataataatgcttattgcatcccctccccatctgtccagccagcgatcctacagggaatcatccttcccccaccttttttttttaacttttattttagtttcaggggtacatgtgcaggtttgttatataagtaaattgtgtgttgccagggtttggtgtaaagattatttcaccagccaagtaataagcacagtacctgataggtagtgtttttgattctcatcctcctcctagtctcttkccctcaggtaggctccagtgtctgttgttcacttctttgtgtccatgtgtrcacaatgtttagcttccacttataagtgagaacatggtatttggcttttttgttcctgtgctagttcacttaggataatgatctccagctccatccatgttgctgcaaaggacatgatctcattctttttttatggctgtgtagtattccattgtgtatatgtcacacattttgtttacccagtctaccattgatgggcatttaggttgattccacatctttggtattgggaatagtgctgcaatgaacatacaagtgcatgtatctttatggtagaatgatttatattcctttgggtatataccctataatgagattgctgggttgaatggtaattctgctttgagatctttgagaaatcaccaaactgctttccacaatgtgtgaaataatttacattcccaccagctgtgtataagtgtttccatttccctgcaccctcactagaatctgttatttattgactttttgataatagtcattctgactggtgtgagatggtatctcattgtggttttgatttgcatttctctaatgattagagacactgaacattttttcatatgcttgttggctgcgtgtgtgtcttcatttgaaaagtgcctgttcatgttctttgcccatgttttaatggggttgtatgttttatgcttattgatttaarctccttatagattctgatgcatagtttgcaaatattttctcccattctgtaggttgtctgtttagtctgttgatagtttcttttgctgtgaagaagctcttaaatttaattaggtcacatttgtcaattttttttttttgttgcaatagcttttggcatctttgtcataagatctttgccaggtcctatttccagaatggtacttcctaggttaccatctgggtttttatagttttaggttttacatttaagtctttattccatcttgagttggtttttgtatatggtaataggcaggggtccagtttcaatcttctgcatatggctagctagttatcccagaaccrtttattaaatagggagtcctttctttgttgcttgtttttgtgactttgttgaagatcagatgcttgtaggtgtgctgcgttatttctcagctctcaattctcttttattggtctgtgtatatgtttttgtagtggtaccgtgctgttttggttactgtagacttatagtacagtctgaaattgagaaatgtgatgcctctagtttactctttttttcttaggtttgccttggctatttgagctcttttttggttccatatgaatttcaaaatagttttttctaattatatgaagaatgtcattggtagtttgataggaatagcattgaatctgtaaattgctttgggcaatatggccattttaatgatattgattcttcctatccatgcacatgggatgtttttccatttgtttatgtcacctctgatttctttgaacagtgttttataattctcattgtagaaatctttcaccaccctggttagctatatttctaggttttgtctgtgtgtgtgtgtgtgtgtgtgtgtgtgtgtgtgtgtatgtgtgtgtgtggctattgtgaatgggattgt

SEQ ID NO: 1663 - DNA, 201 bp, Homo sapiens
attgaagtggggggatggggaattacggacaaaccccaactgcggcactcaggcagtggctctttctcctgtgggcagagggcagtcatcaaaggttctgyttctcagggagagtgtccaggtgcgtctgaaggatggagtggttatgaaggcaggagaatgctgtaggggccactgctgtcattgggcatagtggaggcc

SEQ ID NO: 1664 - DNA, 201 bp, Homo sapiens
tggttaggtgtacacaggggccagactgcctgggtgcaagtcccagccctgctgtttatctcagtgtggccttggttgggctgccagatttagcaaataamaatataggaccccccgttaaatttgaatttcagataaaccaccagtaacatcttatgaatgtaagtatgttccatgcaatatttgggacatacttgtact

SEQ ID NO: 1665 - DNA, 201 bp, Homo sapiens
gctacagggatgggaatgagatcctacctcagtgagcagaacgtaccctctgggccttgccttgtagggtcaatttgggcctgggacctgtcattctggamagcaatggacagcagaggccaagtgctggacattggaacagacagtgtgatcctgggcaacatccttcacttctgtggatcttgtgtcacatttggaaaa

SEQ ID NO: 1666 - DNA, 201 bp, Homo sapiens
aggtgagaagcccagggtttatgggtgggctttccccagttgcacgggaggccttaaaacaggtgaagaccctaaggaccgacggggagccaggcgggggrccaaggcgaagcagggtgaggcagaggtgttacagcatccatggcaggccaggggccaggttatgatcccattggagagacaggtgggagtgacccagaa

SEQ ID NO: 1667 - DNA, 201 bp, Homo sapiens
ggcgccagcttcccgccccctctgccccgccctgagcatctgctctgcgccctccgctgcaaccctttatcctccgcctggattgcgggtctgggtgcggkgtgttgcaggcttgcaggggacggggtagggggtggttgtgccaggctgcgaggggcccgggtcatggggttgctaactctgggaggagatgcgcccaag

SEQ ID NO: 1668 - DNA, 201 bp, Homo sapiens
ttcaagaccagcctggccaacatggtaaaatcccatctctactgaaaatacaaaaattagcccagtgtggtggtgcgcacctgtagtcccagctactccaraggctgaggcaggagaattgcttgaacctgggagccagaggttgcagtgagctgatactgtgccactgcactccagcctgggtgacagagcaagactctg

SEQ ID NO: 1669 - DNA, 201 bp, Homo sapiens
gcatcctctcccccagcagccagtcactgggagccttctgggcccagccccacgcttgccataagggggaaccagagatggcagtgtggacccaaacttaraggagccagggcacccaggtaattccaggacaaagcagtctgtgctgtgccagcactaatccagctgaggcaatcaggagaggcttcctgtaggtggtgt

SEQ ID NO: 1670 - DNA, 201 bp, Homo sapiens
gaccgtggcgccagcttcccgccccctctgccccgccctgagcatctgctctgcgccctccgctgcaaccctttatcctccgcctggattgcgggtctggstgcggggtgttgcaggcttgcaggggacggggtagggggtggttgtgccaggctgcgaggggcccgggtcatggggttgctaactctgggaggagatgcg

SEQ ID NO: 1671 - DNA, 201 bp, Homo sapiens
gcacaaagaggattcccctcaaacacagaaaattattcctaatatctgcctcctggggacagagaacttccaggtgggaagccgagcatgaggctaagcaygttccctgaaggggaggctgaacccggcctccagcagaagttaatggaactgagactggggctgtcgtggggctggaagccaaggcaaatctctggaccc

SEQ ID NO: 1672 - DNA, 201 bp, Homo sapiens
cctaacagcagcaatcttacgccattatcagcgacatggcatcctctcccccagcagccagtcactgggagccttctgggcccagccccacgcttgccatragggggaaccagagatggcagtgtggacccaaacttaaaggagccagggcacccaggtaattccaggacaaagcagtctgtgctgtgccagcactaatcc

SEQ ID NO: 1673 - DNA, 201 bp, Homo sapiens
agggtccaaggcttgagtcccctaattcggctcggcgctgacctgtaaaactccccttggtcggactgcgcgcttagggcctctcgcgcctgccagcctcygctctgcgggcattcctcctagcaccgggagcgcgcggctgctcgccctcgccgcgaccgtggcgccagcttcccgccccctctgccccgccctgagcat

SEQ ID NO: 1674 - DNA, 201 bp, Homo sapiens
cttcatggaggaagaggacaagcagggccagaaatgatgaggacatttctgtcctcatgtatctggggagaaggaagcatattgtctttttttttttttcyttttttgagacagagtctcactctgtctcccaggctggagtgcagtggtgcaatcacagctctctgcagcctccaactcttggtctcaagcgatccagcc

SEQ ID NO: 1675 - DNA, 201 bp, Homo sapiens
ggcacacacgtgacccaggagaatcgcgatgcagcagagtcaccagcagtaccagcaggcccaggacctgtgggccctgagcaagccattgaggcagccayctggttttcccatctccccggacccacgaggacccaaaggccctcaccttaaatgaacaatccactcttcccccaagttccgatgtgacatgagaattat

SEQ ID NO: 1676 - DNA, 201 bp, Homo sapiens
ccttcatggaggaagaggacaagcagggccagaaatgatgaggacatttctgtcctcatgtatctggggagaaggaagcatattgtctttttttttttttytttttttgagacagagtctcactctgtctcccaggctggagtgcagtggtgcaatcacagctctctgcagcctccaactcttggtctcaagcgatccagc

SEQ ID NO: 1677 - DNA, 201 bp, Homo sapiens
gtgggcagatcacttgaggtcagaagtttgagaccagcctgggcaacatgatgaaattccatctctgctaaaaatacaaaaattagccaagcatggtggcmagcacctgtaatcccagctgcttgagaggctgaggcaggagaatcacttgaacctgggaggcagaggttgcagtgagctgaggtcacaccactgcgctcc

SEQ ID NO: 1678 - DNA, 201 bp, Homo sapiens
ctacagaatgggcaaaagctgaaagtgttccccttgaaaaccagcacaggaaaaggatgccctctctcaccactcctattcaccatagtgttggaggttcyggccaggacaatcaggcaagagaaagaaataaaggatattcaaataggaagagaggaagttgaactgtttgcagatgacatgatcctatatctagaaaac

SEQ ID NO: 1679 - DNA, 201 bp, Homo sapiens
catatttgcactaaaagttgatgtgcaaaaactcattcatttcacgtctcatttgtcaagagacattttggtatttgtgcttaaaaataaacatggactgsattagcagagcagagcaggcgcaggaggctgggccccgtcttagctgtgttcataaatctggctcctaattaatctgaatgctgacccatttttcgtgaa

SEQ ID NO: 1680 - DNA, 201 bp, Homo sapiens
tgtaaaagctctaaatgccccaattaaaagacatagaatggcaggctgataaagagtcaggacccattggtgtgctgtattcaagagacccacttacatgygaagacacacataagctcaaaataaagggatagaggaaaatttaccaagcaaatggaaagcagaaaaaagcaggggttgcaattctagtttctgacaaaa

SEQ ID NO: 1681 - DNA, 201 bp, Homo sapiens
gcgtgagtggccccagcctggggaagcctcactgttcctggtctgctgtgagctcctaggttcttgagactcaggtgttaaccttgcctgttttctcatcycctgcaggcaccggccgtagctacaccacagacccactcttgtccctgctcctgttagctctgcataagttcctgcgcctgctcttgggacattgacaga

SEQ ID NO: 1682 - DNA, 201 bp, Homo sapiens; identical to SEQ ID NO: 257

SEQ ID NO: 1683 - DNA, 201 bp, Homo sapiens
taccacctacccactgtgtgaccttagtcaagtcacccaacctctctgggcctcacctatgaacgggaaagtggtttctacctcctaaggctgctgagagrgataaaggggaaaattctcttgcaggggccgagtgcagctgctggcactgagaattgtgtgcctttttacagcccacaggctcaaaggttagcaatccag

SEQ ID NO: 1684 - DNA, 201 bp, Homo sapiens
agaggacacaaacaaatggaaaaacattccatgctcatggataggaagaatcaatgttgtgaaaatggccatactacccaaagcaatttatagattcaatkccattcccattaaactaccattgacatgcttcacagaatcataaaaaaaacttttaaaattcatatggagcccaaaaagagtccatatagccaagacaat

SEQ ID NO: 1685 - DNA, 201 bp, Homo sapiens
attcataggtaccaaggagtcactggagataaccttctaccacctacccactgtgtgaccttagtcaagtcacccaacctctctgggcctcacctatgaamgggaaagtggtttctacctcctaaggctgctgagagagataaaggggaaaattctcttgcaggggccgagtgcagctgctggcactgagaattgtgtgcc

SEQ ID NO: 1686 - DNA, 201 bp, Homo sapiens
ttgcttaatctggacccctgcccagtgagacatgccatgcacatattaattttatggagccatgcacatcccattttatgaggtaaagaatgttgccccgsgtcacatagcaagctggaaacaggactaggcttggaagcccatctctccagtgccagcccactgcaccatcccacttctcttggttccctcccaccccaa

SEQ ID NO: 1687 - DNA, 201 bp, Homo sapiens
ttctagcttggaaaattttcctcttgagagaaggaaatccgcaacctgagaaagattattctccagcccttttaaagaagaagctatgtcacccttttctrtaacatctatttgcatggcacttgactctgtttgaggcgctgttgtttacatgtttgtattgttagcttttgatacataatgaaggaccccaaaactcaa

SEQ ID NO: 1688 - DNA, 201 bp, Homo sapiens
gagaggctggtgtttgcagcactggacagctgtgtctccaggggagaagtggggagaaggtagaaagctctctcaccatgtcatatagccagagagcctcytggggtaggtctagactgagaggaggtgcccgaagtccccatcactggggcctttacagagatagagtgagagagagagtgagagccacctatgtcaggg

SEQ ID NO: 1689 - DNA, 201 bp, Homo sapiens
aaaataaccaaccagcatcatgatgacaggatcaaatgcacacataacaatattaaccttaaatgtaaaagctctaaatgccccaattaaaagacatagamtggcaggctgataaagagtcaggacccattggtgtgctgtattcaagagacccacttacatgcgaagacacacataagctcaaaataaagggatagagga

SEQ ID NO: 1690 - DNA, 201 bp, Homo sapiens
aggtagtaaaaggttgcaaatcctaggtccttcttttgccaaagatccagggatgtctcaaaataagtggttgaggaatcctgcataggcaactggggtawccaggttctctcactggtactgacgtcgttggcaagacccatggagagcaaggaaaagcagggtggtgcggtggcccacctgggagccgcatggggcaag

SEQ ID NO: 1691 - DNA, 201 bp, Homo sapiens
ccttctggccgcctcgggtcccgcagctccctcccttagcaagccgcggcggccgcgcatgtggggccgcgcaagtagggcagcgatcgcagccttgcatyggtggctgctcggcgtgtccgggcgccatctgtcgccggttgcagggtcgggttctcttttgtgtaaatcaagggtccaaggcttgagtcccctaattcg

SEQ ID NO: 1692 - DNA, 201 bp, Homo sapiens
aaaagaatttccaacacagaatatcatatccagccaaactaaactttataagcgaagaagaaataaaatcttttcagacaagcaaatgctaagggaatttrtcaccactaggcctgccttgcaagagctcctgaaggaagcactaaatatggaaaggaaaaacttttgccagccactgcaaaaacacactgaagtacaaag

SEQ ID NO: 1693 - DNA, 201 bp, Homo sapiens
ggctggatgtggcaagctgctgctgggtgcccacacggagaactggctctcaatatttcaattaataatgagagaaagacagccaaggccatgggtatgayggctgtagagaggctgtggctgctgggagccgtcaaaggggagcatccgcggatgtcgccatggcaaccgtaaaccgtgaccaaagggggccgtgggcaa

SEQ ID NO: 1694 - DNA, 201 bp, Homo sapiens
gctggcgctcagcgtgccgggcgcccggagcaaggtaacccgccgcccacgcggtaccggcgcgcgcccggctcgcgcccggggcggcgaaggctaacccrgggagggaagcagcgggcttcactcgcgcagggcgccgccctgtggcgcagcccatcttccaccttcgcatcccaaagcatcttcaaagtcagcagtggt

SEQ ID NO: 1695 - DNA, 201 bp, Homo sapiens
atggaaaaggcaccgcagtaaagtctagcgcggcctcaaaagaatccagtttgcaactgaatggctggtgtgttggccagaggttcccctctgcagggacsttgggatcagagcagtggcgtgtgaacctctaattagcctcagggctctggctccaaggaaaggcaccatggcccccacagagagccggctggatgtggc

SEQ ID NO: 1696 - DNA, 201 bp, Homo sapiens
gctcaccctcctgttagccatttcccctgccgctgcataccctgagggcttggagttccatgcacaagtgcatccacctttaaacacctcatgcagattayttctgtctcacctgcacctgccttcatgtcaggatttgcagaagcctaaagatcagagccaggggccaggcacaatggctcatacctgtaatcccagcac

SEQ ID NO: 1697 - DNA, 201 bp, Homo sapiens
agatctgtgaggcccatgggaccagtctggctgtgggtgaagtacccaggaggcagtaccctgctctcctggctggatccccactttccacacacccgagmctcagggaactccacccaggcacgtgggcatccatcagctcgtccatcacatccgcctgtcgtccttcccagtaatgcctgacagcaaagaatgagagca

SEQ ID NO: 1698 - DNA, 201 bp, Homo sapiens
aaagtgtatggtctgtaaattacaaactgcagcaacaaaatgcttaatcattaaaccaaggcagccactatgcaccagcctccagctgggtgctaagcgtragtggccccagcctggggaagcctcactgttcctggtctgctgtgagctcctaggttcttgagactcaggtgttaaccttgcctgttttctcatcccctg

SEQ ID NO: 1699 - DNA, 201 bp, Homo sapiens
cgcgacggccagggtggccagaagagtaggtttgggagctgcccagcccggcctctaaccctgctctcttgcagaccgtacgcgtccagggcaatgacatytcacaccggcttcggctgtctgccgtgcggctgcaggacgagggcgtgtacgagtgccgcgtgtcggactacagcgacgacgacacgcaggagcacaagg

SEQ ID NO: 1700 - DNA, 201 bp, Homo sapiens
aagatacatgcacacacgtgttcactgcagcactattcacaatagcaaagacatggaatcaacccaaacgcccatcaaccatagactggataaagcaaatrtggtgtgtatacaccatagaatactatgcacccataaaaaggaatgagatcatgtcctttacacggacatggatggagctggaagccattatcctcagga

SEQ ID NO: 1701 - DNA, 201 bp, Homo sapiens
ccagagattgctaataaaggtgccacttggcaccgaggctagtgagaagaatgcaggacagagataccacctctgggatgtgctgggagtgtaagcaggckgccggccaggccaggaagccagggcccctcctgcctgtctccacccctcacgcccatgtgagcctgcctccctcccagcacagacagcccactgcagact

SEQ ID NO: 1702 - DNA, 201 bp, Homo sapiens
gggcgcccggagcaaggtaacccgccgcccacgcggtaccggcgcgcgcccggctcgcgcccggggcggcgaaggctaacccagggagggaagcagcgggyttcactcgcgcagggcgccgccctgtggcgcagcccatcttccaccttcgcatcccaaagcatcttcaaagtcagcagtggttacccccaaacctgtcaa

SEQ ID NO: 1703 - DNA, 201 bp, Homo sapiens
gcccagagattgctaataaaggtgccacttggcaccgaggctagtgagaagaatgcaggacagagataccacctctgggatgtgctgggagtgtaagcagrctgccggccaggccaggaagccagggcccctcctgcctgtctccacccctcacgcccatgtgagcctgcctccctcccagcacagacagcccactgcaga

SEQ ID NO: 1704 - DNA, 201 bp, Homo sapiens
gcgttcctgcattttgcttttcatgttcacatccaccccagcttccctttccgtggctcactgtgcccagagattgctaataaaggtgccacttggcaccraggctagtgagaagaatgcaggacagagataccacctctgggatgtgctgggagtgtaagcaggctgccggccaggccaggaagccagggcccctcctgc

SEQ ID NO: 1705 - DNA, 201 bp, Homo sapiens
cccacagggatgggccttttggggactcacgccaccgttacaggctcaggacatgtgctggttcttccacttgcgttcctgcattttgcttttcatgttcrcatccaccccagcttccctttccgtggctcactgtgcccagagattgctaataaaggtgccacttggcaccgaggctagtgagaagaatgcaggacagag

SEQ ID NO: 1706 - DNA, 201 bp, Homo sapiens
gcagaaggatcgcttgagcccaggcattcaagaccagcctgggcaacagcaagaccccatctctacaaaaaacattttaaaaattagctgggtatggtggygcatgcctgtagtctcagctacttagaaggctgagacacgaagatggcttgagcccaggggttcaagaccaacctgggcaacagagcaagaactcacctc

SEQ ID NO: 1707 - DNA, 201 bp, Homo sapiens
agtagatagattcagagctgtattggagtcaacttgtgggggcctctgagatgggccagagaagatgggtgagcttgaaagagccagagaggaacaggaarggaatctagcaaagggaacagactgagcaaaggcctgaattcaggagagcctgggtgcatgcagcccccagcgcaagagccccatttacctggagctcaa

SEQ ID NO: 1708 - DNA, 201 bp, Homo sapiens
gaagagttaggtcttcagcctgagacagagactcctgggaacttggggagcaggaggaaattgtgctttgcatgtgaaaagagtactctgggtcgggcacrgtggctcacacctgcaatcccagcactttgggaggccgaggcggttagatcacctgaggtcaggagtttgagaccagcctggccaacatggtgaaacccc

SEQ ID NO: 1709 - DNA, 201 bp, Homo sapiens
ggatgaattggagaattaatagatgggtggaaggaaggatgaatggatgggataatgaatggatggaataataaatggatgggataataaatggatgggtrgacagaaaatgagtggatgggtagatgggtacatagaagggagaataaatgggtgggtagaaggatgataagttgatgggtagttgggtggatgggtaga

SEQ ID NO: 1710 - DNA, 201 bp, Homo sapiens
aggggagggatagcattaggagaaatacctaatgtaggtgactggttgatgggtgtagcaaactaccatggtacgtgtatacctatgtaacaaagctgcayattctgcacatgtatcccagaaccttaagtataataatattttaaataaataagtaggtggttgaagagatagtttgccttgctggttctagcttggaaa

SEQ ID NO: 1711 - DNA, 201 bp, Homo sapiens
ttctcagcaaactaacacaggaacagaaaaccaaacaccacatgttgtcattcataagtgggagttgaacaatgagaacacatggacacgggaggggaacrtcacacactggggcctattgggggttgaaaggctaggggagggatagcattaggagaaatacctaatgtaggtgactggttgatgggtgtagcaaactac

SEQ ID NO: 1712 - DNA, 201 bp, Homo sapiens
aaaaagatgagttcatgtcctttgcagggacatgaatgaagctggaaatcaccattctcagcaaactaacacaggaacagaaaaccaaacaccacatgttstcattcataagtgggagttgaacaatgagaacacatggacacgggaggggaacgtcacacactggggcctattgggggttgaaaggctaggggagggata

SEQ ID NO: 1713 - DNA, 201 bp, Homo sapiens
caaacgcccatcaaccatagactggataaagcaaatgtggtgtgtatacaccatagaatactatgcacccataaaaaggaatgagatcatgtcctttacasggacatggatggagctggaagccattatcctcaggaaactaatgcaagaacagaaaaccaaacaccacatgttattattaataagtagcagctgaacaat

SEQ ID NO: 1714 - DNA, 201 bp, Homo sapiens
tgtcctctaacgtgacgactcgcagcgttcacatcagcaagtgttcttccagcctaggtcgctgagtgactgcgatgaacacagcctttcctgtggccagygctggatcctgcggccccatgagaagtctgccattgccgcttcacccactcatcttcgggcattatcgcagcataagccagcctgtcctgattggctcag

SEQ ID NO: 1715 - DNA, 201 bp, Homo sapiens
ggctggtgtaatgggcacaggggaggaactgctgtgataggcacaggggaatgggcaggtgagataggtagaggggaggggcaggtgtgatgcctacagcrgaggggacaggtgtgatgggcactgaggaggggctggtgtaatgggcacagggaagggactgctatgatgggcacaggagaggggcaggtgtgataggca

SEQ ID NO: 1716 - DNA, 201 bp, Homo sapiens
cttgatagatgagccacagtgagccagggggtgggagtgactcctgggccatagacgaggaaactgaaaggcaggcactggaggcaagaagggctggcccsgggcacccgctggcgaggacagccttggagagggcctgcagctcctcccctctgagctgtgctgcgctggccgcctggaccagggtggctgctggagagt

SEQ ID NO: 1717 - DNA, 201 bp, Homo sapiens
aaattacttccagataattccctctagctacagggattctcccacgggcatcgctggtctccagcattagcctctgcttggatctggcatcaggaaaggaractgctacctctccaggtgggccactgcgcagtgggctagctctttcttcagaaccctgcttggaatcagtccccaaatgagcctgctttcctggaaccc

SEQ ID NO: 1718 - DNA, 201 bp, Homo sapiens
gacgttgaggtgcagtgagctaagatcgtgccactgcactccagcctggacaacagaaaaagaccgtgtcaaaaaaaaaaaaaaaaaaaaccatagtgaargtgggtcagctgctctcatcacagtctacaaggcagggcagaaaacagatagaccaagctgaacagacaggaaagagactacaagtctagctcaggctgc

SEQ ID NO: 1719 - DNA, 201 bp, Homo sapiens
cagcaaacagccatttgtgagctgctgagctcctggctaaagggacttctgcccctgccagccaggggaacagtttttttgttttgtttttttttttttttgagatggagtctcactctgtcgcccaggttggagtacagtggcgtgatctcggctcactgcaacctctgcctctgggttcaagcaattctcttgccttgg

SEQ ID NO: 1720 - DNA, 201 bp, Homo sapiens
tggccccatcaaccacattacaagaggatctgcctccaggtctctgtgcacagcgaccccacaggcattttatagctgtggatggagggaggggaaaaccrtgttagttcccattgatgattaatcaggactagaaacaaaatgatcatgaaatactctcaagtccatagcttcacataaccacgattcactgcaaacagg

SEQ ID NO: 1721 - DNA, 201 bp, Homo sapiens
gggcagtctttttaaatagcgctttttaaagtgcctctgagagtccagtgaatccatccacaaaatggtattgacaagcaccccagctcacagccctatawtaacagctcatgataggtaatgagtgagagccccgaggctgggcacacagtagccaggccctggcagaagcaagccccccgggcacagccaactgggcag

SEQ ID NO: 1722 - DNA, 201 bp, Homo sapiens
aaaagaaagaaagaaagaaaagaaaagaaagaggctcaggacactggccatttcagattggcaacagcaggggcggtcccagtacatctccccaaatagtsccccattaagcgatcgttcctggaaggaagtcagaaaaaaagtccctattttttaagtgagccactttggtaatgccacgaaggagagaggggggacttc

SEQ ID NO: 1723 - DNA, 201 bp, Homo sapiens
ttcctataagctgtcgggtacacagagtgtgctgggattattgatagaaaactttatggatgggctgcatcttaaaatcaaaatacattacccaaaatcartgttgccgtacatggtacagggaggacaagaaaggtcatccgagacaagaatactgaaacccaactccaagaggacctgagcattaaaataaataaattt

SEQ ID NO: 1724 - DNA, 201 bp, Homo sapiens
ccatccctcctcacctggtggggcctccctgcaggaatttcagcaactacagccaggcgtatagggacagagctctgatctccctgggactgagcccctcrggggaggggtgtctgcggtcttcacagatcagcagacttagtcttttcccctgctggctctgaggaatctgggcagtctggacaagtgagatccccccca

SEQ ID NO: 1725 - DNA, 201 bp, Homo sapiens
cgtgtgaatgactaaactggccaaaaataaaagcccccataaatctcctattttcctataagctgtcgggtacacagagtgtgctgggattattgatagamaactttatggatgggctgcatcttaaaatcaaaatacattacccaaaatcaatgttgccgtacatggtacagggaggacaagaaaggtcatccgagacaa

SEQ ID NO: 1726 - DNA, 201 bp, Homo sapiens
gcactgtttgcaaacccctgaccccagatgcagctcccaggccaccagcaggtttgcaggggcaagggacctagccaggcccaaaggatctcagccccagyggagagggctgcagctctcttctaagccacggccagaaaacaagggccacagactacagctggggcccatattaccccaaaggcagagggaagccatcca

SEQ ID NO: 1727 - DNA, 201 bp, Homo sapiens
tgtaacaaagctgcatattctgcacatgtatcccagaaccttaagtataataatattttaaataaataagtaggtggttgaagagatagtttgccttgctkgttctagcttggaaaattttcctcttgagagaaggaaatccgcaacctgagaaagattattctccagcccttttaaagaagaagctatgtcacccttttc

SEQ ID NO: 1728 - DNA, 201 bp, Homo sapiens
cctcatggtagaatatccaagcttgctgttggaatggctttgtctgaagacgacaatgtcttcccttgaactagctcttctctagtggctgcctgtactcrgtgtgtgaatattctatgcaatactggacaaagcaagtgaaagacagaagcactacagcgtcagcctatgaaatgagcctccacttagccaggctgcaag

SEQ ID NO: 1729 - DNA, 201 bp, Homo sapiens
gatgggttgatggatgtctgaatggggtgataaaaacaagtagctggtgggtgagtgaagggaaggatgtgtgaatggatgggggatgaatgggaggaagratgaatagatgggtggatgatggaagaatgaatggatgggtagaaggaagaatgagtggatgagtggatgaattggagaattaatagatgggtggaagga

SEQ ID NO: 1730 - DNA, 201 bp, Homo sapiens
agcatcaaccaaaaaagtccctgcaagaaaaccccatccaaaggccagcagcctcaaagattgaagctacataaactcacaaagatgagaatcaatgaaaraacactgaaaactcagaacgccagagtgcctcttctcctccaaatgattgcaacatctctccaacaagagcacagaatggggcagaggctgagatggatg

SEQ ID NO: 1731 - DNA, 201 bp, Homo sapiens
tctggttgcaatgtggagattggagaggtgggatgaatttgatagatggggaagaccacttaggaggcagtgatccagtcaagagatgatggggcttggamtcattggatggatgggttgatggatgtctgaatggggtgataaaaacaagtagctggtgggtgagtgaagggaaggatgtgtgaatggatgggggatgaa

SEQ ID NO: 1732 - DNA, 201 bp, Homo sapiens
ttataaagatacatgcacacacgtgttcactgcagcactattcacaatagcaaagacatggaatcaacccaaacgcccatcaaccatagactggataaagmaaatgtggtgtgtatacaccatagaatactatgcacccataaaaaggaatgagatcatgtcctttacacggacatggatggagctggaagccattatcct

SEQ ID NO: 1733 - DNA, 201 bp, Homo sapiens
agaaagaaataaaggatattcaaataggaagagaggaagttgaactgtttgcagatgacatgatcctatatctagaaaaccccattgtctcagccaaaaarcaacttaagctgataagcaacttcagcactctcaggatacaaaatcattgtgcaaaaatcacgagtattcctgtgatagacaagcaacaatagacaaaaa

SEQ ID NO: 1734 - DNA, 201 bp, Homo sapiens
taatcccagcactttgggaggccgaggcaggtggatcacctgaggtcaggagttcgagacaagcctggccaacatggtgaaaccccgtgtctactaaaaayacaaaaaattagctgggcttggtgtggggtgcctgtaatcccagctacttgggaggctgaggcaggagaattgcttgaacccaggagatggagtttgcag

SEQ ID NO: 1735 - DNA, 201 bp, Homo sapiens
ggtgatgagttgataggtgcagcaaaccaccatggcacatgtttacctatgtaacaaacctgcacatcatgcacaagtgtcccaatacttgaaataaaaawttttttaaaaagaaacataaaaataaaaccacaatgagataccatctcatgccagttagaatggcaatcattaaaaagtcaggaaacaacagatgctgga

SEQ ID NO: 1736 - DNA, 201 bp, Homo sapiens
agagtgaacagacaacctatagaatgggagaaaattttgcaatctatccatctgacaaaggtctgatatccagaaactacaaggaacttaaacaaatttacaagaaaaaaacaacctcatgaaagactgggcaaaggacatgaacagacacttctcaaaagaaaacatttatgcagccaacaaacatgtatatatatgtat

SEQ ID NO: 1737 - DNA, 201 bp, Homo sapiens
aacaggggtcaccatacaggagtgttcatgctggcatcaggttggtgcccttccaggatggagatcccagaggaaggagcaggcagccatctttgctgttmtgtagcctccactgatgacacctccaggtatgggagaaaccccagtgaatagggtctggagtggacccccagcaaaccacagaagccctacagaagcggg

SEQ ID NO: 1738 - DNA, 201 bp, Homo sapiens
actatcatcagagtgaacagacaacctatagaatgggagaaaattttgcaatctatccatctgacaaaggtctgatatccagaaactacaaggaacttaarcaaatttacaagaaaaaaacaacctcatgaaagactgggcaaaggacatgaacagacacttctcaaaagaaaacatttatgcagccaacaaacatgtata

SEQ ID NO: 1739 - DNA, 201 bp, Homo sapiens
agctcaggacgttgaggtgcagtgagctaagatcgtgccactgcactccagcctggacaacagaaaaagaccgtgtcaaaaaaaaaaaaaaaaaaaaccayagtgaaggtgggtcagctgctctcatcacagtctacaaggcagggcagaaaacagatagaccaagctgaacagacaggaaagagactacaagtctagctc

SEQ ID NO: 1740 - DNA, 201 bp, Homo sapiens
ggtccttcttttgccaaagatccagggatgtctcaaaataagtggttgaggaatcctgcataggcaactggggtaaccaggttctctcactggtactgacktcgttggcaagacccatggagagcaaggaaaagcagggtggtgcggtggcccacctgggagccgcatggggcaagggaagcacctaccaccagccaaggg

SEQ ID NO: 1741 - DNA, 201 bp, Homo sapiens
cctgaatagaccagtaataagttttgaaattgaggcagtaataaatagcctaccaaccaacaaaagcctgggaccagatggatttacagctgaattctacyagaggtacaaagaggagctgttaccatttcttcttaaactattccaaacaattgaaaaggagggacttctccctaactcattttgtgaggccagcatcat

SEQ ID NO: 1742 - DNA, 201 bp, Homo sapiens
attagaactcaaaattaagaaactcactcaaaaccacacgaccatatgaaaatggaacaactagctcctgaatgactcctgagtagataatgaaattaagrcagaaatcaagaagttatttgaaatcagtgagaacagggacaatgtaccaaaatttctgggacacaactgaagcagtgttaagagggaaaattatagcac

SEQ ID NO: 1743 - DNA, 201 bp, Homo sapiens
accaaccagcatcatgatgacaggatcaaatgcacacataacaatattaaccttaaatgtaaaagctctaaatgccccaattaaaagacatagaatggcargctgataaagagtcaggacccattggtgtgctgtattcaagagacccacttacatgcgaagacacacataagctcaaaataaagggatagaggaaaattt

SEQ ID NO: 1744 - DNA, 201 bp, Homo sapiens
tgcagtgagctgatactgtgccactgcactccagcctgggtgacagagcaagactctgtctcaaaaaaaaaaaagaaagaaagaaagaaagaaaatatagmcaattttgactacattataacaaagagcactcgtttaccaaaaaccatcacaaagaaagtgaaaagagacttacaaaatacacccaagaaaggattacta

SEQ ID NO: 1745 - DNA, 201 bp, Homo sapiens
tcttaaaagaatttccaacacagaatatcatatccagccaaactaaactttataagcgaagaagaaataaaatcttttcagacaagcaaatgctaagggamtttatcaccactaggcctgccttgcaagagctcctgaaggaagcactaaatatggaaaggaaaaacttttgccagccactgcaaaaacacactgaagtac

SEQ ID NO: 1746 - DNA, 201 bp, Homo sapiens
atatttcaagtcacagaaaacatgacttcacaccaagcctaacttgccaccaactagcaaagacccaacaaagatcacatgtgttccctgtacctgattgyttaaaagggagaaatggtaagtggactcttagtagaaagcatatatggtctcgtttagattttgaagttagaaaagattttttaaatgagactgaaaaag

SEQ ID NO: 1747 - DNA, 201 bp, Homo sapiens
acttgacaatacaatcacaaatatcaatagccgaattgaccaagtgggggaaagaatttcagagcttgaagactatctcactgaaataagaccagcagacmagattagagaaaaaagaatgaaaaggaatgaacaaaacctccaagaactatgggattatgtagaaagaccaaacctacaactgattgaagtgcctgaaag

SEQ ID NO: 1748 - DNA, 201 bp, Homo sapiens
agcagcctgctgctttagaacaccatttctttccttctcactaaggctgcagcagcaggagtggtgcagcactggtgaaacctcagccaactgggcgcccrgtctccccagaatggagctgctgcccctcagggctccctgccttcatcagccaagaagagcctgcacaccctaccacagcataaatacaccttttacctc

SEQ ID NO: 1749 - DNA, 201 bp, Homo sapiens
accagtttagagaggaaccgaaatgacctgatggagctgagaaacacaacataagaacttgacaatacaatcacaaatatcaatagccgaattgaccaagygggggaaagaatttcagagcttgaagactatctcactgaaataagaccagcagaccagattagagaaaaaagaatgaaaaggaatgaacaaaacctccaa

SEQ ID NO: 1750 - DNA, 201 bp, Homo sapiens
ccttcttttgccaaagatccagggatgtctcaaaataagtggttgaggaatcctgcataggcaactggggtaaccaggttctctcactggtactgacgtcrttggcaagacccatggagagcaaggaaaagcagggtggtgcggtggcccacctgggagccgcatggggcaagggaagcacctaccaccagccaagggagt

SEQ ID NO: 1751 - DNA, 201 bp, Homo sapiens
agcctgggcaacatagcaagattccattattaccaaaaaattttaaaattatctgggcatggtggcatgtgcctgtagtcccagctactcaggaggctgargcaggagaatcacttgagcctgggagttggctgcagtgagctatgattgcaccactgtactccagcctgggtgacagaatgagaccctgtcaatcaatca

SEQ ID NO: 1752 - DNA, 201 bp, Homo sapiens
taaagatctgttataagccaggagtggtggttctgacctataatcccaacactttgggaggccaaggcgggaggatcacttgaggccaggatttgaagagyagcctgggcaacatagcaagattccattattaccaaaaaattttaaaattatctgggcatggtggcatgtgcctgtagtcccagctactcaggaggctga

SEQ ID NO: 1753 - DNA, 201 bp, Homo sapiens
tcttagatgacagcaaaagagactagaaataggcttgaacatcagagctgaggggcccctatccaggaccctcagcttggctctctaacctttctagccamgaagcccttgttctgactaaagatctgttataagccaggagtggtggttctgacctataatcccaacactttgggaggccaaggcgggaggatcacttga

SEQ ID NO: 1754 - DNA, 201 bp, Homo sapiens
cctccaggtatgggagaaaccccagtgaatagggtctggagtggacccccagcaaaccacagaagccctacagaagcggggcctgactgttaaaacaaaarcaaacaaacagaaagcaacaacaacagcatcaaccaaaaaagtccctgcaagaaaaccccatccaaaggccagcagcctcaaagattgaagctacataaa

SEQ ID NO: 1755 - DNA, 201 bp, Homo sapiens
aacaagaagagctaactatcctaaatatacatgcacccaatacaggagtacccagattcataaaacaagttcttagagacctacaaagagacttagactcycacacaataatagtgggagactttaacaccccattgtcaatattagatcattgagacagaaaattaacaaggatatttaggacttgaactcagctctgga

SEQ ID NO: 1756 - DNA, 201 bp, Homo sapiens
attcatccattttgcattgctatcagggaatacctgagtctggtcatttatagagaaaagaggtttatttggctcacagttctgcaggctgtgcaagcaakgcaccagcatctacttggcttctggtgaggcttcaaggagctttaactcaaggcaggggagtagacatgtcacatggtgagagaggaagcaagagagaga

SEQ ID NO: 1757 - DNA, 201 bp, Homo sapiens
gattgtattcatccattttgcattgctatcagggaatacctgagtctggtcatttatagagaaaagaggtttatttggctcacagttctgcaggctgtgcragcaaggcaccagcatctacttggcttctggtgaggcttcaaggagctttaactcaaggcaggggagtagacatgtcacatggtgagagaggaagcaaga

SEQ ID NO: 1758 - DNA, 201 bp, Homo sapiens
ctgacccatccctcctcacctggtggggcctccctgcaggaatttcagcaactacagccaggcgtatagggacagagctctgatctccctgggactgagcycctcgggggaggggtgtctgcggtcttcacagatcagcagacttagtcttttcccctgctggctctgaggaatctgggcagtctggacaagtgagatccc

SEQ ID NO: 1759 - DNA, 201 bp, Homo sapiens
ctaatccctcagcctttagggacaggagcagcggacctcctccctctgctgggcactgggtactctggtggatgcagcctggcccagatttgctgattctygtccacgtacaaattaatgtagatatgttttttcaggcatttaagaaatcccatctccaggtgggcagataaataactctatttacattaaagactaatg

SEQ ID NO: 1760 - DNA, 201 bp, Homo sapiens
ttctcaaacctgaaaaaaaaaaaaagcagcactgtttgcaaacccctgaccccagatgcagctcccaggccaccagcaggtttgcaggggcaagggacctrgccaggcccaaaggatctcagccccagcggagagggctgcagctctcttctaagccacggccagaaaacaagggccacagactacagctggggcccatat

SEQ ID NO: 1761 - DNA, 201 bp, Homo sapiens
gctcaaaggttagcaatccagatggggcaggggcccctcaggtgaggaatgggccccacactgagggaggcagcctcgccgtccccgctggggagcccccmcccccaccccggtgctcactgcagtcgggccgcctgcggccccctctgacagcagctgcctgaccacagagtaaaggcctgtttgccattcacattaagt

SEQ ID NO: 1762 - DNA, 201 bp, Homo sapiens
agcagccttccttgagcagtcattaattgactacccactatttgcctgacccaggagatccaaggtacaccctggctccaaggttgggaagattgtagcawggaggtgaggtacccccagacaactggggtttaaatagggctagtataggagacttcaaggaggggcaggctcctctctttcaaaatatggacaggtccc

SEQ ID NO: 1763 - DNA, 201 bp, Homo sapiens
cataggtaccaaggagtcactggagataaccttctaccacctacccactgtgtgaccttagtcaagtcacccaacctctctgggcctcacctatgaacgggaaagtggtttctacctcctaaggctgctgagagagataaaggggaaaattctcttgcaggggccgagtgcagctgctggcactgagaattgtgtgccttt

SEQ ID NO: 1764 - DNA, 201 bp, Homo sapiens
agctggtgggtgagtgaagggaaggatgtgtgaatggatgggggatgaatgggaggaaggatgaatagatgggtggatgatggaagaatgaatggatgggkagaaggaagaatgagtggatgagtggatgaattggagaattaatagatgggtggaaggaaggatgaatggatgggataatgaatggatggaataataaat

SEQ ID NO: 1765 - DNA, 201 bp, Homo sapiens
aaggagccaaagtggacatttcggaagcttttccccacaaccacccgcccccacacccacctactctcccgcacccacctactctcccgcacccacctacyctcccgcacccatgggccctgctccatgcagctcagaagtaaccagcttgccagaagggccactgagagggacagagcaccccctaaaagtcccagttga

SEQ ID NO: 1766 - DNA, 201 bp, Homo sapiens
taacttgaacctgggaggcggagtttgaagtgagccgagatcgcgccattgcactccagcgtgggcaacaagactgaaactctgtctcaaaaaaaaaaaaagaaagaaagaaagaaaagaaaagaaagaggctcaggacactggccatttcagattggcaacagcaggggcggtcccagtacatctccccaaatagtcccc

SEQ ID NO: 1767 - DNA, 201 bp, Homo sapiens
agggaaggggctggtgtgataggcacaggggagaagctggtgtgatgggcacaggggaggggctggtgtgatgagcacagaggagaagtggtgtgatgggyacaagggaggggctggtgtgatgggcacaggggaggtgctggtgtgatggacacagagaggggctggtgtgatgggtacaggggagggggcaggtgtaat

SEQ ID NO: 1768 - DNA, 201 bp, Homo sapiens
ggggcagtaaggactgagccctaagccactgttaggaaggcacccagaggggaaggcttgctttcttagggagctgagaggctgggagaagggattggggrtggggggcgggatgtgagaaggcagaaggaggagaaaatgatggcttgactaccccctggtaggcagctctggggcggtaggagccattggcagaggcag

SEQ ID NO: 1769 - DNA, 201 bp, Homo sapiens
gacttccttcatgagaccgccctccctcctgcaaatgctgtgagcatgatggagctaattgtgattgtattcatccattttgcattgctatcagggaatamctgagtctggtcatttatagagaaaagaggtttatttggctcacagttctgcaggctgtgcaagcaaggcaccagcatctacttggcttctggtgaggct

SEQ ID NO: 1770 - DNA, 201 bp, Homo sapiens
gttccctgtccgaatatttgctaggctctaactatgggcaggcccagctgggagttaaagacacagagaaagccagtgtggtggctcactcctataatccyagtgctttgggaggcagaggcaggaggactgtttgaggccaggagtttgagaccagcctgcacaacacagcaagaccccatctctacaaaaaatattaaa

SEQ ID NO: 1771 - DNA, 201 bp, Homo sapiens
catggggcaagggaagcacctaccaccagccaagggagtcagtgagtgatcatgctaccttacccaggaaaccatgctatttccacagatctgtgaaaccygtgggtcaggggatctccctcatgagcccgtgccaccagggccttgggtcccaagcacgccactcagctagagactgcctaagactactgagttccgggg

SEQ ID NO: 1772 - DNA, 201 bp, Homo sapiens
ggacacagggctgcaagactcctgagctctgaaccattgctgatgtacagaccccacttactcagggtcagcctggaagccagacttccttggtctgcccygattcatttgggaaacctagattgtttatatgtctgatgaatcaggtagtaaaaggttgcaaatcctaggtccttcttttgccaaagatccagggatgtc

SEQ ID NO: 1773 - DNA, 201 bp, Homo sapiens
cagccgcttccccgaactttgctagcccctccggccgtgcgccagggagcagctgcggggtggggggcacaaggccagccagccagagaccgactgcctckctttaggttgccccaggcccccgacctacagctggtcacgcctctctctctctccccacccccagctgcattcacagaagtccccaaagatgtgacagta

SEQ ID NO: 1774 - DNA, 201 bp, Homo sapiens
tgatagatgagccacagtgagccagggggtgggagtgactcctgggccatagacgaggaaactgaaaggcaggcactggaggcaagaagggctggcccggrgcacccgctggcgaggacagccttggagagggcctgcagctcctcccctctgagctgtgctgcgctggccgcctggaccagggtggctgctggagagtgt

SEQ ID NO: 1775 - DNA, 201 bp, Homo sapiens
cttgagctcaggacgttgaggtgcagtgagctaagatcgtgccactgcactccagcctggacaacagaaaaagaccgtgtcaaaaaaaaaaaaaaaaaaaaccatagtgaaggtgggtcagctgctctcatcacagtctacaaggcagggcagaaaacagatagaccaagctgaacagacaggaaagagactacaagtcta

SEQ ID NO: 1776 - DNA, 201 bp, Homo sapiens
cctagctacttggaaggctgaggcagaaggatcgcttgagcccaggggttcaagaccagcctaggcaacatagcaacaccccatctctacaaaaaaaatayatatatattagcaaggcatggtgggctaatcctcctggtgtcagcatgataactctggaggctgaggtgcttgagctcaggacgttgaggtgcagtgagc

SEQ ID NO: 1777 - DNA, 201 bp, Homo sapiens
ccctgatgaacatcgatgcaaaaatactcaataaaatactggcacaccaaatctagaggcacatcaaaaagcttattcaccacaatcaagtcagcttcagycctgggatgcacaaaacataattctaaacagaacgaaagaccaaaaccacatgattatctcaatagacatagaaaaggccttcgataaaattcaacatcc

SEQ ID NO: 1778 - DNA, 201 bp, Homo sapiens
tagtcctagctacttggaaggctgaggcagaaggatcgcttgagcccaggggttcaagaccagcctaggcaacatagcaacaccccatctctacaaaaaawatatatatatattagcaaggcatggtgggctaatcctcctggtgtcagcatgataactctggaggctgaggtgcttgagctcaggacgttgaggtgcagt

SEQ ID NO: 1779 - DNA, 201 bp, Homo sapiens
ttctccctaactcattttgtgaggccagcatcatcctgataccaaaatctggcagagatacaaaaaaaaaaaaagaaagaaaactttaagccaatatcccygatgaacatcgatgcaaaaatactcaataaaatactggcacaccaaatctagaggcacatcaaaaagcttattcaccacaatcaagtcagcttcagtcct

SEQ ID NO: 1780 - DNA, 201 bp, Homo sapiens
aaactattccaaacaattgaaaaggagggacttctccctaactcattttgtgaggccagcatcatcctgataccaaaatctggcagagatacaaaaaaaaraaaagaaagaaaactttaagccaatatccctgatgaacatcgatgcaaaaatactcaataaaatactggcacaccaaatctagaggcacatcaaaaagct

SEQ ID NO: 1781 - DNA, 201 bp, Homo sapiens
cacctgtacagacatccagcaacagagacatagcagaccctgggtgaaccctccccagacatcagcctccaggagccaatgctgcagccccactgccactrtagcccccaccctggcccagcacagagtggcaggctggttatttcaatcaacggtgttttgaaaatcttgcaatttaaaaccttttaaacatgagtaggt

SEQ ID NO: 1782 - DNA, 201 bp, Homo sapiens
aataaatagcctaccaaccaacaaaagcctgggaccagatggatttacagctgaattctactagaggtacaaagaggagctgttaccatttcttcttaaaytattccaaacaattgaaaaggagggacttctccctaactcattttgtgaggccagcatcatcctgataccaaaatctggcagagatacaaaaaaaaaaaa

SEQ ID NO: 1783 - DNA, 201 bp, Homo sapiens
tagttttttgaaaaaattaataaaatagttagactgccagctagactaataaagatgaagagaaagaagaatgaaatagaaaataaaaaatgataaaggaratatcactactgaccccacagaaatacaaacaaccatcagagaatactataaactcctctatgcaaataaactaaaaactctataagaaacgaaaaaatt

SEQ ID NO: 1784 - DNA, 201 bp, Homo sapiens
aatcagggagtggggcaggcagggaaataagaagactgaaaggccaggctctgggggagtcccaacgctgcccccaatgctgcacccatgctgccccaggrgagctctagcactggccgcagtgctgccccaggagagcctgatacttcccccagtgctgcctcaacattgccccaggagagccccaacgctgcccccagt

SEQ ID NO: 1785 - DNA, 201 bp, Homo sapiens
acttggcaccgaggctagtgagaagaatgcaggacagagataccacctctgggatgtgctgggagtgtaagcaggctgccggccaggccaggaagccaggrcccctcctgcctgtctccacccctcacgcccatgtgagcctgcctccctcccagcacagacagcccactgcagactcctgctggaggcccacccacctgt

SEQ ID NO: 1786 - DNA, 201 bp, Homo sapiens
gtcatgtgaagtaacagagtaggaactcacccattacctcattaccatgaggagggcaccaggccattcgtgggggatccactcccatgacccagttacckcccaccgggacccacctccaacactggggatcacatttcaacataaggttggaggggatgaacatccaaaccatctcagtgatggggctgatggagctca

SEQ ID NO: 1787 - DNA, 201 bp, Homo sapiens
tcccagtacatctccccaaatagtcccccattaagcgatcgttcctggaaggaagtcagaaaaaaagtccctattttttaagtgagccactttggtaatgycacgaaggagagaggggggacttcctccagccctcatccattagctaccgcacagccaggcaagaaagcccttcccatgccacatgtgtacctaatacac

SEQ ID NO: 1788 - DNA, 201 bp, Homo sapiens
ggtgtgataggcataggggaggggctggtgtaatgggcacaggggaggaactgctgtgataggcacaggggaatgggcaggtgagataggtagaggggagrggcaggtgtgatgcctacagcggaggggacaggtgtgatgggcactgaggaggggctggtgtaatgggcacagggaagggactgctatgatgggcacagg

SEQ ID NO: 1789 - DNA, 201 bp, Homo sapiens
ctgcaggctcctggactacctgcagaatccgctggggcaggtcttcatgtccttagtgtcaccatctcatcctgcctccctggctaactctcaagccctcygacagttgagcctgcagtctgcctggcacatcagttcagttctgtctctcatttagctctacccactgtagcagccgcctcagtgcgtctcaggctattg

SEQ ID NO: 1790 - DNA, 201 bp, Homo sapiens
actgggagccttctgggcccagccccacgcttgccataagggggaaccagagatggcagtgtggacccaaacttaaaggagccagggcacccaggtaattycaggacaaagcagtctgtgctgtgccagcactaatccagctgaggcaatcaggagaggcttcctgtaggtggtgtgtgacttacagcttgaaagaagcac

SEQ ID NO: 1791 - DNA, 201 bp, Homo sapiens
gtccaagacacaggattgctagtgcgacgccctccaaagcacttgtcctctaacgtgacgactcgcagcgttcacatcagcaagtgttcttccagcctagrtcgctgagtgactgcgatgaacacagcctttcctgtggccagcgctggatcctgcggccccatgagaagtctgccattgccgcttcacccactcatcttc

SEQ ID NO: 1792 - DNA, 201 bp, Homo sapiens
cagccctcaggggctcacagcagagtggagaagggtgggctgaggacctgggggcactgaagaggctcatggccaggcacagtggctcacgcctgtaatcmcagcactttggaaggccgaggcgggtggatcacctgaggacggaagtttgagaccagcctggccaacatgatgagatcctgtctctactaaaaacacaaa

SEQ ID NO: 1793 - DNA, 201 bp, Homo sapiens
cgtgagtggccccagcctggggaagcctcactgttcctggtctgctgtgagctcctaggttcttgagactcaggtgttaaccttgcctgttttctcatccsctgcaggcaccggccgtagctacaccacagacccactcttgtccctgctcctgttagctctgcataagttcctgcgcctgctcttgggacattgacagac

SEQ ID NO: 1794 - DNA, 201 bp, Homo sapiens
ctttctgtagggctgcatcaccagccagtgccccgagctcagctgctggcaccaggtactgctgagcgccctgagaggcagcaagccagctgctttgctcrgaaccacagcagcctgagctgcagagggagctcggggcagacgaccttgggccttgcctcccagccactcaattctaggcagcttgatggggaggggtcc

SEQ ID NO: 1795 - DNA, 201 bp, Homo sapiens
accatccaggatcgcttactaagctggacagggtgctccgatctgagacttccttcatgagaccgccctccctcctgcaaatgctgtgagcatgatggagytaattgtgattgtattcatccattttgcattgctatcagggaatacctgagtctggtcatttatagagaaaagaggtttatttggctcacagttctgcag

SEQ ID NO: 1796 - DNA, 201 bp, Homo sapiens
ttgaagtgagccgagatcgcgccattgcactccagcgtgggcaacaagactgaaactctgtctcaaaaaaaaaaaaagaaagaaagaaagaaaagaaaagraagaggctcaggacactggccatttcagattggcaacagcaggggcggtcccagtacatctccccaaatagtcccccattaagcgatcgttcctggaagg

SEQ ID NO: 1797 - DNA, 201 bp, Homo sapiens
acttcccactctctctgtacgagttccgtcatctgttatcatcagcacgacaccgattcctatgccagagagtggttggcaggatccggggggataatccrtggaaagatgttagcttaacacagggcctggcacctagaatacactcagtggatgttggctttggtaaccagcgttattcacgggaatggtgttaaccat

SEQ ID NO: 1798 - DNA, 201 bp, Homo sapiens
tcacttcccactctctctgtacgagttccgtcatctgttatcatcagcacgacaccgattcctatgccagagagtggttggcaggatccggggggataatycgtggaaagatgttagcttaacacagggcctggcacctagaatacactcagtggatgttggctttggtaaccagcgttattcacgggaatggtgttaacc

SEQ ID NO: 1799 - DNA, 201 bp, Homo sapiens
tggcagaggttctcaccctgcagcgggctgggccagtgctgcgtccaggggagagctgggagccaggttctcagcagggcctgggagatcccgccagatgytcccagggtggggcaggctcaggagccccatcaggaagccgggaatgtgggagctaggagagccagccccctacatgaaggaaggggtgtgtctggccac

SEQ ID NO: 1800 - DNA, 201 bp, Homo sapiens
gcagatgagcagggcggggctgaaaactgcatccattcatgccgctgactctaagcaagtagtgacgtcccccgggggttttggcagcaccaaggatcgtrcagggtgcttccacacttgctcctctcataaccctggagggagcatcccactttccaggtgagaagcccagggtttatgggtgggctttccccagttgca

SEQ ID NO: 1801 - DNA, 201 bp, Homo sapiens
gtgcccttccaggatggagatcccagaggaaggagcaggcagccatctttgctgttctgtagcctccactgatgacacctccaggtatgggagaaaccccrgtgaatagggtctggagtggacccccagcaaaccacagaagccctacagaagcggggcctgactgttaaaacaaaaacaaacaaacagaaagcaacaaca

SEQ ID NO: 1802 - DNA, 201 bp, Homo sapiens
gcaaacaggtcatctttgtaggagcccaagagataccacagtaggtagacctgaatggctgtgtccgcagagcttagtgtccctttgggagaagtgacacrcatgctcctccccagccaccttctttagagtctccaactgagagaccacatcccaccaggacttagtgagaaggaaatggctcccctgcagggagtgggg

SEQ ID NO: 1803 - DNA, 201 bp, Homo sapiens
ctcactcctgcccttcataccctaagtattatgcttgttttccggatacatccaaccatttgattggaatcttgagtccatcacttcccactctctctgtrcgagttccgtcatctgttatcatcagcacgacaccgattcctatgccagagagtggttggcaggatccggggggataatccgtggaaagatgttagctta

SEQ ID NO: 1804 - DNA, 201 bp, Homo sapiens
ggagaggcttcctgtaggtggtgtgtgacttacagcttgaaagaagcacctgaggctgaagtcctcccaattaggtcagaccttggaaagctttcagatgycccctctctccttcccaaggttggagaagtccacaccaaatggaatggcctttgtgtatcagtcagctcactgggcaaccatcctctcagcatcagcaag

SEQ ID NO: 1805 - DNA, 201 bp, Homo sapiens
cagtgtagactgcagtgttaaatatggtggcccaggtgggcctcatggagaaggtgactgcttgacaaaaaccagagcacaacggagttagccaagcaagwatctgtgggagaagcatgtcaaccagatggtgcggctggtgcaagggccctggggtagaagcatgcccagtgtgctgcattgtaggaaggagaacagtgt

SEQ ID NO: 1806 - DNA, 201 bp, Homo sapiens
agatggcttgagcccaggggttcaagaccaacctgggcaacagagcaagaactcacctctacaaaaattttaagcacaaaattagccaagtgtgatggtgsatgcctgtagtcctagctacttggaaggctgaggcagaaggatcgcttgagcccaggggttcaagaccagcctaggcaacatagcaacaccccatctcta

SEQ ID NO: 1807 - DNA, 201 bp, Homo sapiens
tgccccagacagggtgcgtgggagtgtgaagctgtgcagtttaggcaggggcatggaggggatgccgggatgcacaagggacagaattgtgtgggatcgtstagccttcatggaggaagaggacaagcagggccagaaatgatgaggacatttctgtcctcatgtatctggggagaaggaagcatattgtctttttttttt

SEQ ID NO: 1808 - DNA, 201 bp, Homo sapiens
gtgaagcctgcagactgtgttttggaggatgggcattagtaacctttctgtagggctgcatcaccagccagtgccccgagctcagctgctggcaccaggtmctgctgagcgccctgagaggcagcaagccagctgctttgctcggaaccacagcagcctgagctgcagagggagctcggggcagacgaccttgggccttgc

SEQ ID NO: 1809 - DNA, 201 bp, Homo sapiens
taaggaccgacggggagccaggcgggggaccaaggcgaagcagggtgaggcagaggtgttacagcatccatggcaggccaggggccaggttatgatcccaytggagagacaggtgggagtgacccagaagttgctggggtcatttctcaaagaccccagcccactcatctccaccaacctgcaatttctcagctccacact

SEQ ID NO: 1810 - DNA, 201 bp, Homo sapiens
atgtggcacatatacaccatggaatactatgcaggcataaaaaagatgagttcatgtcctttgcagggacatgaatgaagctggaaatcaccattctcagyaaactaacacaggaacagaaaaccaaacaccacatgttgtcattcataagtgggagttgaacaatgagaacacatggacacgggaggggaacgtcacaca

SEQ ID NO: 1811 - DNA, 201 bp, Homo sapiens
ggtgaaagggaagccggatcgtgatggtgggcaaaccaggatccgggaagtgttggggtgcgcggatgagggggcgcgacggccagggtggccagaagagyaggtttgggagctgcccagcccggcctctaaccctgctctcttgcagaccgtacgcgtccagggcaatgacatctcacaccggcttcggctgtctgccgt

SEQ ID NO: 1812 - DNA, 201 bp, Homo sapiens
ccctaaggaccgacggggagccaggcgggggaccaaggcgaagcagggtgaggcagaggtgttacagcatccatggcaggccaggggccaggttatgatcmcattggagagacaggtgggagtgacccagaagttgctggggtcatttctcaaagaccccagcccactcatctccaccaacctgcaatttctcagctccac

SEQ ID NO: 1813 - DNA, 201 bp, Homo sapiens
gctggggggcttctggagatcccgcggaaaggcgggttggtagcaggtggccagggagccaggcagcagcctcagcgttgcttgccttcttaagaaagcasagtgttagctgtaaagggcggggtccggtgacagggtggctttccttaggaagcgattcgggcaggccctccgtgctccgggaggtgaggagggccggct

SEQ ID NO: 1814 - DNA, 201 bp, Homo sapiens
gcttctcactcctgcccttcataccctaagtattatgcttgttttccggatacatccaaccatttgattggaatcttgagtccatcacttcccactctctstgtacgagttccgtcatctgttatcatcagcacgacaccgattcctatgccagagagtggttggcaggatccggggggataatccgtggaaagatgttag

SEQ ID NO: 1815 - DNA, 201 bp, Homo sapiens
aacaccccattgtcaatattagatcattgagacagaaaattaacaaggatatttaggacttgaactcagctctggattaagtggacctgatacatagctasagaagtctccaccctaaaacaacggaatatgcattcttcttggtgacacatggcacttactctaaaatcgatcacaaaattggaagtaaaacactcctca

SEQ ID NO: 1816 - DNA, 201 bp, Homo sapiens
tgagcacttactgtgtgccacgctctcctctcaccggctttcctccttcccacagttctccctaatgcctcctgcttcagtccgtcccccagaagacagakcgctctctctgtgcttatagccagagcccacactctctgcccagctggagtggtagcccccaagaaaagagctggaagccagccttgttaaatgtcaccg

SEQ ID NO: 1817 - DNA, 201 bp, Homo sapiens
gttctgtagcctccactgatgacacctccaggtatgggagaaaccccagtgaatagggtctggagtggacccccagcaaaccacagaagccctacagaagyggggcctgactgttaaaacaaaaacaaacaaacagaaagcaacaacaacagcatcaaccaaaaaagtccctgcaagaaaaccccatccaaaggccagcag

SEQ ID NO: 1818 - DNA, 201 bp, Homo sapiens
tgctctcatcacagtctacaaggcagggcagaaaacagatagaccaagctgaacagacaggaaagagactacaagtctagctcaggctgctccttgctccyatcagtcaagggtagggccttgctctccacaccaactcgaggcatcaggaccaggggctcacctggaggagggaagagcttagtgttttggttaagatcc

SEQ ID NO: 1819 - DNA, 201 bp, Homo sapiens
agaaggcatgctctttatggatgacctataaatttctggccctaacagtggcattttctcttaaccggcactgtccaatggcattttctgaaatgacttcrgtaatgacaaaaatgctatatatctattctgtccagtgtagtaatcactagccacatgtggctgttgattcacatttgaagcattgctggtacaactgaa

SEQ ID NO: 1820 - DNA, 201 bp, Homo sapiens
atttactaattattcaaaaatggacaaaaatgtatacttctttgatataaaaatagaattactagatactacgatgctgataaggtgctgtggttaaattkttaattgcttaaaatatttaagtaaaaagtaattaaaatctgtagttttgaattcaaatatattcagtttcaatgtttaccttattataacagtgcatct

SEQ ID NO: 1821 - DNA, 201 bp, Homo sapiens
ttacaacccaaggctaggctaagccaaagactgtgagttaatcttatgactacagaacactttgcctcccacaacaccttaccactacattactaaaggtstatttactgcagttccctttacccagtaaatatgtactactttcaacaaaatattacgaggcatactaaaaggcaaaaaaacagtttgaagaaactgaac

SEQ ID NO: 1822 - DNA, 201 bp, Homo sapiens
atctttatgagataattctattctatttatgaataaaatagagttctcttctactcttcttttatctaacaaacatattagcccaaaataattatttgtartatttacctgcctacttactatttaaactccaacactgaatctttcatgattatgtatattttcaacagtgagtccattcttgcacaccgagaaaatatg

SEQ ID NO: 1823 - DNA, 201 bp, Homo sapiens
ttttttttaagacagtgagaaggccctgtaggaatttgaagaaaagtattacagaagtatatatctataatgataggatatgactaatattcttgttctakaaatcactattatataaaaggggggacctttggaaaggtgaatcctgaacagtgacttgtcagctatatggaatttcactgtgctaccaaaactgttagg

SEQ ID NO: 1824 - DNA, 201 bp, Homo sapiens
agtagataccgggtttcactatgttggccaaactggtctcgaactcctgatctcgtgatatgctggcctcagcctcctaaagtgctgggatacaggcatgmgccaccgcacccagccaaccttaatttttaatcataaattattgttgtctcttctttaagcctctcagctctccatatgagcatcatatatctgatgacc

SEQ ID NO: 1825 - DNA, 201 bp, Homo sapiens
aaacaaagcattgagaacattgtgtatactttgatatattctatttcatagtggctttcaaacacttttttaaccatagtggttaaaaaagataccttacrtgattaacccaataagcaatatttgtatactttataaatatatttgaagcaaaagtttcatgaaaaaatgactatactatttacagtatatacagttatt

SEQ ID NO: 1826 - DNA, 201 bp, Homo sapiens
tatgcagaaattagaaagaaacttcgtaagtactaaaaacaaagcattgagaacattgtgtatactttgatatattctatttcatagtggctttcaaacasttttttaaccatagtggttaaaaaagataccttacatgattaacccaataagcaatatttgtatactttataaatatatttgaagcaaaagtttcatgaa

SEQ ID NO: 1827 - DNA, 201 bp, Homo sapiens
agtgcagtggcgcgatcctggctcactgcaacctctgcctccagggttcaagtgattctcctgcctcagcctctcgagtagctgggattacaggtgcccgycatcacgcccagctaattttgtatttttagcagagacggggtttcaccatgttagccaggctggtctcaaactcctgacctcaggtatctgcctgccttg

SEQ ID NO: 1828 - DNA, 201 bp, Homo sapiens
ctgttgctgtcttaaattcactgaaatagtctgccttgttttctggttttttttgttttttattttttgttttagggcagggggtacagagtctggctctrtcgccaggctggagtgcagtggcgcgatctcaactcactgcaacctccacctcccaggttcaggcaatcctcctgcttcagcctcctgagtagctgggac

SEQ ID NO: 1829 - DNA, 201 bp, Homo sapiens
cacacaaatttaaatttatatctaaaaatcaataacagtttaggattttatggttagtaattcactagtaaactatgcctcagaagatagagaccaaaatyctcttaaggaaaactgatatcctgtagtgtagttattcttgtaaaacacattgtaatatggatatagatagagtcatacatttcacactggtaaagatat

SEQ ID NO: 1830 - DNA, 201 bp, Homo sapiens
gggttgagggcgtgagttggtggggagggtttgggagtatgaagtgcaggggaggattgagggcatgagttggtggggatggtttgggagcgtgaggtggsggtaagagggttgagggtgtgaggtggatggaggaggatttaggggctgaggaggatttgggggcatgaggtgtgggaggagggttggggagaagggttg

SEQ ID NO: 1831 - DNA, 201 bp, Homo sapiens; identical to SEQ ID NO: 267

SEQ ID NO: 1832 - DNA, 201 bp, Homo sapiens
taccatactgttaacattaaacagtgtttaaactataaacagttaaatctaacaggaaaacagctgttgctgtcttaaattcactgaaatagtctgccttrttttctggttttttttgttttttattttttgttttagggcagggggtacagagtctggctctgtcgccaggctggagtgcagtggcgcgatctcaactca

SEQ ID NO: 1833 - DNA, 201 bp, Homo sapiens
ccctctggcctgatcccagggggccctgatgagctatggacgcccctttatctctgcaagacagccacgtagagaagctggggagctcactgaattaaggrtggacatgcaagatgtattttctcttttcttatactcttaccattcttctccttaatctctcttctgtcttcccctccatctgtctccaggctcctgaaa

SEQ ID NO: 1834 - DNA, 201 bp, Homo sapiens; identical to SEQ ID NO: 268

SEQ ID NO: 1835 - DNA, 201 bp, Homo sapiens
tgtagaattgaatttatgtgatgtgaatatattcccactgaattttgtactttttagtttgggtccatttagcttgtcagcatgattttgaaaaatgattmcccgctttcatcctgcatctttaagtatgactcatcactcacataccatataaccagcactcacagaggaaagctccaggtacccagctcagttcaatta

SEQ ID NO: 1836 - DNA, 201 bp, Homo sapiens
attacccgctttcatcctgcatctttaagtatgactcatcactcacataccatataaccagcactcacagaggaaagctccaggtacccagctcagttcarttactagctgtgtgaaccttggcaatttattcagcttctctgtgtcttgaatgcatcatctatacatggggataaaagccatctctactccataaaactg

SEQ ID NO: 1837 - DNA, 201 bp, Homo sapiens
ttttaaatcagttgttataaattttgcccaatgaagtaaaggaaaatatgcttgcaaggaatgaaaggatatttaatctccataaagaaagtgtgtgtgtktgtgtgtgtgtgtgtgtgtgtgtgtgtgtatacttttttatgtatatacccccccctaccaatagaaagtctaacagggatgtccaatcttttggcttct

SEQ ID NO: 1838 - DNA, 201 bp, Homo sapiens
aggaatttcttccaacattcaacacagaatcacagaggataagaaaaatatgctttaaaaaaagtttgacaaagaaggcaaacagatagaaataaggtaakagtaaatacccaaagaagtaatttaagaacaatttctagaattaatgaaaagctgaaatgttttggaactcagattgaaaagagcaatttaagctgggcg

SEQ ID NO: 1839 - DNA, 201 bp, Homo sapiens
aatattaagtgcaggttctaaggaggaatttggttttcccacctattttacattattatatctgtaaaaatccaatagcaatagaacacagagacacaaayagaacttaggaggattcagagctccgcttggttgaacagagaagttcattaaaccaagcaactcattctgttttataacagatgatttactggctaacac

SEQ ID NO: 1840 - DNA, 201 bp, Homo sapiens
atggcatagtggcaggcacctgcaatcccagctactggggaggctgaggcaggagaattgcttgaacccaggaggcggaggttgcagtgagctgagattgygccattgcactccagcctgggcagcaagagtgaaactctgtctcaaaaaaaaaaaaaagaaaagaaaaagggcaatttggtggttgtcgggataattttt

SEQ ID NO: 1841 - DNA, 201 bp, Homo sapiens
cttaggaggattcagagctccgcttggttgaacagagaagttcattaaaccaagcaactcattctgttttataacagatgatttactggctaacacattgraatgtgtgcctgacttttattttctggtgagtcttccagtgataaaacctaaaatcagtggtagattttaaaacctaaaatcagtggtagattttcctag

SEQ ID NO: 1842 - DNA, 201 bp, Homo sapiens
agagatacatgctgctgatccccactccctggtattcatgcctttatgtaatctccccttgaacatgggctgagacttactaatttgtttctaataaacaraatacaaaagaagagataagatgtcactcccaaaattacatttttaaaagagcatggcttggcctggtgcggtggcccacgcccgtaatcccagcacttt

SEQ ID NO: 1843 - DNA, 201 bp, Homo sapiens
gcagcaaattgaaggcctattagtaaagtgaattgatttctgtcacccagatcctactatgatgagaggaaggctggctacttactcgagggacaacttcygtcagccatgtggtactgctggaggtgacactggcatcttatacgcaaatttagttatttgcatggtggagtattgagagataaggaaaattatgaaaac

SEQ ID NO: 1844 - DNA, 201 bp, Homo sapiens
actatcgcaaggacaaaaaaccaaacacagcatgttcttactcataggtgggaattgaacaatgagaacacatggacacaggaaggggaacatcacacacmggggcctgttgtggggtggggggagggggagagggatagcattaggagatatacctaatgttaaacgacgagttaatgggtgcagcacaccaacatggca

SEQ ID NO: 1845 - DNA, 201 bp, Homo sapiens
gacttttgtatattttaaaattaaaattaaaaaacttgtattagtttcctattgcttctataacaaattaccacatatttagagacttaaaacaacaaatyatcttatggtggagatcagaagtccaaaatgggtttccctgggctaaaatcaaggtgttggcagggctacattccttctggagtttatgggggtgaatct

SEQ ID NO: 1846 - DNA, 201 bp, Homo sapiens
ctcattgaaggaaataaaaccaccttgttaagcttttggaaacagtattcaaggttactacttaaatacttgtttagacgtacagtctgaggtagagtctytgccaaattgtcatagcttggctctagttaatattctgccacatatacctctcattctaaacagttgataaaagtagcttgagaatactcagctaaaatt

SEQ ID NO: 1847 - DNA, 201 bp, Homo sapiens
gattataaaacatgctgctataaagacatatgcacacgtatgtttatcgcggcactattcacaatagcaaagacttggaaccaacccaaatgtccaacaaygatagactggattaagaaaatgtggcacatatacagcatggaatactatgcagccataaaaaatgatgagttcatgtcctttgtagggacatgaatgaag

SEQ ID NO: 1848 - DNA, 201 bp, Homo sapiens
taagttacttattttcaaggtcccactttattctaagaccctgaatacctactgtgaaattacctagtataattgttcttaggaatattttaatatataartttcttataaatgaactttgcaaattataagatcatatttgaaagaatgagacactgtaagccttgtgctgaaaggatttctaaggtatactattcattt

SEQ ID NO: 1849 - DNA, 201 bp, Homo sapiens
ttttttttttcttttttgagatggagtctcacactgtctccgtcaggagtgcagtggcgcgatcctggctcactgcaacctctgcctccagggttcaagtrattctcctgcctcagcctctcgagtagctgggattacaggtgcccgccatcacgcccagctaattttgtatttttagcagagacggggtttcaccatgtt

SEQ ID NO: 1850 - DNA, 201 bp, Homo sapiens
atgtatttgcatcttttgtgttgttacctacagttaataacatacttcctgatattctgtagcatacagatgtcagctctttccagacaatggaccaaatrgtgtcaaatatgagaaactatatgcagaaattagaaagaaacttcgtaagtactaaaaacaaagcattgagaacattgtgtatactttgatatattctat

SEQ ID NO: 1851 - DNA, 201 bp, Homo sapiens
ataaaattcatcttcaaaaataaaaagtagattttattgaatgaatatttgcttgatttacaaaagggatcctcatagttgtgtttgaaagttggggactyccacatgcttatgattactttccaaaaggttttttaaaaagtactaaactgtagatagataagcacaacgtttggaaaagcacagattaactgctttctc

SEQ ID NO: 1852 - DNA, 201 bp, Homo sapiens
tagcttgccatatggatggccacatatttttcagttctttctctaacgtttctggatcatccaggcccattctaccaattattttaatccagggtcatggwaagtaacatctaagttacatacaagagacaggagagggtctttaccatgcatatggaggctgacactgggagaaggctgtggtcagagcacagggaaaaa

SEQ ID NO: 1853 - DNA, 201 bp, Homo sapiens
ttggaagatgtatttgcatcttttgtgttgttacctacagttaataacatacttcctgatattctgtagcatacagatgtcagctctttccagacaatggrccaaatggtgtcaaatatgagaaactatatgcagaaattagaaagaaacttcgtaagtactaaaaacaaagcattgagaacattgtgtatactttgatat

SEQ ID NO: 1854 - DNA, 201 bp, Homo sapiens
ttggctcaagaactccccagtggccttgccaaaatttctggagagtgaaaggcagtataggatgctttcaccaactcttccttccctctctctttcactcrggatcaaacttgtatgactgactggtggccctctcaaccttacctagctacctccattttctctctcaggtgtttctcctaataaaatctttgatcattt

SEQ ID NO: 1855 - DNA, 201 bp, Homo sapiens
cacttctcacttgagaacctgggtgtgcctttgactacaccatattggtagtttagtatccttagtagaacttacagctagtgttgttacttatttgaacwctctggcaataattatttatatttgactcgactgaatttacaatttgtttacctgtagggtcaactttcagtggatccaaatggacattcattttgttct

SEQ ID NO: 1856 - DNA, 201 bp, Homo sapiens
gggtgttttaaagtgatgtaccttgcagtgagcggagatcgcgccattgcactccagcccatctcaaaaaaaaaaaacagagtctgaaaagtcaatgtgtktagatctatgaaattactttccacgtaatttgctaattgtaaaaaaaaaaattccagacttataaaacattaatggctaatcttttgggaaatgttaatc

SEQ ID NO: 1857 - DNA, 201 bp, Homo sapiens
cctctggagtagctgggactacagggaagtgccaccatgcctggctaattttttaggcatttttgtagaggcaaggtctcactatgttgcccaagctggtytcgaactcctggactcaagcagtactcctacctcagcctcccatagtgctgggactacaggcgtgagccactgtgtctggcctgaactatattctttgga

SEQ ID NO: 1858 - DNA, 201 bp, Homo sapiens
aggcgtgagccactgtgtctggcctgaactatattctttggaagttcattgagaaagggtatatacctaaaggattataaaacatgctgctataaagacayatgcacacgtatgtttatcgcggcactattcacaatagcaaagacttggaaccaacccaaatgtccaacaacgatagactggattaagaaaatgtggcac

SEQ ID NO: 1859 - DNA, 201 bp, Homo sapiens
acttatccctcagatacttattgattctttgtggtgagaacattcaaaatcctctcttctagttattttgaaatatacaatccattatttgttaactgtartcatcatactgtgcaataattagaacttctaactgtaactttgtacattaaccaacctctccccattttcccatcttccctactgtccctagcttctggt

SEQ ID NO: 1860 - DNA, 201 bp, Homo sapiens
acttttgtatattttaaaattaaaattaaaaaacttgtattagtttcctattgcttctataacaaattaccacatatttagagacttaaaacaacaaatcrtcttatggtggagatcagaagtccaaaatgggtttccctgggctaaaatcaaggtgttggcagggctacattccttctggagtttatgggggtgaatctg

SEQ ID NO: 1861 - DNA, 201 bp, Homo sapiens
aatttttgaaggccttaagggcccactgaagtctcaactacattttgtaccccaactttttgtcactccagtgtgttgggtcaccccagagcaagtgcagrtacatcttttgatggttgatttgaacatgaattgagaagagggcagaaatacccaaatgtctaatcttttcctctctctctttttatccttctttgggtt

SEQ ID NO: 1862 - DNA, 201 bp, Homo sapiens
attcctctgaggtctattttccctttctccccttctcagagattaccattttcctgtatctggagtttatcattttcacgcatgtttttacaattttattrcttcacgtttctgtcattaaaaaaatggattattttccagatttcccaacattacataaagggtatcatattgcatatgtcctctgcaacttgtctttgc

SEQ ID NO: 1863 - DNA, 201 bp, Homo sapiens
tgaggtctattttccctttctccccttctcagagattaccattttcctgtatctggagtttatcattttcacgcatgtttttacaattttattacttcacrtttctgtcattaaaaaaatggattattttccagatttcccaacattacataaagggtatcatattgcatatgtcctctgcaacttgtctttgctgagtaa

SEQ ID NO: 1864 - DNA, 201 bp, Homo sapiens
gatttagttgatagaggggttggctggctgtggtctgatccatctgtgcattttctctgagaatggtcttcccatgggccgctcccagtcagtgactaagycctgcagggataggtctgttcctgagagttgttggactctgacatctgactttggctcaagaactccccagtggccttgccaaaatttctggagagtgaa

SEQ ID NO: 1865 - DNA, 201 bp, Homo sapiens
ctaatctttcactaattcatctttatacatggctccttatacagagtctaggagtggtattgctgagttgtagggtatgtgtactttcctctttacctagygtttccaagctactatcccagtgattgaaattgttggcttccaaaactgtggcttgtgagtttccatttctctacttccttgttagtacttatagtaaaa

SEQ ID NO: 1866 - DNA, 201 bp, Homo sapiens
tgtaccttgcagtgagcggagatcgcgccattgcactccagcccatctcaaaaaaaaaaaacagagtctgaaaagtcaatgtgtttagatctatgaaattrctttccacgtaatttgctaattgtaaaaaaaaaaattccagacttataaaacattaatggctaatcttttgggaaatgttaatcctagaattaaaataag

SEQ ID NO: 1867 - DNA, 201 bp, Homo sapiens
catttctctacttccttgttagtacttatagtaaaaatttaggtttaccaatctaatgaatgtgaagtagtacattttttagttcttacatataaagatgmaccttttaatgatgcttttgccatagttctgctaattaatctcagacattttaattttaactttctaaaagtgacaaacttaaatgtaaacagaatataa

SEQ ID NO: 1868 - DNA, 201 bp, Homo sapiens
aattcagcgggtgtggtggcgggcacctataatcccagctactcaggaggctgaggcaggagaattgctggaacctgggaggcggaggttgcagtgagccraggtcgcatctctgcactccagcctgggcaacagagcaggagtccatctcaaaaaaaaaaaaaaaaaaaaaacaaacctatatacacatactaggtagga

SEQ ID NO: 1869 - DNA, 201 bp, Homo sapiens
tgcacatgtaccccggaacttaaaaaaaaaaaagaaagattttgtgaggtggaaaaaaaaagtagagtgatacgtatgccaaattttgaattactaatttwaaagtaattttgttcttcataatctgattttggaaaacaaaaaacgactccctttctgccttctagtgtgctaaaacatgagctgctccgtgtgtactat

SEQ ID NO: 1870 - DNA, 201 bp, Homo sapiens
ttacgaggcatactaaaaggcaaaaaaacagtttgaagaaactgaacaagtatccaaaccgtatttctagcaaggaatattggaattatcagaccaggaawttttttaaactatgattaatgtgccaagggctttaatgggaaaagcagacaacgtgctagaacagatataagcagagaaatggaaattgtaaaaataaaa

SEQ ID NO: 1871 - DNA, 201 bp, Homo sapiens
tgaactcaggcaaatttattatgccattttagttaacgtgtttaggagctgttgggatatggacagtgttattttaacaggtttaaatttttgtattattrtgattctctcttttgaaagccagaggcgaggcttggtggctcacgcttgtaattccagcactttgggaggccgaggtgggtggatcaccagaggtcagga

SEQ ID NO: 1872 - DNA, 201 bp, Homo sapiens
tctaggggtgactttttttgggcggaggtaatttttcaagtcacttctcacttgagaacctgggtgtgcctttgactacaccatattggtagtttagtatmcttagtagaacttacagctagtgttgttacttatttgaactctctggcaataattatttatatttgactcgactgaatttacaatttgtttacctgtagg

SEQ ID NO: 1873 - DNA, 201 bp, Homo sapiens
agagaaatgaaggattccttttatgggcttatcagtggactatgaacagcttaggagagaatctctgagcttgaggatatgacagtagaaacttccaaaaytgaaaatcaaagagaaaaaagactggaaaaaaaaaacccataatatccaagaactgtggcaagaactgtagggcaactacgaaagatataacctgtaata

SEQ ID NO: 1874 - DNA, 201 bp, Homo sapiens
ggaccctctaggggtgactttttttgggcggaggtaatttttcaagtcacttctcacttgagaacctgggtgtgcctttgactacaccatattggtagttkagtatccttagtagaacttacagctagtgttgttacttatttgaactctctggcaataattatttatatttgactcgactgaatttacaatttgtttacc

SEQ ID NO: 1875 - DNA, 201 bp, Homo sapiens
ccgccaaaggtttttcaggcctcaactcaaactcgtcgagctccaggaggagtaagttttctataagcattcctaaagttttataaagttaggggatgatrgactgtctagatcaaattttaactattaaaatttaatctggtacaagatggtggggggacaggagggaggtgtgggggttgggggtaaggtagtcctcac

SEQ ID NO: 1876 - DNA, 201 bp, Homo sapiens
tgttttcaagaactggaactttctcaggttgttttcattttttaaaatgatcgactttactatttgattacatttattatggaaaatgtaaatatgcagargaatgctaaaatagaaagtacccattatcccatcatcccccaaacaacaaaagataatgtgtattcatttctagtccttttatgtggatatatagaattt

SEQ ID NO: 1877 - DNA, 201 bp, Homo sapiens
acttttcataatactccagcctcaaattttgcctcaccagaatcagtgtgttttcaagaactggaactttctcaggttgttttcattttttaaaatgatcractttactatttgattacatttattatggaaaatgtaaatatgcagaagaatgctaaaatagaaagtacccattatcccatcatcccccaaacaacaaaa

SEQ ID NO: 1878 - DNA, 201 bp, Homo sapiens
ggacgtcacctcattcttttttatggctgtgtagtattccattgtgtatatgtaccaaattttctttatctagtccatcatttatgggtatttaggctgaktccatgtttttgctactgtaaatagtgctgcaatgaacatacatgtgtatgtgtctttatggtagaaagtaaaggattaggccgggcgcggtggctcacg

SEQ ID NO: 1879 - DNA, 201 bp, Homo sapiens
atcaaatttcaatcatcaaaatttaatcaaattatcaactttcaaatcaattatcaaaattcaattatcaaatttatctgggtcccagctttttttaatgyaatttagggataaacataatattagacatggttgctgtaaaggttaaacgagaaaacatatgtgaagcacttagtgcaatccttggaatatatgaagtgt

SEQ ID NO: 1880 - DNA, 201 bp, Homo sapiens
ttgatacatgtcatgtatacaccgtgtaatgatcaagacaggataattagtatacttatccctcagatacttattgattctttgtggtgagaacattcaawatcctctcttctagttattttgaaatatacaatccattatttgttaactgtagtcatcatactgtgcaataattagaacttctaactgtaactttgtaca

SEQ ID NO: 1881 - DNA, 201 bp, Homo sapiens; identical to SEQ ID NO: 259

SEQ ID NO: 1882 - DNA, 201 bp, Homo sapiens
gttttgatacatgtcatgtatacaccgtgtaatgatcaagacaggataattagtatacttatccctcagatacttattgattctttgtggtgagaacattmaaaatcctctcttctagttattttgaaatatacaatccattatttgttaactgtagtcatcatactgtgcaataattagaacttctaactgtaactttgt

SEQ ID NO: 1883 - DNA, 201 bp, Homo sapiens
aacagcattttccatgtgagtggggaatgtgtcaatgagagcacgacaaagttggagagttgtgctttctcttcgaagttgttggaagttgccatgccaaktgcgctgttttctttgctcgctttgttacagagctaaccttgtttgtgaagggactccgctttctgtcaaaactagaaataggacagggaagctgatggg

SEQ ID NO: 1884 - DNA, 201 bp, Homo sapiens
acctgggaggcggaggttgcagtgagccgaggtcgcatctctgcactccagcctgggcaacagagcaggagtccatctcaaaaaaaaaaaaaaaaaaaaamcaaacctatatacacatactaggtaggatggtttatttttaagattaatattttatttccactccttttatgagccaatgaattattttatgtgagttca

SEQ ID NO: 1885 - DNA, 201 bp, Homo sapiens
gtgcaaaaaagtagacagcagttcaaaatgcagtgtggaggtgagaaaggcagagtctaaaggagcaagcttcttatgccctggaatagttggattgtttkattgtattcaaattcattttttaattttgacagtgtgatgttttgatacatgtcatgtatacaccgtgtaatgatcaagacaggataattagtatactta

SEQ ID NO: 1886 - DNA, 201 bp, Homo sapiens
cgtcgtccgtactggaggctagctcttgtcgcggccgcggcgagttaacatcgtttttccaatctgtccgcggctgccgccacccaagacagagccagaaygttcaggatgctgaacagcagttttgaggatgaccccttcttctcgtgagttacgggagccaggagtccggggtcgcgcgggaattaaggtatcgagggg

SEQ ID NO: 1887 - DNA, 201 bp, Homo sapiens
ccgagtatcatcagaacatacacattagtttacagttgggcaacatcatctaacataaagcctactttattataaagtgttgaatgtctcatgtaatttaytgaatactatactgaaagtgaaaaccagcatggctgtatggatcattgaagtactgtttctcctgaatgtggagtgctttcataccacagtaaagtcaaa

SEQ ID NO: 1888 - DNA, 201 bp, Homo sapiens
tctcagaaataaaggaaccaacagaaaggataatgtgaggacacagggatctgcaggtcaaggagagaagaggcctcaagagaaatgaactttgctgacaygttgatctcagacttccagcctccagaactgtgagacagtaaatgttgtttaaaaaagaaataaagggaaagaaagaaagggaagaacaagaaaatcagc

SEQ ID NO: 1889 - DNA, 201 bp, Homo sapiens
ctaataacaaattaaaaactgaacaacctgagaaaacaacttttcttgtatatagcagagaatcgaggtcacagggcaaatctctgcccccataattggasataggcagatagagagaatcacaacttaactggtgcagaaacctcttcaggaaccagtgcgagggtagtaggaaaacctgacctgtagttgacaaattac

SEQ ID NO: 1890 - DNA, 201 bp, Homo sapiens
aataaaccactagtcataggcatacacatctacagataaaagctgtaaaagtaaatataactttaaaagtctgccacttttttcctttgttaactcaattmttcgttaaatttttacttcgctggaggaaatatttgctctagagagtgtatttcttaaaaggagaggactgctattggtatttagggaaggacgattcat

SEQ ID NO: 1891 - DNA, 201 bp, Homo sapiens
aagccaatctcttgttaccaaccccccaaaagtggtatttactcaacagttttcaaaataaaatatgcctcaattataatttgtgcaaaataaaccactaktcataggcatacacatctacagataaaagctgtaaaagtaaatataactttaaaagtctgccacttttttcctttgttaactcaattcttcgttaaattt

SEQ ID NO: 1892 - DNA, 201 bp, Homo sapiens
attttaatttctgttatatgttagattacatgtatgtctctctctctcaagtaaatcttttctttttctggattttgtatttattcttcaatgcatttacrtccttctagtgtcctaactcttctccctgtagtttttaattatattacaatttattaacaaatttaatcattaaatttaaattatttttattaattttta

SEQ ID NO: 1893 - DNA, 201 bp, Homo sapiens
tcttaccatgtgatctctgcacatactggttcccctttaccttcctccataagtggaagcatcctgaagttctcatcagaagatgatgctggctccatgawtcttgtcagtctgcagaaccatgacccaaataaacctcttttctttgtaaattacccagcctcaggtattcctctatagcaacacaaaaattgactaaga

SEQ ID NO: 1894 - DNA, 201 bp, Homo sapiens
agtttaggcacatgtttcctgaagtaagtcatttcaacatatataaaattcatcttcaaaaataaaaagtagattttattgaatgaatatttgcttgattwacaaaagggatcctcatagttgtgtttgaaagttggggacttccacatgcttatgattactttccaaaaggttttttaaaaagtactaaactgtagatag

SEQ ID NO: 1895 - DNA, 201 bp, Homo sapiens
gagtttatgtttatttcgggtaatctatttgacccacccgttttacctcaacccccaaacaaaatgagtatccatttcttaagttaaacataaagaattcrtaaaggtgacaaactccttaatgaatcatccactgaccttaggaacatagagatgtgaaacacatagctcatgcccactctcttttatataaatattatc

SEQ ID NO: 1896 - DNA, 201 bp, Homo sapiens
gctccttatacagagtctaggagtggtattgctgagttgtagggtatgtgtactttcctctttacctagcgtttccaagctactatcccagtgattgaaawtgttggcttccaaaactgtggcttgtgagtttccatttctctacttccttgttagtacttatagtaaaaatttaggtttaccaatctaatgaatgtgaag

SEQ ID NO: 1897 - DNA, 201 bp, Homo sapiens
gttaacattaaacagtgtttaaactataaacagttaaatctaacaggaaaacagctgttgctgtcttaaattcactgaaatagtctgccttgttttctggktttttttgttttttattttttgttttagggcagggggtacagagtctggctctgtcgccaggctggagtgcagtggcgcgatctcaactcactgcaacct

SEQ ID NO: 1898 - DNA, 201 bp, Homo sapiens
ttgcaaggaatgaaaggatatttaatctccataaagaaagtgtgtgtgtgtgtgtgtgtgtgtgtgtgtgtgtgtgtgtatacttttttatgtatataccyccccctaccaatagaaagtctaacagggatgtccaatcttttggcttctctgtaccacattgcaagaagaactgtcttgggccacacgtaaaatacacta

SEQ ID NO: 1899 - DNA, 201 bp, Homo sapiens
atagtgggacctatctctacaaaaaaatacaaaaattagccaggcacagtggtgcacatctgtagtttcagctactagggaggctgaggtgggaggatcayttgagcctgggtgtttaaggttgcagtgagccaagatcatgccactgctctccatcctgggagacagagcaagactctgtctgaaaaaaaaaaaaaaaaa

SEQ ID NO: 1900 - DNA, 201 bp, Homo sapiens
aatatttttgttaattttactagtttgtgttttatgcctttagtcattaaaataaaatgcaaatgtgttaattcattgttgaaattgagcatgtattagtwaaaaatttccttttaggcatactttagtatactcctaacataccataacacattgggaaattgtcataaggcacacattttaaataacatcttgatataa

SEQ ID NO: 1901 - DNA, 201 bp, Homo sapiens
ttcttgaaatacttttcttcattgtagtcaaatcacatctacatatctaaaggaaaagttgactggttttcctaagtaagtatatattaataggaacaagmattttagtctccatactttaaccatactctaagctgtaaatgtccagtgagtttggagctgtaagcaaaaggacctccttttgaaatgcctgttttaaaa

SEQ ID NO: 1902 - DNA, 201 bp, Homo sapiens
gcttgtaattccagcactttgggaggccgaggtgggtggatcaccagaggtcaggagttggagaccagcctgaccaacatggtgaaaccccatctgtactaaaaaaaaaaaaaaaaaaaaaatacaaaattagccaggcatggtgacacacacctatactcccaactacttgggaggctgagacaggagaatcacttgaac

SEQ ID NO: 1903 - DNA, 201 bp, Homo sapiens
cttgtaattccagcactttgggaggccgaggtgggtggatcaccagaggtcaggagttggagaccagcctgaccaacatggtgaaaccccatctgtactaaaaaaaaaaaaaaaaaaaaaatacaaaattagccaggcatggtgacacacacctatactcccaactacttgggaggctgagacaggagaatcacttgaacc

SEQ ID NO: 1904 - DNA, 201 bp, Homo sapiens
ttgtaattccagcactttgggaggccgaggtgggtggatcaccagaggtcaggagttggagaccagcctgaccaacatggtgaaaccccatctgtactaaaaaaaaaaaaaaaaaaaaaatacaaaattagccaggcatggtgacacacacctatactcccaactacttgggaggctgagacaggagaatcacttgaaccc

SEQ ID NO: 1905 - DNA, 201 bp, Homo sapiens
tgtaattccagcactttgggaggccgaggtgggtggatcaccagaggtcaggagttggagaccagcctgaccaacatggtgaaaccccatctgtactaaaaaaaaaaaaaaaaaaaaaatacaaaattagccaggcatggtgacacacacctatactcccaactacttgggaggctgagacaggagaatcacttgaaccca

SEQ ID NO: 1906 - DNA, 201 bp, Homo sapiens
cgggcctggcggcgtgcgcctgtagtcccagctgctggggaggctgaggcaggagaatggcatgaacctgggaggtagagcttgcagtgagctgagatcgygccactgcactccagtctgggtgacagagtaagactccgtctcaaaaataaataaattaattaaattaaagagcatggcttctgtcttaggtgttctctc

SEQ ID NO: 1907 - DNA, 201 bp, Homo sapiens
gtgacatcacagtcctagcttcttggcagttgcagagaacctctttagtttgggggcagcttggtttaggctttggaatatggcacaggaatgactcctgwcatagaagatctgagaacttgtgattgtcctgtcaatgaagtgatcaataatgatatcaccaggctgaaatttcttcttttacatatgtataggaatctc

SEQ ID NO: 1908 - DNA, 201 bp, Homo sapiens
tccaaattgtatccacagtatcttttgtgaaagatgtaataattttatatgaaagctgattattccacacaaatttaaatttatatctaaaaatcaataayagtttaggattttatggttagtaattcactagtaaactatgcctcagaagatagagaccaaaatcctcttaaggaaaactgatatcctgtagtgtagtta

SEQ ID NO: 1909 - DNA, 201 bp, Homo sapiens
tgtaattctgatcgagcaagtctacaaagaataataactatgttaccacttaccagctattggagatagaaagctcagaagcaggctggcaaacctgtcawccttaatttttttttttttttttttgagacggagtctggcactgttgcccaggctggagtgcagtggtgtgatctcgcctcactgcaacctctgcctccc

SEQ ID NO: 1910 - DNA, 201 bp, Homo sapiens
aagctgattattccacacaaatttaaatttatatctaaaaatcaataacagtttaggattttatggttagtaattcactagtaaactatgcctcagaagayagagaccaaaatcctcttaaggaaaactgatatcctgtagtgtagttattcttgtaaaacacattgtaatatggatatagatagagtcatacatttcaca

SEQ ID NO: 1911 - DNA, 201 bp, Homo sapiens
ggaatgaaaggatatttaatctccataaagaaagtgtgtgtgtgtgtgtgtgtgtgtgtgtgtgtgtgtgtgtatacttttttatgtatataccccccccyaccaatagaaagtctaacagggatgtccaatcttttggcttctctgtaccacattgcaagaagaactgtcttgggccacacgtaaaatacactaatacta

SEQ ID NO: 1912 - DNA, 201 bp, Homo sapiens
aaacagatatttatagatattcgcaaaattttgagaccacattcaggatggcctcaattaagacataagcttctatggcataaacaaacctcatttgaggrtgttgtttctcagacatacaggtggtcttactctgcagcagctgaaactgaagcacaagaagcccttggaactatcatcaggacatgtaagtcccatgta

SEQ ID NO: 1913 - DNA, 201 bp, Homo sapiens
gcatataattttgctagaatagtgattctcaaacttttaacaggtaggaaatctaggaatggtagtcttaaatttcctttgcccctcaagacaaaaactcrtactaaaaatcctacaagaatctggtatgtggctgggcatggttgctcacacctgtaatcccagcactttgggatgctgaaacgggcagagcccaggagc

SEQ ID NO: 1914 - DNA, 201 bp, Homo sapiens
ttgtagtcaatctggtatttagttgattgctgaaagtaattatcatttgcattcaacaaataacattgttgatactggtattttctaattagaacattacsattttctaaatagtccattagagttgcttatattgttcacaatcaaggttattcaatataagcaaacgctactgatttactaattattcaaaaatggaca

SEQ ID NO: 1915 - DNA, 201 bp, Homo sapiens
taaattgttaattgcttaaaatatttaagtaaaaagtaattaaaatctgtagttttgaattcaaatatattcagtttcaatgtttaccttattataacagkgcatcttaaatgtttcttcagaaaagtaaaaggaaatgttaaaagttatattttaaaatttggtgttttattacatacttgggatttttaaactttggta

SEQ ID NO: 1916 - DNA, 201 bp, Homo sapiens
tgaggcaggagaatggcgtgaacccaggaggcggagcttgcagtgagccgagatcgcgccactgcactccagcctgggcaagagagcgagactccgtctcaaaaaaaaaaaaaaaaaaaaaaaagcagaaaaaaactgccctcattctaagtcatcagttttgttgctttcatctaaagacaggaaaatgaactacaaatc

SEQ ID NO: 1917 - DNA, 201 bp, Homo sapiens
tcattgaaggaaataaaaccaccttgttaagcttttggaaacagtattcaaggttactacttaaatacttgtttagacgtacagtctgaggtagagtctcygccaaattgtcatagcttggctctagttaatattctgccacatatacctctcattctaaacagttgataaaagtagcttgagaatactcagctaaaattt

SEQ ID NO: 1918 - DNA, 201 bp, Homo sapiens
gcgtgaacccaggaggcggagcttgcagtgagccgagatcgcgccactgcactccagcctgggcaagagagcgagactccgtctcaaaaaaaaaaaaaaamaaaaaaaagcagaaaaaaactgccctcattctaagtcatcagttttgttgctttcatctaaagacaggaaaatgaactacaaatctacaaaaagtttata

SEQ ID NO: 1919 - DNA, 201 bp, Homo sapiens
tcatgcttttgatgaggagtggcaaagtgaggttttgaagtacaaaccaggacgacacaatctaggaaacactagaatgagaagtgttggccatgagaatmctggctcccgagaacttaaaagaaggtaaaagttgtttctaaaatagtttggttttttaagaagaatttgaagtaaagttatgtaatttacttctgttat

SEQ ID NO: 1920 - DNA, 201 bp, Homo sapiens
gtcatagcttggctctagttaatattctgccacatatacctctcattctaaacagttgataaaagtagcttgagaatactcagctaaaatttaagttactkattttcaaggtcccactttattctaagaccctgaatacctactgtgaaattacctagtataattgttcttaggaatattttaatatataaatttcttata

SEQ ID NO: 1921 - DNA, 201 bp, Homo sapiens
acccaggaggcggagcttgcagtgagccgagatcgcgccactgcactccagcctgggcaagagagcgagactccgtctcaaaaaaaaaaaaaaaaaaaaaraagcagaaaaaaactgccctcattctaagtcatcagttttgttgctttcatctaaagacaggaaaatgaactacaaatctacaaaaagtttatacgtgtg

SEQ ID NO: 1922 - DNA, 201 bp, Homo sapiens
acaacaaaataatttcagatagtcacagtaccctgaagatgaaacagggtaatgatacagagatggggggaagtgaaggagggattagacaggtgaccagyggtggcctttctcaggtggtgatacttgaatcatgagaaggaactaactaggtttaaagtcaggaggaaacatttaaggaagaaagaggagaatgtgtac

SEQ ID NO: 1923 - DNA, 201 bp, Homo sapiens
ataccatgaacgttttcctggtctttagatattcactaaagcatgactttagagtctgcaaaatattgcaccctatgaacatacaaagcatatttctcacrtaaatctttaacaacattttcaaattattaccttagactctttgtgtacatgaaatgactagtttgtatagcatgacctttttaaaacctcctatttcca

SEQ ID NO: 1924 - DNA, 201 bp, Homo sapiens
caggaggcggagcttgcagtgagccgagatcgcgccactgcactccagcctgggcaagagagcgagactccgtctcaaaaaaaaaaaaaaaaaaaaaaaarcagaaaaaaactgccctcattctaagtcatcagttttgttgctttcatctaaagacaggaaaatgaactacaaatctacaaaaagtttatacgtgtgttt

SEQ ID NO: 1925 - DNA, 201 bp, Homo sapiens
aaagctacaaaggattgtctttattggaccaggaaacactgatcttctatatggttacgtatggaccttcaaagcttagattaacctttgcttgtatctcraaagccttacaactgaaatatattttcatatgtcttgccttagagcaaagctagaggttacaaacatactcaactaaaaattaaaaaaaaaacaggatat

SEQ ID NO: 1926 - DNA, 201 bp, Homo sapiens
gacttcttgaactttaaggattagtagaagttagccagaaaaggagggaggggaaaggaatactgttcaacagagaggaaacagcatgtgcaaagacctgsaggctagggagctaaaacatgtttagtatcacttagccctggagtatgagttgaacagtagatactgatgaggaagaagaggtaaccagagacttcttta

SEQ ID NO: 1927 - DNA, 201 bp, Homo sapiens
ctatgaacatacaaagcatatttctcacataaatctttaacaacattttcaaattattaccttagactctttgtgtacatgaaatgactagtttgtatagyatgacctttttaaaacctcctatttccaatttgttttcctagaagaatgaaattttattttcaaaagagaacattatgaatgggctaaaatttttcattt

SEQ ID NO: 1928 - DNA, 201 bp, Homo sapiens
cttcctgaatggttcagacagttgcaaacaccagactataggctcgcttttgtttagtgcatcttccaacaggcagtcatttgttcatgtcactcagaaarataaaatttttagcatttgctgaacatacacatattcaaataaacatttaaatattcccctacttctatataaagaaagaaaaacccaggcaaattttaa

SEQ ID NO: 1929 - DNA, 201 bp, Homo sapiens
tagggggaccatctgatatataggatggttcaaattccataaacattatttatttatttatttattttgaatttttgtatttttttttattttattttgaracggagtctcaccctattgcctaggctggagtgcaatggcatgatcttggctcatcacaacctccacttcccgggtttaagtgattctcctgcctcagcc

SEQ ID NO: 1930 - DNA, 201 bp, Homo sapiens
aaaaaaaaaaatttaggttctttaatgagacttgtgatgaaagggtaaatatcagattatagtgttggtatttttatgcaatatgggataaataaagatgttttttttattatgcattaaatgaattatattggataacagtaacaggttttcattaattttatttataactacagatgcttctcaacttaacgataagat

SEQ ID NO: 1931 - DNA, 201 bp, Homo sapiens
ctaattaatctcagacattttaattttaactttctaaaagtgacaaacttaaatgtaaacagaatataattgtagatgtcccacagtaaatcatgttagtwgctatcagaaatattcttataatacttccatagagttgatagtcgggaatcatgagattcaagccaatcaatatgactgatgaataattagttgccctta

SEQ ID NO: 1932 - DNA, 201 bp, Homo sapiens
atatccaagaactgtggcaagaactgtagggcaactacgaaagatataacctgtaataggagtaccatagtacaaaggaacagaagcaatatttgaagaartgaagactaagaattaccccaaattaatgtcatacaccaaaccacagatctcagaagtttagagaacaccaagcagaataaatgcaaaaaaaaattaaac

SEQ ID NO: 1933 - DNA, 201 bp, Homo sapiens
tgtaccttcaaataaaaagtagagtggggtggaagtagggagagcattaggaaaaatggctaatgcatactggacttaatacctaggtgatgggttgatasgtgtagcaaaccaccatggcacatgttcacctatgtaacaaacctgcacatcctgcacatgtaccccggaacttaaaaaaaaaaaagaaagattttgtga

SEQ ID NO: 1934 - DNA, 201 bp, Homo sapiens
agactggagatgaagaggtcaaccaggagttcatcaatatgaatgaaagtaagttatcacaaaaaaataatattctttcttataaatttaaaataacagcygtacttgatgaatttttttttagaaacatgtcataagatgtagtttttgaataatgcatgtagagaataccttgtgaaagtaataggattgtgttttcat

SEQ ID NO: 1935 - DNA, 201 bp, Homo sapiens
ctttcataggagagctcttttttatagtgatttttggcaatatgggatattacttatttttattttatccttggaaagtggaatcttttgaattgttattyagtaatatcattaggcaaaatgtgtctttaaatattttttctgattatcaagaaagtacatttgaaaagtataaagacaaaaataatccataatccaaac

SEQ ID NO: 1936 - DNA, 201 bp, Homo sapiens
aaggtcacagaaagggtggtctaatgttttggttcctgcagcccagagaacaagctatcccatcccacaggagccttggcgaaaagctccccggccggcgmaaggccagacttctcgcctccactgtgttgattgcggttgccagggcagcggcgcattgctccccgcctcgtcctggtgacgtcacagagcaatgtccaa

SEQ ID NO: 1937 - DNA, 201 bp, Homo sapiens
taggagagctcttttttatagtgatttttggcaatatgggatattacttatttttattttatccttggaaagtggaatcttttgaattgttatttagtaawatcattaggcaaaatgtgtctttaaatattttttctgattatcaagaaagtacatttgaaaagtataaagacaaaaataatccataatccaaactcaaaa

SEQ ID NO: 1938 - DNA, 201 bp, Homo sapiens
aatgaaaacaccagactagactgaaatatgtgggagcaaggcagttactgacagttgataccttaatacttattcccattatttttctgtttgacataggygatgctcatgcttttgatgaggagtggcaaagtgaggttttgaagtacaaaccaggacgacacaatctaggaaacactagaatgagaagtgttggccatg

SEQ ID NO: 1939 - DNA, 201 bp, Homo sapiens
tagattttattgaatgaatatttgcttgatttacaaaagggatcctcatagttgtgtttgaaagttggggacttccacatgcttatgattactttccaaarggttttttaaaaagtactaaactgtagatagataagcacaacgtttggaaaagcacagattaactgctttctctaggattttgttgccaccttgcccagg

SEQ ID NO: 1940 - DNA, 201 bp, Homo sapiens
agcacacaccctgtaatcccagctacttgggaggctaaggcaggagaattgcttgaacctgggaggcagaggttgtggtgagccaaaatcacaccactgcmctacagcctgagtgacagagcaagactccatctcaaaaataaataaataaatattatagagtttttaaatacattttgtacatactctggagctacagtt

SEQ ID NO: 1941 - DNA, 201 bp, Homo sapiens
ttcacctatgtaacaaacctgcacatcctgcacatgtaccccggaacttaaaaaaaaaaaagaaagattttgtgaggtggaaaaaaaaagtagagtgataygtatgccaaattttgaattactaattttaaagtaattttgttcttcataatctgattttggaaaacaaaaaacgactccctttctgccttctagtgtgct

SEQ ID NO: 1942 - DNA, 201 bp, Homo sapiens
aacttctttatagtgcttgttgcatataattttgctagaatagtgattctcaaacttttaacaggtaggaaatctaggaatggtagtcttaaatttccttkgcccctcaagacaaaaactcatactaaaaatcctacaagaatctggtatgtggctgggcatggttgctcacacctgtaatcccagcactttgggatgctg

SEQ ID NO: 1943 - DNA, 201 bp, Homo sapiens
cgggcagagcccaggagctcgagaccagcctgagcaacatggcaaaatcctgtctctaccagaaaaaaaaaaaaaaaaattatccaggcatggtagtgcaygcctatagtcccagctaaggaggctgaggtgggaggatcaattgagcttaggaggtcaaagctgcagtgagccatgaacatgccacattgcactccagct

SEQ ID NO: 1944 - DNA, 201 bp, Homo sapiens
catggtagtgcacgcctatagtcccagctaaggaggctgaggtgggaggatcaattgagcttaggaggtcaaagctgcagtgagccatgaacatgccacaytgcactccagctgacagaatgaaactctgtctcaaaataataatatgccatgtaagaagcttaaggttaccacttcacgctaataacaaattaaaaactg

SEQ ID NO: 1945 - DNA, 201 bp, Homo sapiens
tgatttttggcaatatgggatattacttatttttattttatccttggaaagtggaatcttttgaattgttatttagtaatatcattaggcaaaatgtgtctttaaatattttttctgattatcaagaaagtacatttgaaaagtataaagacaaaaataatccataatccaaactcaaaatactagtaatattttaatgta

SEQ ID NO: 1946 - DNA, 201 bp, Homo sapiens
acaaaaaaatttgtatggcatagtggcaggcacctgcaatcccagctactggggaggctgaggcaggagaattgcttgaacccaggaggcggaggttgcartgagctgagattgcgccattgcactccagcctgggcagcaagagtgaaactctgtctcaaaaaaaaaaaaaagaaaagaaaaagggcaatttggtggttg

SEQ ID NO: 1947 - DNA, 201 bp, Homo sapiens
taatatcattaggcaaaatgtgtctttaaatattttttctgattatcaagaaagtacatttgaaaagtataaagacaaaaataatccataatccaaactcaaaatactagtaatattttaatgtatttcttcctaatcattttatatatataaacacttttttctcaaattattattctacttttatatagtttatattgt

SEQ ID NO: 1948 - DNA, 201 bp, Homo sapiens
agttatgtaatttacttctgttatcagaaagttttgatgatcatccaaattgtatccacagtatcttttgtgaaagatgtaataattttatatgaaagctsattattccacacaaatttaaatttatatctaaaaatcaataacagtttaggattttatggttagtaattcactagtaaactatgcctcagaagatagaga

SEQ ID NO: 1949 - DNA, 201 bp, Homo sapiens
tatcaagaaagtacatttgaaaagtataaagacaaaaataatccataatccaaactcaaaatactagtaatattttaatgtatttcttcctaatcattttwtatatataaacacttttttctcaaattattattctacttttatatagtttatattgtgcttattttaatttaccattataattgtaaagttacttatgat

SEQ ID NO: 1950 - DNA, 201 bp, Homo sapiens
ctgatcgagcaagtctacaaagaataataactatgttaccacttaccagctattggagatagaaagctcagaagcaggctggcaaacctgtcaaccttaatttttttttttttttttttgagacggagtctggcactgttgcccaggctggagtgcagtggtgtgatctcgcctcactgcaacctctgcctcccaggttca

SEQ ID NO: 1951 - DNA, 201 bp, Homo sapiens
tctcattgaaggaaataaaaccaccttgttaagcttttggaaacagtattcaaggttactacttaaatacttgtttagacgtacagtctgaggtagagtctctgccaaattgtcatagcttggctctagttaatattctgccacatatacctctcattctaaacagttgataaaagtagcttgagaatactcagctaaaat

SEQ ID NO: 1952 - DNA, 201 bp, Homo sapiens
ttcaaaagagaacattatgaatgggctaaaatttttcatttgagaaaaaaagcctaggttaattttaaaaatattaaaacaactgtgtgctaccatagaatttttttagttttgataaaagtgaattcaaacttggacaagagaaacattaaagccttatctccaagcagctgcctttctgggtagacatgaattaaactc

SEQ ID NO: 1953 - DNA, 201 bp, Homo sapiens
aaatatcagattatagtgttggtatttttatgcaatatgggataaataaagatgttttttttattatgcattaaatgaattatattggataacagtaacakgttttcattaattttatttataactacagatgcttctcaacttaacgataagattacattccaatgaacccatcgcaaattgaaaatattatacatcaaa

SEQ ID NO: 1954 - DNA, 201 bp, Homo sapiens
aagtgattctcctgcctcagcctctcgagtagctgggattacaggtgcccgccatcacgcccagctaattttgtatttttagcagagacggggtttcaccrtgttagccaggctggtctcaaactcctgacctcaggtatctgcctgccttggcctctcaaagtgttgggattacaggggtgggcaccgtgccccacctac

SEQ ID NO: 1955 - DNA, 201 bp, Homo sapiens
taatattgaaatatgtgaactgccctaaactagtacattgaacaatgtctaacacatgccaagtttctctcaaaatttgtcccatagccccttgtgagttygctatggcatctcattctcagaggacctctgtgcactgtttaagacaaagggattaggacaacgaaaccctagacacattgagcttaattgtggtaaagg

SEQ ID NO: 1956 - DNA, 201 bp, Homo sapiens
aattgattcacacttaacaatttcttttctccacaatgaattatatttaacacacttttggggataagggagaaaaagaatatgagtttatgtttatttcrggtaatctatttgacccacccgttttacctcaacccccaaacaaaatgagtatccatttcttaagttaaacataaagaattcataaaggtgacaaactcc

SEQ ID NO: 1957 - DNA, 201 bp, Homo sapiens
gaggtaggagttagaaaatgttccatgggtaactcatttgtgcattttagaactacttgaaactctgtaccttcaaataaaaagtagagtggggtggaagkagggagagcattaggaaaaatggctaatgcatactggacttaatacctaggtgatgggttgatacgtgtagcaaaccaccatggcacatgttcacctatg

SEQ ID NO: 1958 - DNA, 201 bp, Homo sapiens
gataaacatgaaaaataaaatgaaacatattttttagaaaaggaatgcatgatattttacatttctttttaatttgaagaaagattgtgggattagacagmggtccccaaactatcttagttcatgagcccttagttcctcagtaattttttcattgtgccccctaggtttaaagaaatactgaataggtccgttattgta

SEQ ID NO: 1959 - DNA, 201 bp, Homo sapiens
tctttcagttatcactatctatagcctttttcaaatgcaaggagccatatcataaaaattgaaggtaaaattgttgcagttaactttttttaagcctaatytcctttattcatcacaaagcttttgcatagaccttttaaatatacaaaatagtggccagaactctgcttacagactaccatctttcattaccaccatatt

SEQ ID NO: 1960 - DNA, 201 bp, Homo sapiens
aactacttgaaactctgtaccttcaaataaaaagtagagtggggtggaagtagggagagcattaggaaaaatggctaatgcatactggacttaatacctargtgatgggttgatacgtgtagcaaaccaccatggcacatgttcacctatgtaacaaacctgcacatcctgcacatgtaccccggaacttaaaaaaaaaaa

SEQ ID NO: 1961 - DNA, 201 bp, Homo sapiens
agtaagcatacagaagaactcttcctctgtgcttagggtgaaaaggaccatcagttactctttcagttatcactatctatagcctttttcaaatgcaaggwgccatatcataaaaattgaaggtaaaattgttgcagttaactttttttaagcctaatctcctttattcatcacaaagcttttgcatagaccttttaaata

SEQ ID NO: 1962 - DNA, 201 bp, Homo sapiens
atgctgaaacgggcagagcccaggagctcgagaccagcctgagcaacatggcaaaatcctgtctctaccagaaaaaaaaaaaaaaaaattatccaggcatggtagtgcacgcctatagtcccagctaaggaggctgaggtgggaggatcaattgagcttaggaggtcaaagctgcagtgagccatgaacatgccacattgc

SEQ ID NO: 1963 - DNA, 201 bp, Homo sapiens
gcctccttcacatcttgtgcttatactattttaaagagaaaaacaatttaaggtcttataaaacaattttgtttgccttgaaatttatttagaaattttcraaattttgtgtatatgttctctgagctttattctgagtccagaggaaaagaaaatatcctctttcctggatgggctgtgccatctcatcttgggctgtga

SEQ ID NO: 1964 - DNA, 201 bp, Homo sapiens
ttttccccgaaagaaagacttgcggctcggaaccgagggcggcatgcccaaggtcacagaaagggtggtctaatgttttggttcctgcagcccagagaacragctatcccatcccacaggagccttggcgaaaagctccccggccggcgcaaggccagacttctcgcctccactgtgttgattgcggttgccagggcagcg

SEQ ID NO: 1965 - DNA, 201 bp, Homo sapiens
ggataaacataatattagacatggttgctgtaaaggttaaacgagaaaacatatgtgaagcacttagtgcaatccttggaatatatgaagtgtaaatgagrgctattaccctattaggcaattttcagtttacttggctcatctcattcctcactcagaaggtgagttttaaggcatatgagtaggactgtacattatata

SEQ ID NO: 1966 - DNA, 201 bp, Homo sapiens
ctccaaggtaatgtgtgaataaatctgagctcttttggaataggtttatgtatacaaatactatgaaattcagaggaaaagctctttctacttggacttaygagcagaagacagaatttttgagcttcctcctttgagcttcctcctttgagctggagttgcaaggaaaatttcttttttttttttttttttgagacagag

SEQ ID NO: 1967 - DNA, 201 bp, Homo sapiens
atctacaaaaagtttatacgtgtgtttctgcatcataaaaaacagatatttatagatattcgcaaaattttgagaccacattcaggatggcctcaattaaracataagcttctatggcataaacaaacctcatttgaggatgttgtttctcagacatacaggtggtcttactctgcagcagctgaaactgaagcacaagaa

SEQ ID NO: 1968 - DNA, 201 bp, Homo sapiens
attatttttattaatttttaaatcaatattaagcttttatatttaattgtattaattcaataatgaaattatattaaaatttagttggattcatctcctastttcagaaagtattttgaataatgtttttccataatagagtgtttaaattttaaattgttgtattaaaaaagaaattctggccgggcacggtggctcatg

SEQ ID NO: 1969 - DNA, 201 bp, Homo sapiens
ataaataaattaattaaattaaagagcatggcttctgtcttaggtgttctctcacacatgatggcttacttcggggaaagagctaccatgatgtaaagcarcactgtggagaggtccacctgaatgagcttagaagcagatttttgagactagccaatagctgtgtgaaggaacttggaagtggattctccaccagtcaag

SEQ ID NO: 1970 - DNA, 201 bp, Homo sapiens
tatgctaaccaaacagaagaaccaacacttaaggaatcaaaagttaatgaaacaaagaagattctagaaaatagtgtaactaaaatcttgaggagactttmatttctactgtgaccaacagagctccaactggaccaactctcttgcagataactttataagcccaggatgaaatacaaaaacaacttactggaaaagatg

SEQ ID NO: 1971 - DNA, 201 bp, Homo sapiens
tcggtgtcacgcacctcctatcccggcgggcaccgcctgcgccgcggcgagtgaggcgtcgtccgtactggaggctagctcttgtcgcggccgcggcgagwtaacatcgtttttccaatctgtccgcggctgccgccacccaagacagagccagaatgttcaggatgctgaacagcagttttgaggatgaccccttcttct

SEQ ID NO: 1972 - DNA, 201 bp, Homo sapiens
cgtctagatactgctgtgttccttggcttctggcctcttcctccatttttaaagccagcagtgtagcatcttctgattatgacactactatctccttctcwtaaggacccttgtgattacattgggcccactgggataatccaggataatcttcccatctcaaaatccttatacactttagcaaaatgtggtaaaaactga

SEQ ID NO: 1973 - DNA, 201 bp, Homo sapiens
ttatgacactactatctccttctcttaaggacccttgtgattacattgggcccactgggataatccaggataatcttcccatctcaaaatccttatacacwttagcaaaatgtggtaaaaactgaagacctaacaaagattcatggttgtgtggctgaatatattcatgttaagagaatgaaaaaggcaagtccaagactg

SEQ ID NO: 1974 - DNA, 201 bp, Homo sapiens
gtgtcacgcacctcctatcccggcgggcaccgcctgcgccgcggcgagtgaggcgtcgtccgtactggaggctagctcttgtcgcggccgcggcgagttarcatcgtttttccaatctgtccgcggctgccgccacccaagacagagccagaatgttcaggatgctgaacagcagttttgaggatgaccccttcttctcgt

SEQ ID NO: 1975 - DNA, 201 bp, Homo sapiens; identical to SEQ ID NO: 262

SEQ ID NO: 1976 - DNA, 201 bp, Homo sapiens
ggcctgaactatattctttggaagttcattgagaaagggtatatacctaaaggattataaaacatgctgctataaagacatatgcacacgtatgtttatcrcggcactattcacaatagcaaagacttggaaccaacccaaatgtccaacaacgatagactggattaagaaaatgtggcacatatacagcatggaatacta

SEQ ID NO: 1977 - DNA, 201 bp, Homo sapiens
tgtaggaagatgatggagcaatattatcaaaatactgagaggaaataatggagatttatatgcccaagcaagccatggtttaagtttgagtgtgaaatgartttagacgtaagatactaagggtttactgtgttcaaattactagatgttagaatccaggaaggaaataataagatacaagaagcagtggtaattcagaag

SEQ ID NO: 1978 - DNA, 201 bp, Homo sapiens
actttttctaatttgagcaaagatgccattatggactagaggcagccctactgggagtttgaagaccttgggatctatgctcttacaggtcacttaatcgstatgcaccattttcccatctttcaaaaagatataaagcaaaactgttagaggactggtaagtcagctgactgtaaagaagataaacatgaaaaataaaat

SEQ ID NO: 1979 - DNA, 201 bp, Homo sapiens
gccttaagtctgctcagtaatttccagcagcaaaatgttcttttctcctttgtgttgctaatttaaagcagtagttgaaaatgactgtatatgacgggaaraatttaatttgcagtcactccactcttcccctcactttctttttggatgatagattattgcccccaggtgctattttgctgtagggaatctcagaaataa

SEQ ID NO: 1980 - DNA, 201 bp, Homo sapiens
ggcggcatgcccaaggtcacagaaagggtggtctaatgttttggttcctgcagcccagagaacaagctatcccatcccacaggagccttggcgaaaagctscccggccggcgcaaggccagacttctcgcctccactgtgttgattgcggttgccagggcagcggcgcattgctccccgcctcgtcctggtgacgtcacag

SEQ ID NO: 1981 - DNA, 201 bp, Homo sapiens
ctctcctgcctcagcctcccgagtaactgggattacagacatgtgccaccacgcctggctaattttgttttttaggagagatggggtttctccatgttggycaggctggtctcaaactccagacctcaggtgatctgcccacctgggcctccgaaagtgctgggattacaggcatgagccaccatgcccagccgctttgct

SEQ ID NO: 1982 - DNA, 201 bp, Homo sapiens
tcatagtaactttcagaaacctacctttccaatgatatgacatcatctaaaacaatgtagtgcaatctaatattgaaatatgtgaactgccctaaactagyacattgaacaatgtctaacacatgccaagtttctctcaaaatttgtcccatagccccttgtgagtttgctatggcatctcattctcagaggacctctgtg

SEQ ID NO: 1983 - DNA, 201 bp, Homo sapiens
cagatgggtgcccgcctagcacagcacaatttttcaaactttagaaacagactgaatgttgccaccaatctttcctgttccacattgacaggtacttcatyttcatcatagtaactttcagaaacctacctttccaatgatatgacatcatctaaaacaatgtagtgcaatctaatattgaaatatgtgaactgccctaaa

SEQ ID NO: 1984 - DNA, 201 bp, Homo sapiens
gaagataaattaaggttgattgcaggaaaataaaattacatttcttgcacatgagtttgggagtttggggatgaagcttggcactcaattaactcctatgyagcggaaagaattcaagattaggaacagcgctgccatggacatgtatacaacacctaagcgagcaccagtcaaatcatatacattacagccttgtctatt

SEQ ID NO: 1985 - DNA, 201 bp, Homo sapiens
agaagttcttcagagagaaggaaaatcatacaagtcagaaactctgatgtacattaaaaaagcaagagcatcagagaataagttaaggtaaaataaacacrtttatttttcttattcttaatggatctgatagataacagtttgttcaaataataataggcacacacacatttaatggattgaatgccaatctacctctta

SEQ ID NO: 1986 - DNA, 201 bp, Homo sapiens
cccacctactattctactctttatgagatcaacttttttagattccatatatgaatgagatcatgtagtatcaaattcatcattttaaatattcttctgtrtcatcaatttttaaaatattttcccacaatacttttgctcaccatccactttttgtaccccagaccgtccatctgagatcttttttttttccttcctgaa

SEQ ID NO: 1987 - DNA, 201 bp, Homo sapiens
cagatatttatagatattcgcaaaattttgagaccacattcaggatggcctcaattaagacataagcttctatggcataaacaaacctcatttgaggatgktgtttctcagacatacaggtggtcttactctgcagcagctgaaactgaagcacaagaagcccttggaactatcatcaggacatgtaagtcccatgtacta

SEQ ID NO: 1988 - DNA, 201 bp, Homo sapiens
ttggccttaatccagaactattttaacaccatcttttatcacataacttactccatttcaagtttttttttaagtgtggcctccttcacatcttgtgcttrtactattttaaagagaaaaacaatttaaggtcttataaaacaattttgtttgccttgaaatttatttagaaattttcgaaattttgtgtatatgttctct

SEQ ID NO: 1989 - DNA, 201 bp, Homo sapiens
tagtatgaaagtttataaatatttagtacgacccagaattttctatttgatacgaaacaggaactgtgaatcttctgagctacaaaaatgtaattctgatygagcaagtctacaaagaataataactatgttaccacttaccagctattggagatagaaagctcagaagcaggctggcaaacctgtcaaccttaatttttt

SEQ ID NO: 1990 - DNA, 201 bp, Homo sapiens
aaacttgctcccatattcattatagatatttgtctcatttgaaaaatgtattgattaaaaacctggcagtgccaagtttgaataggaaatccaggtcgcayttagagaaggcatgctctttatggatgacctataaatttctggccctaacagtggcattttctcttaaccggcactgtccaatggcattttctgaaatga

SEQ ID NO: 1991 - DNA, 201 bp, Homo sapiens; identical to SEQ ID NO: 279

SEQ ID NO: 1992 - DNA, 201 bp, Homo sapiens
gaaggtctagcaatttttaattggatgctggacatcataatattacaattttgttgtcttcctttacagtgtttgacatttgttttaacaggcaatacgtwacttacagatctgtttgagcttgtcaaggcatgtttttaaactttgttagggtgggtctagtgcagctttaattcaaagttagtttagccctaatgccaa

SEQ ID NO: 1993 - DNA, 201 bp, Homo sapiens
gcattttcaaagaactgaaacaaatttagttgggatagaacatcaaacacaatagcagaataataggaagaaaccaagagttgcaatgcagagggaaacarggccaggttgagggctcccagctttattcagggaaccttagaattgccgaagacttttaaatgtgaagtgacaggattacatatgttttaggaagctcaa

SEQ ID NO: 1994 - DNA, 201 bp, Homo sapiens
taagtgtttcactgagaagttgatggtactataaaaatagctgctgggagaaagttttcttatttcagtggtcaaagagagtttccttgaggaaatcacayaaactagggcctaaataatgaataaaaattaattaggggaaaagtcagatgaagagagttggaaggatattccaggagtaggaaacaacaaatatcacat

SEQ ID NO: 1995 - DNA, 201 bp, Homo sapiens
cagatgttctctttcagtgttataaagatgtcacccattttgactttcattatctgagttaaaaagttatctataattactattattatcctttgcaagtratccacttttccttttggctgctttaacatttttctctttgtttttgtctttcaattgttttcaaatgatattcctaggtatagttttccatgtatgaat

SEQ ID NO: 1996 - DNA, 201 bp, Homo sapiens
ctgcagatggattacaagggagatgccgtggccttctttgtcctccctagcaagggcaagatgaggcaactggaacaggccttgtcagccagaacactgakaaagtggagccactcactccagaaaaggtgggcatctgtgtcaatctcctgggccctgaggcaggggatgcacacattcaaagatgagggagagattgtg

SEQ ID NO: 1997 - DNA, 201 bp, Homo sapiens
tacttacaaagtgcttagaagaattcctagaagatagtaagtgttcagtaaatgctagctaataatgttattattagttctgtaattagtatggtgagtayaaaaaatatggagaatagcaaaaagattaatcatgagataaaaaaggaatgtccacgttttatgttctgtctcttagcaatatatttttggcatcttaga

SEQ ID NO: 1998 - DNA, 201 bp, Homo sapiens
ctgaaagttccctccctgtcatgtcttctaagaaagtggcacttgattgagaccaaagtagtcagtggtctgaagatattcattaactgtcatggaggtakggaccaacccttcaaggcttctgtcttctgcacccagtgctgcatagggaatacactgttgagacaagtcttgtgttcactccatgttagacaccattat

SEQ ID NO: 1999 - DNA, 201 bp, Homo sapiens
atgcccactctcaccacttctattcaacatagtactggaagtcctcgcaggagcaatcagacaagagaaagaaataaagggcatccaaatcagtaaagagsaagtcaaactgtcactgtttgttgatgaaatgatcatatacctagaaaaccctaaagactcctccaaaaatctcctggaactgataaattaattcagcaa

SEQ ID NO: 2000 - DNA, 201 bp, Homo sapiens
tttggcatcttagaatgattttagcagcgttccctggtgctcatagtctgggaagagagaaggaaggctgcagtgtaactggaattcaagaaagagattgrgcaatgccccacgggagggcaggaaaggtgctgaggagtttctgagcagagagagatcactttcagctgggactgagggacagcttcaaggaggcggtgg

SEQ ID NO: 2001 - DNA, 201 bp, Homo sapiens
tgggtgaaagttgaaagcattccctctgagaactggaacaagacaagaatgcccactctcaccacttctattcaacatagtactggaagtcctcgcaggarcaatcagacaagagaaagaaataaagggcatccaaatcagtaaagaggaagtcaaactgtcactgtttgttgatgaaatgatcatatacctagaaaaccc

SEQ ID NO: 2002 - DNA, 201 bp, Homo sapiens
gacacaccttaatgcaataaaaaccatctatgacaaacccacagctaacataatactgaatgggtgaaagttgaaagcattccctctgagaactggaacamgacaagaatgcccactctcaccacttctattcaacatagtactggaagtcctcgcaggagcaatcagacaagagaaagaaataaagggcatccaaatcag

SEQ ID NO: 2003 - DNA, 201 bp, Homo sapiens
cggcaatggtcccgcttccatactctgagtcctgagagcagcacaatgagcaatgggccacggttgcactacagcaaaggcagctcgtgtcctttgagtcmgacccaccgtccctccttccctcgttgcctgacaggctgtgctggcacctctatgtcacccccattaccgagggcatctctggcagcctcagtagagccc

SEQ ID NO: 2004 - DNA, 201 bp, Homo sapiens
atgattaaaaccctcagcaaaatcggcatataagggacacaccttaatgcaataaaaaccatctatgacaaacccacagctaacataatactgaatgggtraaagttgaaagcattccctctgagaactggaacaagacaagaatgcccactctcaccacttctattcaacatagtactggaagtcctcgcaggagcaatc

SEQ ID NO: 2005 - DNA, 201 bp, Homo sapiens
agctaataatgttattattagttctgtaattagtatggtgagtataaaaaatatggagaatagcaaaaagattaatcatgagataaaaaaggaatgtccamgttttatgttctgtctcttagcaatatatttttggcatcttagaatgattttagcagcgttccctggtgctcatagtctgggaagagagaaggaaggctg

SEQ ID NO: 2006 - DNA, 201 bp, Homo sapiens
tgctcagacatggctccagcctcctgcagagtaggcaagaagatgtcctacagtagcacaaaggagatagtaggtgtgaagaagtgactaatgacacttgytgttcacaactagttttttccagaaactatgaggaaccccaagtagtcagcagtgggtgacggctgtcagcatccctccgacagccttgcttccagtggc

SEQ ID NO: 2007 - DNA, 201 bp, Homo sapiens
tgtgtaccacttggatgacaatacccatcactacaatgaactccgtgcccagacacgcagcagggtaggatataggtggtgcatgtctaggaaggagccawcccagaaagtgctacagtggtggaaacccctgaccctactccaaggaggtgaggctcagatcctgaagaccaggtaagctttaaataaagagaaaagggt

SEQ ID NO: 2008 - DNA, 201 bp, Homo sapiens
tgaaattgctatcaggtcatttagtctgaagtctccttggggccaaagccatgtcagctgaggcttgaaggggaagcagacagatgtgactagaactgcarctcatcagcaactgactgccagtgctcagggcacctgaaggagcacagcaaaaaggacagccttttgctccaggtttccactttttgagagatatgaaca

SEQ ID NO: 2009 - DNA, 201 bp, Homo sapiens
actagaagggattggggctctgtcttcaacctccttaaacaaaacaattatcggctaagaattttgtatccagtgaaactaagcttcatacatgaaggaargatacagtctttttcagacaaacaaatgctgaaagaattcaccactaccaagccagcactacaagaactgctaaaaggagctctaaatcttgaaacaaat

SEQ ID NO: 2010 - DNA, 201 bp, Homo sapiens
caatcccagtgctttgggaggccaaggtgagaggattacttgaggccaggagtttgagactagcttgggcaacatagcaagaccctgcctctatgcaaaakgaaaaaaaacatatatagctggacatgttgatgcatgcctatagtcccaactacctgggaggatgaggaaagaggatcacctgagcccaggaatttgagg

SEQ ID NO: 2011 - DNA, 201 bp, Homo sapiens
aaccaacccaaatacccatcaatcaatgagtggataaaaaaactgtggtgtatatatatatatgatggaatactactcagccataaaaaggaacgaattarttgcattcacatcagcctgggtggaccttgagactattattctaagtgaagtaactcaggaatggaaaaccaaacatcgtatgttctcactcataagtgg

SEQ ID NO: 2012 - DNA, 201 bp, Homo sapiens
aggtatacaggcagcaaatagcatgatgaatggaatactacctcacatctcaatactaatgttgaatggaaatggcctaaatgctcagcttaaaagatgcrgaatggcagaatggataagaattcaccaaccaagtatctgctgccttcaagagactcacctagcacacaaggactcacataaatgtaaggtaaaggggtg

SEQ ID NO: 2013 - DNA, 201 bp, Homo sapiens
tacccatcaatcaatgagtggataaaaaaactgtggtgtatatatatatatgatggaatactactcagccataaaaaggaacgaattaattgcattcacakcagcctgggtggaccttgagactattattctaagtgaagtaactcaggaatggaaaaccaaacatcgtatgttctcactcataagtggagctaagctatg

SEQ ID NO: 2014 - DNA, 201 bp, Homo sapiens
cttaaacaaaacaattatcggctaagaattttgtatccagtgaaactaagcttcatacatgaaggaaagatacagtctttttcagacaaacaaatgctgaragaattcaccactaccaagccagcactacaagaactgctaaaaggagctctaaatcttgaaacaaatcctggaaacacataaaaacagaccctctttaaa

SEQ ID NO: 2015 - DNA, 201 bp, Homo sapiens
ggtatgggtagtggcatggtccgccatagtgaacagtgtcatgggaagactggttgcttctcacgctgggaaatgcctctctcccatggctcaggctgccracagacagagcaggagtggcacatattaacaagagagcaccatttctctgtctgtttctctctccagtctgttggatttgcacttgccaaggttttcaat

SEQ ID NO: 2016 - DNA, 201 bp, Homo sapiens
ggttgttgtctagaggcagtttggttgagaaggattaattcagtgtttgcaagcaatctgagctgctcagtcagtcatcccagctctgcaaattagtatgwttaaataaattcacaaagactcagtttgatcatccctgatatgggaataatacttatttcttattaatttttatgacaatttaaagagataatgtctaac

SEQ ID NO: 2017 - DNA, 201 bp, Homo sapiens
agtttggttgagaaggattaattcagtgtttgcaagcaatctgagctgctcagtcagtcatcccagctctgcaaattagtatgtttaaataaattcacaawgactcagtttgatcatccctgatatgggaataatacttatttcttattaatttttatgacaatttaaagagataatgtctaacacatggaaggtgcttag

SEQ ID NO: 2018 - DNA, 201 bp, Homo sapiens
aatttaaagagataatgtctaacacatggaaggtgcttagtagatggaaaaataccttttggcttgttagaagctaagttcctctgaaatggaacaaaatygtaggctgttagtgctcaaacactggtgacttgtcctagagactgagccaggcctaaattctggtctcctggctctgtaaccattccacattttttgcca

SEQ ID NO: 2019 - DNA, 201 bp, Homo sapiens
cagagttgctctcttgaaaagagttctcatggccttatgggttttgtgtcctaagccaagtggaagcaccctttcagtcgctaccagacccagaagcaggmaagtttctttgtggatgagaggacttctctccaggtccccatgatgcaccaaaaggaaatgcacagattcctctatgaccaggatttggcttgcaccgtc

SEQ ID NO: 2020 - DNA, 201 bp, Homo sapiens
caggtcttgatcaactccagctgcaaaagcccaacatccatctcgattaggctcaccatcttgtcctttactaactgtgtgatcttggcaattttctcacmttttttgggcctctactgtaaaactaagaacatgatacctgcctcattgggttgctcagtagattcattgagtttctacccatagagaatgtagaactta

SEQ ID NO: 2021 - DNA, 201 bp, Homo sapiens
tccccatttcagtttgctgtctttgcctcactaattgtactttgacataaagacttcttttctctctttgtgctagccaagtgggaaaagccctttcaccytgaatatacaagaaagaacttcccattcctggtgggcgagcaggtcactgtgcatgtccccatgatgcaccagaaagagcagttcgcttttggggtggat

SEQ ID NO: 2022 - DNA, 201 bp, Homo sapiens
aatcccagtgctttgggaggccaaggtgagaggattacttgaggccaggagtttgagactagcttgggcaacatagcaagaccctgcctctatgcaaaatraaaaaaaacatatatagctggacatgttgatgcatgcctatagtcccaactacctgggaggatgaggaaagaggatcacctgagcccaggaatttgaggt

SEQ ID NO: 2023 - DNA, 201 bp, Homo sapiens
gctatgattgtgccactgcactccagtctgggcaacaaagctagatcctatctctaataaaaaattattattatcattatattgttaaagggtgcttctaytttaattaaaacatgtttaaaaaattaaatattaagaacattgtaaacattaaagttcctgttttatgtgatctctaaactatttcccatctcacttgct

SEQ ID NO: 2024 - DNA, 201 bp, Homo sapiens
attttgtgtttgggcagagattaaaacaccaaataagaggcacgggccaaggggagaggccaggatttaagagattattcctgttgtccatgaagctccayggctctagtcagttgctaatttcagccccatagtccctggctcctttggggtgagtcttctccttgcccccatcacagaagggagtgccatagactcttc

SEQ ID NO: 2025 - DNA, 201 bp, Homo sapiens
gtcagccagaacactgagaaagtggagccactcactccagaaaaggtgggcatctgtgtcaatctcctgggccctgaggcaggggatgcacacattcaaaratgagggagagattgtgctaacagctgttggataatcacttctgcacagtgagcaccaactgcatgcaggacagagagcctggggctgtctatacatgtt

SEQ ID NO: 2026 - DNA, 201 bp, Homo sapiens
agaaactcagggtttcagtcttatattccaggaggcctccttcatttcacctccctggttttttgttgttgttgctttttttttttttttttttttgagamagagtttcactcttgttgcccaggctggagtgcaatggcctgatctcgactcactgcaacttccgcctcccgggttcaagtgattctcctgtctcagcct

SEQ ID NO: 2027 - DNA, 201 bp, Homo sapiens
gagactagcttgggcaacatagcaagaccctgcctctatgcaaaatgaaaaaaaacatatatagctggacatgttgatgcatgcctatagtcccaactacmtgggaggatgaggaaagaggatcacctgagcccaggaatttgaggttacagtgagctatgattgtgccactgcactccagtctgggcaacaaagctagat

SEQ ID NO: 2028 - DNA, 201 bp, Homo sapiens; identical to SEQ ID NO: 280

SEQ ID NO: 2029 - DNA, 201 bp, Homo sapiens
cgctcaccatgtgctgggtcccgtgctgcacaatttgtgccttatcacactcagtcctctgaacaactctgtaaggtaactatctctgttttacaaaggcraaacagagaagtccagagaggttacttgtccaccacgaatgtcagggttagattcaagcccagccctgttggggtttgaaattgctatcaggtcatttag

SEQ ID NO: 2030 - DNA, 201 bp, Homo sapiens
caccacagtttggctctcaggaagccacatccctaggaaaggggtgagagtactacatcaagggagcaccccatgggacaaacgaatctgaacagcagccytgagccctagatcttccctctgacataggctatccaaatgagaaggaagcagaaaaacagtgctggtaacatgacaaaacaaggttctttaacaccctca

SEQ ID NO: 2031 - DNA, 201 bp, Homo sapiens
ctttcccctctggctgagcacagacctcccctggccttgcattggattcatacaccttccttctctaaaatgaccacttactgttgtatctcagggtcaaygcacagggttggagctcctctgtaaagttgtgttaaaggaaatgaaatctttctgatgaaactgaacaggtgagggtgctgtaggcagggctggggagac

SEQ ID NO: 2032 - DNA, 201 bp, Homo sapiens
gtgggagtgagactggtcttttgggttgtgtgggagctgggtgaggcctgtaactgctggctttcccccacttccctgacaacttgcatgacacagcagargcagccataattctcctgggaacagctccattgacctgggaaccacacccccattccccacagcagacatagcaagccctgcccaaagagagtctgagct

SEQ ID NO: 2033 - DNA, 201 bp, Homo sapiens
gccataaaaaggaacgaattaattgcattcacatcagcctgggtggaccttgagactattattctaagtgaagtaactcaggaatggaaaaccaaacatcrtatgttctcactcataagtggagctaagctatgaggatgggaagacatgagaatgatacaatggacttcggggactcgagagaaagagtgggagcggggt

SEQ ID NO: 2034 - DNA, 201 bp, Homo sapiens
gatgaagggcaagggggattatgaaggcactgtgcttgtgaaaaggatgatggggggaaggacatccaggtcatgggggggaaattataaaatttgtgagragagaaaagccttcagacggatgtgacctattggagcacacacctgctttgctttcccctctggctgagcacagacctcccctggccttgcattggattc

SEQ ID NO: 2035 - DNA, 201 bp, Homo sapiens
gcaagtgacttaacctcacagagcctcagtttcccatctacaaagtagggatgactgtgcctctctcacattcttgcggtgagggtgaccaataaagaacrtagcctaaaagaaaaaaaaaagagggggaaaagtggcagacggaaggcaagactagattgcagctcgcacttggacagagcactgtgtggacctttgaaa

SEQ ID NO: 2036 - DNA, 201 bp, Homo sapiens
gggcatctctggcagcctcagtagagcccttgctcccatcagatccaaaggctcctcttctgggggccccggtgccccacacacctcggatgtgccagggrcctcatgtaggctttctcatgctattttataaggaaagaaacaaaacagaaaggagttatgctggagagctggcagaagtcccaggggaacctaaccccc

SEQ ID NO: 2037 - DNA, 201 bp, Homo sapiens
gggcagatactttgaaaaaaaagagcccttcctgtttgctgtgcattgtcttcataccagttcccagaattgacctgacaaatattgaccaggttgctgtsatcttcaaacaccattttcctgtgggtagaggtgatgcagtgctgaagacctgggcccctgctcagtgcctttgctctgtaagtactttgcctgtgccca

SEQ ID NO: 2038 - DNA, 201 bp, Homo sapiens
ggcatccaggaggggcatttgtagcagagtatgctatgcctgagcaaggggtaggtgagtgggaagagaagggagggaggtggaccctgggctgttgctaytggtgttgactgcagaggctgcagataaattcactggccagcagtggggccgaagagaggggaagcagtcaactctcaaggccacatgtcatagggttcc

SEQ ID NO: 2039 - DNA, 201 bp, Homo sapiens
atttggagaatacaaaaatctgcaaagaagaacttaaaagtcacttcaattttgtcatgaagagattctctcataaataaatactcatttaattctaagcktgttctacttacttgggagacatgggtgatcatgagccaatgatttcacttcacaggtttctcaaagtagtaagaagaaaggtctttctctgtttgtgaa

SEQ ID NO: 2040 - DNA, 201 bp, Homo sapiens
ggcgtggaggccgcgtctaataggccacctctgctgatgggaatgcggattctttaggaggcacaacccagcgtcagtgggggccccctgagagccacctrccccactgccagcctccacagaaaggggcacagacccctggtgcttgtggcatcctggcgcctggcagcacccgcttcccctccatgtggctgatgtcct

SEQ ID NO: 2041 - DNA, 201 bp, Homo sapiens
ctttatttcacaaacagaacaagctgccactgcactccagcctgggcaacagagcaaggccctgtctcaaaacaacaaaaacaaacaaacaaacaaaaaasaaaaacagaagagctgacactcaaagagtaaaaacaactaacctaagccacagggccttcctgtgctgacttagaacaaggaccaatggccagttatgaa

SEQ ID NO: 2042 - DNA, 201 bp, Homo sapiens
ccattaaccccagtcagtgcccttttccacaaattctcccaggtaactagcttcatgggatgttgctgggttaccatatttccattccttggggctcccargaatggaaatacgccaacccaggttaggcacctctattgcagaattacaataacacattcaataaaactaaaatatgaattcatctgtcaacagagtcct

SEQ ID NO: 2043 - DNA, 201 bp, Homo sapiens
acccaagcccaaaagaaacaagacttggggcgtggaggccgcgtctaataggccacctctgctgatgggaatgcggattctttaggaggcacaacccagcrtcagtgggggccccctgagagccacctgccccactgccagcctccacagaaaggggcacagacccctggtgcttgtggcatcctggcgcctggcagcacc

SEQ ID NO: 2044 - DNA, 201 bp, Homo sapiens
cgttgcctgacaggctgtgctggcacctctatgtcacccccattaccgagggcatctctggcagcctcagtagagcccttgctcccatcagatccaaaggmtcctcttctgggggccccggtgccccacacacctcggatgtgccaggggcctcatgtaggctttctcatgctattttataaggaaagaaacaaaacagaa

SEQ ID NO: 2045 - DNA, 201 bp, Homo sapiens
gacttcaggtgggtctcccctactcaacccaagcccaaaagaaacaagacttggggcgtggaggccgcgtctaataggccacctctgctgatgggaatgcrgattctttaggaggcacaacccagcgtcagtgggggccccctgagagccacctgccccactgccagcctccacagaaaggggcacagacccctggtgctt

SEQ ID NO: 2046 - DNA, 201 bp, Homo sapiens
ttgtgaaaagcagagacttacctgaagtcacatggaggccagtaccatcgatgactcaggacatttactagccaactccccgacttcaggtgggtctcccytactcaacccaagcccaaaagaaacaagacttggggcgtggaggccgcgtctaataggccacctctgctgatgggaatgcggattctttaggaggcacaa

SEQ ID NO: 2047 - DNA, 201 bp, Homo sapiens
aggccattgttagccaaggagagagtctgggtttgtggggagcgccgggacaccggctgacgagggctaatgcgtgggctgtgaaggtctccccgggtgcygtggaccagtttcccatctcctcgcggctggctgccttcctgactccgatgacgtcatgtgtgcacacacagccctccgggtgctcagccccttccctgc

SEQ ID NO: 2048 - DNA, 201 bp, Homo sapiens
aagagagggccttttgagaccacctcttcctgaagtcttgtgaaaagcagagacttacctgaagtcacatggaggccagtaccatcgatgactcaggacayttactagccaactccccgacttcaggtgggtctcccctactcaacccaagcccaaaagaaacaagacttggggcgtggaggccgcgtctaataggccacc

SEQ ID NO: 2049 - DNA, 201 bp, Homo sapiens
accctgtttgcactgcagttccccctccagctcaggctgcattcccagccctaaaacaaggggtcttcctgctcctgtaccactttgatccctggaagtgraataaaggctcttctggcacattttgtaacttaaaataaagcacaagagatatcacattagtttgcaagggctatcttaataaatactacatgccaggca

SEQ ID NO: 2050 - DNA, 201 bp, Homo sapiens
actcagaagagagggccttttgagaccacctcttcctgaagtcttgtgaaaagcagagacttacctgaagtcacatggaggccagtaccatcgatgactcrggacatttactagccaactccccgacttcaggtgggtctcccctactcaacccaagcccaaaagaaacaagacttggggcgtggaggccgcgtctaatag

SEQ ID NO: 2051 - DNA, 201 bp, Homo sapiens
tccctactccacaggtggatagaggtgttcatccccagattttccatttctgcctcctacaatctggaaaccatcctcccgaagatgggcatccaaaatgyctttgacaaaaatgctgatttttctggaattgcaaagagagactccctgcaggtttctaaagtgagttgaatgaaaatatttgcaaaacagtccaagctg

SEQ ID NO: 2052 - DNA, 201 bp, Homo sapiens
gccctaaaacaaggggtcttcctgctcctgtaccactttgatccctggaagtggaataaaggctcttctggcacattttgtaacttaaaataaagcacaaragatatcacattagtttgcaagggctatcttaataaatactacatgccaggcagcttaaacaacagaaatttttgactcacagttctggaggttagaagt

SEQ ID NO: 2053 - DNA, 201 bp, Homo sapiens
acataacctagatccctcacatgtgcagttcacaatagggttcacggtcccatgagaatctaatgccactgctgatataacaggaggtggagctcaggcartaatgcgagcagtggggagctgctgtaaatacagatgaagctttgcttgctagcccgccgctcatctcctgttgtgaggaccagttcctaacaggccacg

SEQ ID NO: 2054 - DNA, 201 bp, Homo sapiens
gacaccagggactggtttcatgaaagacaatctttccacagactggtgctgcagggaatagtttcaggatgattcaagtacattacattaattgtgtactytatttctcttattacattgtaatatataatgaaatccttaaacaactcaccataatgtagtagtactagtgggagccctgagcttaatttcctgtaagta

SEQ ID NO: 2055 - DNA, 201 bp, Homo sapiens
gtctgttttggaaaatagatactatctctttaaaaattgcttctattccattttctcttctttctctgggacaatcaaacatatatcagacgtcttcatcrtgtgtcatgtctccttcacacttttctgcattttctattcttttttctttccgtgtgtaatctggatgctttctgcatgcctatcttaaacttctagtct

SEQ ID NO: 2056 - DNA, 201 bp, Homo sapiens
ggtggcttttgcatgattatttgctgtctcattccgcacacgcatcacttatgaggcagaaaattaccttgaagggaaatttcatgcaggacattgtatcwgcttcatcatgattatcttttatctagaaacttgatcccttgaatcctaactacgtgttgactctgaattccaatttttgtttctccagcccattgacac

SEQ ID NO: 2057 - DNA, 201 bp, Homo sapiens
actatctctttaaaaattgcttctattccattttctcttctttctctgggacaatcaaacatatatcagacgtcttcatcatgtgtcatgtctccttcacwcttttctgcattttctattcttttttctttccgtgtgtaatctggatgctttctgcatgcctatcttaaacttctagtcttttctgctatgtttgatctg

SEQ ID NO: 2058 - DNA, 201 bp, Homo sapiens
tgctcttctagcaggtggcttttgcatgattatttgctgtctcattccgcacacgcatcacttatgaggcagaaaattaccttgaagggaaatttcatgcrggacattgtatctgcttcatcatgattatcttttatctagaaacttgatcccttgaatcctaactacgtgttgactctgaattccaatttttgtttctcc

SEQ ID NO: 2059 - DNA, 201 bp, Homo sapiens
acagcagggtggcattcatttcaacttattgtattttgatttttatttaggtatagttcacataaagtacacaaatatttctgcccactatttcttcaaawttttctgttctccactgtccctcacttttttttgcctaggactccaattacacatatgttagaccattgatgttgtcccacaagtcactgggacttgttt

SEQ ID NO: 2060 - DNA, 201 bp, Homo sapiens
tgtttatataccaatttttgtctcttcccttctgtgaggctgctaaaatctctgctcttctagcaggtggcttttgcatgattatttgctgtctcattccrcacacgcatcacttatgaggcagaaaattaccttgaagggaaatttcatgcaggacattgtatctgcttcatcatgattatcttttatctagaaacttga

SEQ ID NO: 2061 - DNA, 201 bp, Homo sapiens
cccgttaacatgtttatataccaatttttgtctcttcccttctgtgaggctgctaaaatctctgctcttctagcaggtggcttttgcatgattatttgctrtctcattccgcacacgcatcacttatgaggcagaaaattaccttgaagggaaatttcatgcaggacattgtatctgcttcatcatgattatcttttatct

SEQ ID NO: 2062 - DNA, 201 bp, Homo sapiens
gaaccagcctgcatcctggggctgctatgtggttcagttaatcagtgtgccaagattctaataaagttgaccttgggttctgtgaacactaaggagcaatycttacaagggaggaacagcttctagccactcattcacaattgtcccatatctggtgttagttgtgcttagaaagttgaagatgagaacgaccctcatgtt

SEQ ID NO: 2063 - DNA, 201 bp, Homo sapiens
attcttaaaaaataagtccatgaagcagaaacatcaaaaagcatgggatttggaatttgagacctgactttgaagcccacacagaacacagacaagtcaaycatgctatttggggtaagttgcacagactctctgtggcctgtttactcatttgcaagtaaaacagcaataataagatctacatcatgggaatattgtgag

SEQ ID NO: 2064 - DNA, 201 bp, Homo sapiens
ccagggcaacacgaagaccaaagaaagcaggaaggcaaacatggccgggagggatgatggacatagggcagggtcagtggggtgaattgagggccatattsaattgcgatgcagcctccattagagatcgaaaggctactcttccatgtgtgcctctccaagaggcattcatttgaaagtagtggggaagcagaaagagat

SEQ ID NO: 2065 - DNA, 201 bp, Homo sapiens
gcctcaagtgatccacctgccttggcctcccaaagtgctgggattacaggcatgagccaccgcacccagccccttccaatctttttattcatacacagatyatattttatttgaagcatcaacaaaatactggaatggtttggtgtggtagtgaaggcttggactgggggataggatccaagttctgagtgtggccccatc

SEQ ID NO: 2066 - DNA, 201 bp, Homo sapiens
aaagtagtggggaagcagaaagagatgcccagctgcatgtgtgtaccacttggatgacaatacccatcactacaatgaactccgtgcccagacacgcagcrgggtaggatataggtggtgcatgtctaggaaggagccatcccagaaagtgctacagtggtggaaacccctgaccctactccaaggaggtgaggctcagat

SEQ ID NO: 2067 - DNA, 201 bp, Homo sapiens
tctttttattcatacacagattatattttatttgaagcatcaacaaaatactggaatggtttggtgtggtagtgaaggcttggactgggggataggatccmagttctgagtgtggccccatccgtccacttaatgagcaagtgacttaacctcacagagcctcagtttcccatctacaaagtagggatgactgtgcctctc

SEQ ID NO: 2068 - DNA, 201 bp, Homo sapiens
ccccgtggagtgagtgtgagcatggccttgtagacagtggagagtagctgtaggcctgtgggcagatgtggatgtggacaaagtagtgatggggaagtcawctgtcaattgggcagagataagaaggagtagggtgcggccagggtaaggcccagccgggatggcaccatgaggtccatttgaccactgaccatgctgcat

SEQ ID NO: 2069 - DNA, 201 bp, Homo sapiens
taaggattaaattaaataagacaaagcaagtgtttctcaacaagggcactaccggtatttgggcaggaccactcttcattgaatgtgactattctgggtgyttcaagagctttcgggagcccagctgttccccaactaaactccagcagcatccctccaccaggcattgagctgatccaaaatgtcacctctatctccttt

SEQ ID NO: 2070 - DNA, 201 bp, Homo sapiens
accttttaaccacctagaagaatggaccattttcaagataagtcaacagccatctaaaatttatattttcagagatcttgcgatgctctctgtggtggaaytgaaccatctttgtaacgccatagagtcccaggtatatttattttgaccctggaatggaggtaaatggctttcaatgttgggactaatgccctggccagt

SEQ ID NO: 2071 - DNA, 201 bp, Homo sapiens
aatttgaatttcacctctaccccatacttgctctatgatcctcagcatgtgtctctaaaagatttaccatgtgttgagtgcctgacctgtgccagtctctrtgctgactggatactctgatgataaagccaactttataggttgtgcttgagatagaagtgcctggcatctccaggcagagttttcatggatgccaccgta

SEQ ID NO: 2072 - DNA, 201 bp, Homo sapiens
agacagtgaaaaataatcatggctgggtgcagcagctcagacctacaatcccagtgctttgggaggccaaggtgagaggattacttgaggccaggagtttragactagcttgggcaacatagcaagaccctgcctctatgcaaaatgaaaaaaaacatatatagctggacatgttgatgcatgcctatagtcccaactacc

SEQ ID NO: 2073 - DNA, 201 bp, Homo sapiens
tctttgtaacgccatagagtcccaggtatatttattttgaccctggaatggaggtaaatggctttcaatgttgggactaatgccctggccagttacagccratatgaacacacaggtccaagtaatgaaaatatcactagggacactggtgtctgtcactccacctcaaggttccatgtgtatcatagagaccatgaaaat

SEQ ID NO: 2074 - DNA, 201 bp, Homo sapiens
ccaggaatttgaggttacagtgagctatgattgtgccactgcactccagtctgggcaacaaagctagatcctatctctaataaaaaattattattatcatyatattgttaaagggtgcttctattttaattaaaacatgtttaaaaaattaaatattaagaacattgtaaacattaaagttcctgttttatgtgatctcta

SEQ ID NO: 2075 - DNA, 201 bp, Homo sapiens
tttcactgggcacacaattttagatagccagatgttctctttcagtgttataaagatgtcacccattttgactttcattatctgagttaaaaagttatctrtaattactattattatcctttgcaagtaatccacttttccttttggctgctttaacatttttctctttgtttttgtctttcaattgttttcaaatgatat

SEQ ID NO: 2076 - DNA, 201 bp, Homo sapiens
gtgtccagaatcctaatcatccacagccttgtcttcttcagtgcccctcatggcagccctgtggggcacattgtgaaggtgggatttgtggtatgagcaayagagaatcatgacattatttatggagaaaagtgacatgttcaccctcttgttttcagagaatgggtccagcttggctttggctactgggaacagggatcc

SEQ ID NO: 2077 - DNA, 201 bp, Homo sapiens
ctttatttctcttattacattgtaatatataatgaaatccttaaacaactcaccataatgtagtagtactagtgggagccctgagcttaatttcctgtaastagacggtcccatccaggggtgatgggagacagtggcagatcatcaggcattagattctcataaggagcacataacctagatccctcacatgtgcagttc

SEQ ID NO: 2078 - DNA, 201 bp, Homo sapiens
gggagccctgagcttaatttcctgtaagtagacggtcccatccaggggtgatgggagacagtggcagatcatcaggcattagattctcataaggagcacayaacctagatccctcacatgtgcagttcacaatagggttcacggtcccatgagaatctaatgccactgctgatataacaggaggtggagctcaggcagtaa

SEQ ID NO: 2079 - DNA, 201 bp, Homo sapiens
ctagcccgccgctcatctcctgttgtgaggaccagttcctaacaggccacggactggtaccagtccatggcctggggaactggggactcctgctctaagcractgtattctgttcacctttatgcctcagacttaaaaccagcaaaagtcctagagtaaaaaggcagcagcaaatgtaagcctcacctcagtgctgttctc

SEQ ID NO: 2080 - DNA, 201 bp, Homo sapiens
tatgggaaacttgtcaaatagccctagatgtcctcctacttcaattaggcatccagaccctcatattgcccaggagtcaaaccagccacgattctctaacmtgaattcgattttctgaggcagaagtgttcaagttggttatgaactagtcatgctttcaggtgcctgggtagctgtcaaaccataattataaagaagaat

SEQ ID NO: 2081 - DNA, 201 bp, Homo sapiens
gaacttcagactctgccatgtttcactccattcagatgtgaggcaggttagcttgccaaggggaactgcacttcctggcacaccattcgtgtatgtattcwttcacagttgttaaacatccactgtgttttgggctctctgtcagacccctgccccactagactctattccaccccccagccaactggcgcgggtcttgct

SEQ ID NO: 2082 - DNA, 201 bp, Homo sapiens
ctcctgggccctgaggcaggggatgcacacattcaaagatgagggagagattgtgctaacagctgttggataatcacttctgcacagtgagcaccaactgyatgcaggacagagagcctggggctgtctatacatgttcacacttgaagttcactatcacctgatgaggagtcttagtaccactcattacacagatgagga

SEQ ID NO: 2083 - DNA, 201 bp, Homo sapiens
aaacaacaaaaacaaacaaacaaacaaaaaacaaaaacagaagagctgacactcaaagagtaaaaacaactaacctaagccacagggccttcctgtgctgrcttagaacaaggaccaatggccagttatgaagggctcccgcaacgctgcctgaagcaaggtttgttttatacacaatgctcttccctcaggctctccatt

SEQ ID NO: 2084 - DNA, 201 bp, Homo sapiens
gtatctccaataaaccagaagtggagcagaagcataagaatgtgtgaggcaggcaagagatcctgtagccagagtcctaagaggatcccagaaaggcctgracatagcaggagaggctccatggaggagtatggacttgggagaaggctccatcttgatgggcccatggggatctactcctggctggttgctactccagca

SEQ ID NO: 2085 - DNA, 201 bp, Homo sapiens
atgctggagagctggcagaagtcccaggggaacctaaccccctggccctcacgctcccactttatttcacaaacagaacaagctgccactgcactccagcytgggcaacagagcaaggccctgtctcaaaacaacaaaaacaaacaaacaaacaaaaaacaaaaacagaagagctgacactcaaagagtaaaaacaactaa

SEQ ID NO: 2086 - DNA, 201 bp, Homo sapiens
actccaattacacatatgttagaccattgatgttgtcccacaagtcactgggacttgttttttattattattattttccagcttgctgtcttcagtttgartagttcctattgatatgttttcaagatcacagatcttttcttctatagtactaaatttgctgttaaacccagccagtgaatttttcatttcagatattaa

SEQ ID NO: 2087 - DNA, 201 bp, Homo sapiens
gaccagagtgcttgcaagaggtgtttgtggggacagatttataagaagtaagagagaagatactacatgtgtgaatgtaaccatgaccccaaaattctgcrtttctaactacatcttaatgggcttttgcctaatgcatgacattttattaattgaattctttttcctttttcagtttgaagattagggagttggggtggg

SEQ ID NO: 2088 - DNA, 201 bp, Homo sapiens
aataagctcaattagaaatgaaatgaaagattttaaaaccgacaccacagaaatacaaaagatcattcaaggctactattaacacctttatgtgcataaaytagaaaagctagaggagatggataatttcctggaaagatccaatcctcctagtttaaatcaggaaggattagataccctgaacagaccaataacaagcag

SEQ ID NO: 2089 - DNA, 201 bp, Homo sapiens
gcaggtttctaaagtgagttgaatgaaaatatttgcaaaacagtccaagctggaagcacctgcagaattaatcacacgctcttatttcgttgataaggaarcagaggcctgaaaggtgaagtcagggtcttctgcggccagaagaaccgaatcttgcggcctatggccaccatccctctggcatgcagcattgttatccct

SEQ ID NO: 2090 - DNA, 201 bp, Homo sapiens
acacctcctatagtacctgcataataagcgtacatgttcaacccaatggaccaaatgcataaattacacattcaaagaacctagagattatctaaaggcaygcgtgtggtcagtgataatccatttggtaatagaagtcgagtaaatttcagaagtgccagaagagagaagggagagagtgatgaagtcacaacaggagag

SEQ ID NO: 2091 - DNA, 201 bp, Homo sapiens
agggaaggaaggaagaaggagggaaggaaggaaggaaggaaggaaagaaagaaagaaagagaaagagaaagaaagaaagaaaaagaaagaaagaaagaaamagaaagaaagagaaagaaagacagacagaaagaaagaaagaaagaaagaaagaaagaaagaaagaaagaaagaaagaaagaaagaaagaaagaaagaggg

SEQ ID NO: 2092 - DNA, 201 bp, Homo sapiens
ggatacagcaaaggcagtgctaagaggaaagttcatgaccctaaatgcctacatcaaaaactctgaaagagcacaaataatctaaggtcacacctcaaggractagggaaacaaggacaaaccaaacaaaaacccagtagaaaaaaaaggaaataaccaagatcagagcagaactgaatgaaattgaaacaacaacaacaa

SEQ ID NO: 2093 - DNA, 201 bp, Homo sapiens; identical to SEQ ID NO: 296

SEQ ID NO: 2094 - DNA, 201 bp, Homo sapiens
tctgcatttctaactacatcttaatgggcttttgcctaatgcatgacattttattaattgaattctttttcctttttcagtttgaagattagggagttggrgtgggtgagtgaaggaaggagctcttgagcgtctctgtagaaggttgttgtctagaggcagtttggttgagaaggattaattcagtgtttgcaagcaatc

SEQ ID NO: 2095 - DNA, 201 bp, Homo sapiens
ccaaggatggatttcagtcctttgggggtctggtttatttcttttgggccttacccctataatgttgtctttgggagatgtcaactaagagcctgggctayttgtgagggctcctccccgttaacatgtttatataccaatttttgtctcttcccttctgtgaggctgctaaaatctctgctcttctagcaggtggctttt

SEQ ID NO: 2096 - DNA, 201 bp, Homo sapiens
gggggtgcatcttcttttatggggtactctgagatgaaatctggtacttagttctacttactgcttgctgcataacaagccaccccaaaaccgaatgactkaagacaatcacttccttggttctatgggttaactgggctcagctgggcagttttcatgtgttggagtaggtggcagctggagctgaagccactgaactct

SEQ ID NO: 2097 - DNA, 201 bp, Homo sapiens
aaggaaggaagaaggagggaaggaaggaaggaaggaaggaaagaaagaaagaaagagaaagagaaagaaagaaagaaaaagaaagaaagaaagaaaaagamagaaagagaaagaaagacagacagaaagaaagaaagaaagaaagaaagaaagaaagaaagaaagaaagaaagaaagaaagaaagaaagaaagagggaggg

SEQ ID NO: 2098 - DNA, 201 bp, Homo sapiens
agaagtgatcctggggccactgaaggggacctttgtcattggttttcagaaaatgttgagaggccccactggaatatgatgaacataatggacattttctygaggaaagtgtatctgtgagcctatgaaaaataatgcctgtagtcacaggagctcaagcctccctgaagcttagaaatccaggaactccaggttaagaat

SEQ ID NO: 2099 - DNA, 201 bp, Homo sapiens
cctccacccttcatctacccatccagcaaactatccacccatttatccatccatcagttcatccatctatccatccatccatccatccatccatccatgcrtccattcatccacctagctagccatctagctagccaaccacctatccactaatctattcatctatctatctctctatcggttcatccatccatccattca

SEQ ID NO: 2100 - DNA, 201 bp, Homo sapiens
ccccttgcttattaccagtcaggattactcttcaaagataaatggattatttcattttatttcaattcatttattcttttagcaaccacttactgaaccawgagtattggccaaagagtgggtgcacaagtagacaaaattaaggtagacaggatccctgattcatgaattgttcagtcacacaaataaatgtgaaactat

SEQ ID NO: 2101 - DNA, 201 bp, Homo sapiens
tgggcaaggcagaaaaaggggctctccaggatgaagatccctgctggggcaggaatctcatgtgtcccatgatgttgaaataatgaccccttgccaaaaaacaaaaaaaaaacaaaaccctagactaattaacagacagacaaaattcctcaaggcttggggtcctgtctggttctatctcccttccctatctctaccctc

SEQ ID NO: 2102 - DNA, 201 bp, Homo sapiens
gtaccagtccatggcctggggaactggggactcctgctctaagcgactgtattctgttcacctttatgcctcagacttaaaaccagcaaaagtcctagagkaaaaaggcagcagcaaatgtaagcctcacctcagtgctgttctcctctctctggaatctcctcccaattcttaacttatcgcattcctcattgtgctcca

SEQ ID NO: 2103 - DNA, 201 bp, Homo sapiens
taacttagaaagaaaattccactttagtcaaacaggcaaatacaaaactacacaacagaaatcgccaatcacataagtggaaatggagagaaatgaacagktttgcaaaagaattactcattcagtaaaagggttctttataaagttccatctaagttaaattatatctggtataataaaatgtgattcatttacatattt

SEQ ID NO: 2104 - DNA, 201 bp, Homo sapiens
acttctcttgcagacatattttgttccaaaatggcatcttacctttatggagtactctttgctgttggcctctgtgctccaatctactgtgtgtccccggycaatgcccccagtgcatacccccgcccttcctccacaaagagcacccctgcctcacaggtgtattccctcaacaccgactttgccttccgcctataccgc

SEQ ID NO: 2105 - DNA, 201 bp, Homo sapiens
gctcttctagcaggtggcttttgcatgattatttgctgtctcattccgcacacgcatcacttatgaggcagaaaattaccttgaagggaaatttcatgcargacattgtatctgcttcatcatgattatcttttatctagaaacttgatcccttgaatcctaactacgtgttgactctgaattccaatttttgtttctcca

SEQ ID NO: 2106 - DNA, 201 bp, Homo sapiens; identical to SEQ ID NO: 291

SEQ ID NO: 2107 - DNA, 201 bp, Homo sapiens
cccaggcgaggatcaacagccatgtgaaaaagaagacccaagggaaggttgtagacataatccaaggccttgaccttctgacggccatggttctggtgaaycacattttctttaaaggtaaggatttgagaagttgatttttatttatttattttatgatgatgatgatgatttttgcttagtgaaatacacaagccagac

SEQ ID NO: 2108 - DNA, 201 bp, Homo sapiens
ccactagaagtaattccccatttcagtttgctgtctttgcctcactaattgtactttgacataaagacttcttttctctctttgtgctagccaagtgggaraagccctttcaccctgaatatacaagaaagaacttcccattcctggtgggcgagcaggtcactgtgcatgtccccatgatgcaccagaaagagcagttcg

SEQ ID NO: 2109 - DNA, 201 bp, Homo sapiens
gtgacaaagtggattgctcagtggcaaagctggatttaagcccaaggctgcaatgtatccacattcatccttcttgataaaagaaaactgcaactgaaagwtccctccctgtcatgtcttctaagaaagtggcacttgattgagaccaaagtagtcagtggtctgaagatattcattaactgtcatggaggtatggaccaa

SEQ ID NO: 2110 - DNA, 201 bp, Homo sapiens
ggccatagtcaacacccactgcaatgtattgagtaaacccaatgccaggcatttgaaccttgaatcctttcaaggtagacatcaccattccagggcaaaarcactcagtttagtttactcagttaagtaaaagtgtctccactagggccactgatgtttgtttttcccttggcaggcaacccacaaggctgtgctggatgt

SEQ ID NO: 2111 - DNA, 201 bp, Homo sapiens
gcatttgaaccttgaatcctttcaaggtagacatcaccattccagggcaaaagcactcagtttagtttactcagttaagtaaaagtgtctccactagggcyactgatgtttgtttttcccttggcaggcaacccacaaggctgtgctggatgtcagtgaagagggcactgaggccacagcagctaccaccaccaagttcat

SEQ ID NO: 2112 - DNA, 201 bp, Homo sapiens
ggaacatgccaccacacccagctaatttttaaaaacattttgtagagggggtctccctatgttgcccagcctggtctcaaactcctgggctcaagcgatcmtcccacctcagcctcccaaactgctgagattataggtgtgagccaacatgcctggccaggagttgccattgttgttgttgttattgctattgttttatag

SEQ ID NO: 2113 - DNA, 201 bp, Homo sapiens
ggcaaacatacgggcaagtcgtggactgcctcccggagttcagccaggacacgttcatggttcttgccaattacatcttcttcaaaggtgaggcttgctcwgacagaattattgccactgcctctgcaagtaaatgctcttacagcagagagccagctaataggttctttgctaaccacttggggaaatctatgaataaga

SEQ ID NO: 2114 - DNA, 201 bp, Homo sapiens
acttcaagaattttgagagaagaatcccaaatattcctgccagttagacaagaaaatgaaacaatacaacccaaagcacaatgacaatgatgctgcagcamatttactagaagctgtcctgtgaaaagggtgcttaggagctctggtctggaatctgagtcttgctcctgctctcaccaggcggcttgtcctaaccctgca

SEQ ID NO: 2115 - DNA, 201 bp, Homo sapiens
cctactatatgtaaagcagataaagggttgctaccttcactgaagcctcggaggaaagtgtccagaatcctaatcatccacagccttgtcttcttcagtgyccctcatggcagccctgtggggcacattgtgaaggtgggatttgtggtatgagcaatagagaatcatgacattatttatggagaaaagtgacatgttcac

SEQ ID NO: 2116 - DNA, 201 bp, Homo sapiens; identical to SEQ ID NO: 284

SEQ ID NO: 2117 - DNA, 201 bp, Homo sapiens
caaatatcacatgtgagcataaaaaaaaaatcagcagaatgggctaacatggatgtcaagggcaaggggcttcatgatctgtgatgaacttagaggagccygcagaggccaggcaatgcaagttaagacttcagtgtttactttgggaaacgggaggcaattgagacattttaaatactaagtgacacagtcaggtttgag

SEQ ID NO: 2118 - DNA, 201 bp, Homo sapiens
tggaactcctgatctcaggtgatccacctgcctcgaaagtgctaggattacaggcgtgagccaccgcgcccagccaccaccccagttctgaggctggtgtwaatgcttctccatctcagggcagcacaccaagtgtctactgagcccatacattgggcacttttccgtgctggtgggggaagggggaaggaggacaggaag

SEQ ID NO: 2119 - DNA, 201 bp, Homo sapiens
tgggtctctactgaatgttccaggtctctccactttgggtgcataaccttaatatatcctatgctttgtgaactctggaaattattttgcttataccttcmcagtaggtttattttttcgtgtgtgtgtgtgtgtgtgtgtgtgtgtgtgtgtgtgtgtggaccagccatgtggaatttcactttatgcatgcagagctta

SEQ ID NO: 2120 - DNA, 201 bp, Homo sapiens
ttccagcttgctgtcttcagtttgaatagttcctattgatatgttttcaagatcacagatcttttcttctatagtactaaatttgctgttaaacccagccrgtgaatttttcatttcagatattaagtttttcatctctagaagtttgatttttcccacattacagtaacatttttattatttaagcatattttaagtaac

SEQ ID NO: 2121 - DNA, 201 bp, Homo sapiens
gtcatgtgcagagtgaattggaggagcaggacagggtatgcagagagagctgttaggaagctctgtggtagcccaggcaagacacaatgacagcccaactrgcctgctagagtggaggcagagaaaagtggatggacttgagcaacattcaggaggtaaagttgacaaaactgggcataagttgacatgaagaagaaggaa

SEQ ID NO: 2122 - DNA, 201 bp, Homo sapiens
tttttctgttctccactgtccctcacttttttttgcctaggactccaattacacatatgttagaccattgatgttgtcccacaagtcactgggacttgttytttattattattattttccagcttgctgtcttcagtttgaatagttcctattgatatgttttcaagatcacagatcttttcttctatagtactaaatttg

SEQ ID NO: 2123 - DNA, 201 bp, Homo sapiens
cttggcaggcaacccacaaggctgtgctggatgtcagtgaagagggcactgaggccacagcagctaccaccaccaagttcatagtccgatcgaaggatggyccctcttacttcactgtctccttcaataggaccttcctgatgatgattacaaataaagccacagacggtattctctttctagggaaagtggaaaatccca

SEQ ID NO: 2124 - DNA, 201 bp, Homo sapiens
tctttctagggaaagtggaaaatcccactaaatcctaggtgggaaatggcctgttaactgatggcacattgctaatgcacaagaaataacaaaccacatcmctctttctgttctgagggtgcatttgaccccagtggagctggattcgctggcagggatgccacttccaaggctcaatcaccaaaccatcaacagggaccc

SEQ ID NO: 2125 - DNA, 201 bp, Homo sapiens; identical to SEQ ID NO: 295

SEQ ID NO: 2126 - DNA, 201 bp, Homo sapiens
cacagacaagtcaaccatgctatttggggtaagttgcacagactctctgtggcctgtttactcatttgcaagtaaaacagcaataataagatctacatcawgggaatattgtgaggctcagagattatgtgagagagctctgctaactggcctatctgtcctcattctgctgctgatggcgtgggggtgttaaagggtctc

SEQ ID NO: 2127 - DNA, 201 bp, Homo sapiens
ttcttcacagaactggaaaaaaaatgctaaaattcatacggaaccaaaaaggagcctgcatagccaaagccagactaaaatgaggcatcacattacctaayttcaaactatactataaggccataatcaccaaaacagcatggtactggtataaaaataggcacatagaccaatggaacagaatagagaacccagaaataa

SEQ ID NO: 2128 - DNA, 201 bp, Homo sapiens
gtgcagtggcacaatcttggctcactgcaacctcttctgcttcccaggttcaagggattatccagcctcagcatcccaagtagctgaaattacaggcaccygccaccctgtcaggctaatttttatatttttagtagagacggggtttcaacatgttgtccaggctggtctagaactcctggcctcaagtgatccacctgc

SEQ ID NO: 2129 - DNA, 201 bp, Homo sapiens
gaagtgactaatgacacttgttgttcacaactagttttttccagaaactatgaggaaccccaagtagtcagcagtgggtgacggctgtcagcatccctccracagccttgcttccagtggcactttacagtgaaagcaagcttaggtggcaacctggtgcccactcagacttgcattggcaagcagatacaaaaacagccg

SEQ ID NO: 2130 - DNA, 201 bp, Homo sapiens
cttggaaaaaataaaaaaagaagaccatgagcaagattaaccaagaagagagaaaatccaaataagctcaattagaaatgaaatgaaagattttaaaaccracaccacagaaatacaaaagatcattcaaggctactattaacacctttatgtgcataaactagaaaagctagaggagatggataatttcctggaaagatc

SEQ ID NO: 2131 - DNA, 201 bp, Homo sapiens
gttgcactacagcaaaggcagctcgtgtcctttgagtcagacccaccgtccctccttccctcgttgcctgacaggctgtgctggcacctctatgtcacccycattaccgagggcatctctggcagcctcagtagagcccttgctcccatcagatccaaaggctcctcttctgggggccccggtgccccacacacctcggat

SEQ ID NO: 2132 - DNA, 201 bp, Homo sapiens
tcagagcagaactgaatgaaattgaaacaacaacaacaaaatagcaaaagataaatgaaacaaaaagctggttcttggaaaaaataaaaaaagaagaccaygagcaagattaaccaagaagagagaaaatccaaataagctcaattagaaatgaaatgaaagattttaaaaccgacaccacagaaatacaaaagatcattc

SEQ ID NO: 2133 - DNA, 201 bp, Homo sapiens
accggctgacgagggctaatgcgtgggctgtgaaggtctccccgggtgccgtggaccagtttcccatctcctcgcggctggctgccttcctgactccgatracgtcatgtgtgcacacacagccctccgggtgctcagccccttccctgcgggtttgtaacggcaatggtcccgcttccatactctgagtcctgagagcag

SEQ ID NO: 2134 - DNA, 201 bp, Homo sapiens
ctcacataaatgtaaggtaaaggggtggaaatagacattctatgcaaatagacactaaaagcaaacagaagtggctatacttatatcagacaaaacaaacyttaaagcaacagcagttaaaaaagataaagagggacattatataatgataaaaggccttgtccaacacaaaaatattacagtcttaaatatatatgcacc

SEQ ID NO: 2135 - DNA, 201 bp, Homo sapiens
aaacccccagctgaaccttgtaacaattccaactgaacaggaagtctcctggccagaactcaagggagggcctgaatctggtgtgcagactccacaggccrataggcgtgaaagccctacttgttctcataagtgggaggctggtagcctggggcaagttctcagcccttcctgcccactgcctataaacaaacttggtgc

SEQ ID NO: 2136 - DNA, 201 bp, Homo sapiens
accatttcatccagcaatcccagtactgggtatctacccagaggaaagaagtcattgtatgaaaaagatacttgcacacacatgtttacagcagcacaatytgcagttgcaagattgtggaaccaacccaaatacccatcaatcaatgagtggataaaaaaactgtggtgtatatatatatatgatggaatactactcagc

SEQ ID NO: 2137 - DNA, 201 bp, Homo sapiens
gaaacccccagctgaaccttgtaacaattccaactgaacaggaagtctcctggccagaactcaagggagggcctgaatctggtgtgcagactccacaggcyaataggcgtgaaagccctacttgttctcataagtgggaggctggtagcctggggcaagttctcagcccttcctgcccactgcctataaacaaacttggtg

SEQ ID NO: 2138 - DNA, 201 bp, Homo sapiens
acccacaaaccctctgaaggaaggaggttgctcctgcagaacccaagagacagtccaaatattgtgagtgcccaagctgtgaaagtgggaaaggtggattktctgtcactgaacacacaccctcactggggcacctgaaggtctagatcatgggagaaggatctgaccttatctggagctgagtcaatttagagagccaag

SEQ ID NO: 2139 - DNA, 201 bp, Homo sapiens
gagagagctctgctaactggcctatctgtcctcattctgctgctgatggcgtgggggtgttaaagggtctctgattcagggcctggaccctcagtttaccmcctcaatggttcttacttctcttgcagacatattttgttccaaaatggcatcttacctttatggagtactctttgctgttggcctctgtgctccaatcta

SEQ ID NO: 2140 - DNA, 201 bp, Homo sapiens
ggaagtctcctggccagaactcaagggagggcctgaatctggtgtgcagactccacaggccaataggcgtgaaagccctacttgttctcataagtgggagkctggtagcctggggcaagttctcagcccttcctgcccactgcctataaacaaacttggtgctgtttggggggacatggtgggagtgagactggtcttttg

SEQ ID NO: 2141 - DNA, 201 bp, Homo sapiens
atttttctgttctccactgtccctcacttttttttgcctaggactccaattacacatatgttagaccattgatgttgtcccacaagtcactgggacttgtyttttattattattattttccagcttgctgtcttcagtttgaatagttcctattgatatgttttcaagatcacagatcttttcttctatagtactaaattt

SEQ ID NO: 2142 - DNA, 201 bp, Homo sapiens
tcacagattcctgggcaaggcagaaaaaggggctctccaggatgaagatccctgctggggcaggaatctcatgtgtcccatgatgttgaaataatgacccyttgccaaaaaacaaaaaaaaaacaaaaccctagactaattaacagacagacaaaattcctcaaggcttggggtcctgtctggttctatctcccttcccta

SEQ ID NO: 2143 - DNA, 201 bp, Homo sapiens; identical to SEQ ID NO: 282

SEQ ID NO: 2144 - DNA, 201 bp, Homo sapiens
acctgcctcgaaagtgctaggattacaggcgtgagccaccgcgcccagccaccaccccagttctgaggctggtgtaaatgcttctccatctcagggcagcmcaccaagtgtctactgagcccatacattgggcacttttccgtgctggtgggggaagggggaaggaggacaggaagcaggtgtgtagagcaatgaggaaca

SEQ ID NO: 2145 - DNA, 201 bp, Homo sapiens
tagaggcctccagagcaggaagggtagtccactgggtgggcttccatgaagattgaatgtccttccagcacagacagcttttccgtagctgttttcttcaycatgatgtgaacagaggaatcacagattcctgggcaaggcagaaaaaggggctctccaggatgaagatccctgctggggcaggaatctcatgtgtcccat

SEQ ID NO: 2146 - DNA, 201 bp, Homo sapiens
tccgccatagtgaacagtgtcatgggaagactggttgcttctcacgctgggaaatgcctctctcccatggctcaggctgccgacagacagagcaggagtgrcacatattaacaagagagcaccatttctctgtctgtttctctctccagtctgttggatttgcacttgccaaggttttcaatttctggaacatataacctg

SEQ ID NO: 2147 - DNA, 201 bp, Homo sapiens
tccccttgcttattaccagtcaggattactcttcaaagataaatggattatttcattttatttcaattcatttattcttttagcaaccacttactgaaccrtgagtattggccaaagagtgggtgcacaagtagacaaaattaaggtagacaggatccctgattcatgaattgttcagtcacacaaataaatgtgaaacta

SEQ ID NO: 2148 - DNA, 201 bp, Homo sapiens
ctcaagaaccccagcaggtcttgatcaactccagctgcaaaagcccaacatccatctcgattaggctcaccatcttgtcctttactaactgtgtgatcttsgcaattttctcaccttttttgggcctctactgtaaaactaagaacatgatacctgcctcattgggttgctcagtagattcattgagtttctacccataga

SEQ ID NO: 2149 - DNA, 201 bp, Homo sapiens
aagaggaattaagaaatgaattgggcatcattaccccaggcttgatagaaagggaaaaaaactgccattgagtactttcggcatgcctggagctttgtacwttgactgtcatataatcccgaaatggccccacacccaggaggtgggcaatatcatttgcattttgcaaagggagacactgagtttcagacagctgctttt

SEQ ID NO: 2150 - DNA, 201 bp, Homo sapiens
tcagcagtcaggtgctcccccatgcctgctgcaggagagcaagtgctccctcaggatctgacctcactttcttcctccctgaagtttaggccctcacacargcatcacagtgtggctgcccataggtcatctgcaccctgtagatgtgttgtctggccttcagtgtgtaaggagagagagagggagagagagagagagaga

SEQ ID NO: 2151 - DNA, 201 bp, Homo sapiens
cagcctctgcttgtgacaagaggcatcccagatatcagaggctggacagagacatggagacagagttgctctctctcatcgctcctctaggctccatcagycctgctactttgctccccactcctgggctgtcttcatccacacatccagatggccgatcctcacatcgccactccagctaatgaacgactggaaaggggg

SEQ ID NO: 2152 - DNA, 201 bp, Homo sapiens
cccagccctgttggggtttgaaattgctatcaggtcatttagtctgaagtctccttggggccaaagccatgtcagctgaggcttgaaggggaagcagacasatgtgactagaactgcagctcatcagcaactgactgccagtgctcagggcacctgaaggagcacagcaaaaaggacagccttttgctccaggtttccact

SEQ ID NO: 2153 - DNA, 201 bp, Homo sapiens
gtgagcagtacttgatagagttgctccaatcaaattctctctgacttcaacaaaacaacagtaaaagtaatgtattcagcgctcaccatgtgctgggtccygtgctgcacaatttgtgccttatcacactcagtcctctgaacaactctgtaaggtaactatctctgttttacaaaggcgaaacagagaagtccagagagg

SEQ ID NO: 2154 - DNA, 201 bp, Homo sapiens; identical to SEQ ID NO: 297

SEQ ID NO: 2155 - DNA, 201 bp, Homo sapiens
agggtgcatttgaccccagtggagctggattcgctggcagggatgccacttccaaggctcaatcaccaaaccatcaacagggaccccagtcacaagccaamacccattaaccccagtcagtgcccttttccacaaattctcccaggtaactagcttcatgggatgttgctgggttaccatatttccattccttggggctcc

SEQ ID NO: 2156 - DNA, 201 bp, Homo sapiens
cttggagaaagggagagatggggcactcagggtgggggcagctctggaggtcagttcagaacaggttggcaaagagtccagtaggtggatggatggatgcraatgtaacttagaaagaaaattccactttagtcaaacaggcaaatacaaaactacacaacagaaatcgccaatcacataagtggaaatggagagaaatga

SEQ ID NO: 2157 - DNA, 201 bp, Homo sapiens
cacttgctttgtatgatctctcttaatttacacaataaccttacggggcatatgcagttattattaccttttatagatcgggaacctgaagcacgcagcaycttaataattttgcaaccataagtggcagaactgagactcactccggtcttcctgctctgtgtttgtaaccatctcaatcccggtgtaaggaccaatggg

SEQ ID NO: 2158 - DNA, 201 bp, Homo sapiens
gataaggagggtttggaccaagggaaaagcaaagagatggagagaagctggggcttgcgatgtctcggggaggaagaacgatgtggggaaggagggtggcygaagagtgcagagtggccatcagtctcctgacttggaagatggcagcatgggtaaaatggccttcttggagaaagggagagatggggcactcagggtggg

SEQ ID NO: 2159 - DNA, 201 bp, Homo sapiens
tgattctcctgtctcagcctccggagtagctgggactagaggtgcccgccaccaagcctggctaacttttgcatttttagtagagatggggttttgccacrttggccaggctggtctggaactcctgatctcaggtgatccacctgcctcgaaagtgctaggattacaggcgtgagccaccgcgcccagccaccaccccag

SEQ ID NO: 2160 - DNA, 201 bp, Homo sapiens
catgtggctgatgtcctcttccttcaacctggtctcctctcccatggtcatgaatagccagggacaatcctattccttcaccctgattccaagggagggamacaaaatcataagagccacaagagagatgcagctttggtctcctgcccaccatgggctggatgccgcactgggcgttctgcagacgttgtctcgcccttc

SEQ ID NO: 2161 - DNA, 201 bp, Homo sapiens
tcgatgactcaggacatttactagccaactccccgacttcaggtgggtctcccctactcaacccaagcccaaaagaaacaagacttggggcgtggaggccrcgtctaataggccacctctgctgatgggaatgcggattctttaggaggcacaacccagcgtcagtgggggccccctgagagccacctgccccactgccag

SEQ ID NO: 2162 - DNA, 201 bp, Homo sapiens
aagtcacatggaggccagtaccatcgatgactcaggacatttactagccaactccccgacttcaggtgggtctcccctactcaacccaagcccaaaagaarcaagacttggggcgtggaggccgcgtctaataggccacctctgctgatgggaatgcggattctttaggaggcacaacccagcgtcagtgggggccccctg

SEQ ID NO: 2163 - DNA, 201 bp, Homo sapiens
aggaaagagaaggaaagaaaactggtatggtttgagcccttactaagttaccttcagtttatgttgttctatttaactaattctatttttaattgaaatayaattcacatgtcataaaattcaccattttattgctttttagtatattcacaagtttgggcaactactccgctgtgtaatatcagagcatttttttgtcac

SEQ ID NO: 2164 - DNA, 201 bp, Homo sapiens
tcttttctctctttgtgctagccaagtgggaaaagccctttcaccctgaatatacaagaaagaacttcccattcctggtgggcgagcaggtcactgtgcawgtccccatgatgcaccagaaagagcagttcgcttttggggtggatacagagctgaactgctttgtgctgcagatggattacaagggagatgccgtggcct

SEQ ID NO: 2165 - DNA, 201 bp, Homo sapiens
ctgagaaagtggagccactcactccagaaaaggtgggcatctgtgtcaatctcctgggccctgaggcaggggatgcacacattcaaagatgagggagagawtgtgctaacagctgttggataatcacttctgcacagtgagcaccaactgcatgcaggacagagagcctggggctgtctatacatgttcacacttgaagtt

SEQ ID NO: 2166 - DNA, 201 bp, Homo sapiens; identical to SEQ ID NO: 294

SEQ ID NO: 2167 - DNA, 201 bp, Homo sapiens
cactgcctctgcaagtaaatgctcttacagcagagagccagctaataggttctttgctaaccacttggggaaatctatgaataagatagagctttcccacmcttgcgtagccacagtccatgtgggttggaaataagtgcagaaaataactcagtgggatggtgatgctgtccttgcataggcattgggtgccacagagtt

SEQ ID NO: 2168 - DNA, 201 bp, Homo sapiens
catccaaaatgcctttgacaaaaatgctgatttttctggaattgcaaagagagactccctgcaggtttctaaagtgagttgaatgaaaatatttgcaaaamagtccaagctggaagcacctgcagaattaatcacacgctcttatttcgttgataaggaagcagaggcctgaaaggtgaagtcagggtcttctgcggccag

SEQ ID NO: 2169 - DNA, 201 bp, Homo sapiens
gtaaaacagccacccaagctaagacatgagagtgagtagtatccactcaggtgaagaagcttgggagaggtggggcaaagagggttcaggttgaaaaaacyagcatatctaaaggtccagggaaaagagatatcattgcattttcaaagaactgaaacaaatttagttgggatagaacatcaaacacaatagcagaataat

SEQ ID NO: 2170 - DNA, 201 bp, Homo sapiens
cttcaccagctaataccttcttgggggtgcatcttcttttatggggtactctgagatgaaatctggtacttagttctacttactgcttgctgcataacaasccaccccaaaaccgaatgacttaagacaatcacttccttggttctatgggttaactgggctcagctgggcagttttcatgtgttggagtaggtggcagct

SEQ ID NO: 2171 - DNA, 201 bp, Homo sapiens
cagggaaaagagagctgtccctggcatgaggggtcacaagacacctgtcagatgaggactgaaatgtgtccatccaatatttttgtgctttcgttgctgtragtcactaagtacataaccttgggcaaagcactaaaagtaagctttaccgtctttaaaagggggaagtgttgttgaatgtgcctgggacaatgtctggca

SEQ ID NO: 2172 - DNA, 201 bp, Homo sapiens
tggaattgcaaagagagactccctgcaggtttctaaagtgagttgaatgaaaatatttgcaaaacagtccaagctggaagcacctgcagaattaatcacaygctcttatttcgttgataaggaagcagaggcctgaaaggtgaagtcagggtcttctgcggccagaagaaccgaatcttgcggcctatggccaccatccct

SEQ ID NO: 2173 - DNA, 201 bp, Homo sapiens
ttttagaaagaaacatggaactctctgacaacccagtttaagaagcaaatccaagagtgtgaacactttcataggtgtagaaatgtagacaagctgatgtrcctgtcattcgtatcccttatatatatgaagtctccttcatatataactgcatatagatatagatatagatgtagatatatgttagagctttacagtttc

SEQ ID NO: 2174 - DNA, 201 bp, Homo sapiens
tttctggaattgcaaagagagactccctgcaggtttctaaagtgagttgaatgaaaatatttgcaaaacagtccaagctggaagcacctgcagaattaatmacacgctcttatttcgttgataaggaagcagaggcctgaaaggtgaagtcagggtcttctgcggccagaagaaccgaatcttgcggcctatggccaccat

SEQ ID NO: 2175 - DNA, 201 bp, Homo sapiens
gggccaaagccatgtcagctgaggcttgaaggggaagcagacagatgtgactagaactgcagctcatcagcaactgactgccagtgctcagggcacctgamggagcacagcaaaaaggacagccttttgctccaggtttccactttttgagagatatgaacacattagtaaaatgcctgtgtctgggaacaggcagccagg

SEQ ID NO: 2176 - DNA, 201 bp, Homo sapiens
acaaatataagaaaaaatgctcaacattactaatgatcagggaaatgcaaatcaaaaccacagtgtgatatcaccttactcctgcaagaatggccataatmaaaaaataatagacgttggcgtggatgtggtgaaaagggaacatttctgcactgctggtgggaatgtaaactagtacaacccctatggaaaacggtgtgc

SEQ ID NO: 2177 - DNA, 201 bp, Homo sapiens
ctcgttcaagatgcagctctttctatcacaggtataatttcatggtcttgctatcagatcagagcaatcatcgttgtcctcaaaagcagtgagccccacartggccgcttttgtccagccattcagccattagagcagctacttcaactaccttcacaggcttgatgggtgaattgcctgctttgcactaaatggcagttc

SEQ ID NO: 2178 - DNA, 201 bp, Homo sapiens
cactctgctgtgccaccagctgaaaagcagactgtgttgctggaatcattcgaaaccacaaaatgtataataacacctaagcacatggggaaaaagaaatygacctcactagtaatcaaagaaatgcaaattaaagtagtgagaagttatggggaaaaatagttgtaataactagggatgaaaaggttcagcaagaccggc

SEQ ID NO: 2179 - DNA, 201 bp, Homo sapiens
tccagcctcaatgacagagtgagagttcatgtcaaaaaaaaaaaattatgcgatatagtctgtgaattaatataaagcatagcaataactaaaaacaagtkttattagcacttgttgacataaaatcctttctagatttttttcaatttggcagctttttatttatttatttaatacatattagatgtagatattttcagg

SEQ ID NO: 2180 - DNA, 201 bp, Homo sapiens
aacaccacttgccatgcccgggctgggtcctttcatgccctgggcctgatggggacaaatctgcatcccgtggccatgtgatcgctttgtcttctgagggwgtcacatcagagaacccaggctactaccaagccttagagttcgttattatagaagggaactcaggggacacccagcctccttcccaccaaacacgaccct

SEQ ID NO: 2181 - DNA, 201 bp, Homo sapiens
gaagtttaatccatgttgttgtaaaatggcaggatttgcttatcttttagggccgaataatatcccattgtgtgtgtatatacaatttctttttttctttytttttttttttttttgagacagagtttcgctcttgttgcccaggctggagtgcaatggcgccatctcggctcacagcaacctccgcctcctggattcaag

SEQ ID NO: 2182 - DNA, 201 bp, Homo sapiens
aagcagtcaggatttgaggatcctcacgccttcaagggacagcgtttgatcacaaagatgcgtattctaaagcaagctttcttttgagctgtaatttaccaaaaaaaaaaaaagaagaagaagaagaagaagaagaaagaaagataagacatctaccttaatatcagccaaacacatcactgccagtttggaaacattgcg

SEQ ID NO: 2183 - DNA, 201 bp, Homo sapiens
ttagagatggggtttcgccatgtttcccaggctggtctcaaactcctgggctcaggggatctgcctgcctcagcctcccaaagtgccgaaattacagataygagccaccgcaccggccaaccatgggtttttctacctaatctaactccactggtatatatatatatattttgagatgaaccttcactttgttgcccaggc

SEQ ID NO: 2184 - DNA, 201 bp, Homo sapiens
agtgcagcaatggagggagcccagcttgagccacaacttccccaccccccgggctgccagatgccttggggctgccaccctgcagcagcactgggcctggmtgagctctccccaggtgaggcctgttttcgtttgaaaggagcacttgattctgtgagctcctggggttaccatcgctggatggtcttttctcagtccctt

SEQ ID NO: 2185 - DNA, 201 bp, Homo sapiens
taccccaggaggactgtattccatctgcaagaattcagtcacatagtcaagctgcaagggagtcttggaaatgtagtccacttaactgggcgccgctgtgkttctaaataagatcaaagttctgttgctaaaaaagagttacagtagttattgattggcaactggcaagccctgacacaattaacccaccaatgagctgag

SEQ ID NO: 2186 - DNA, 201 bp, Homo sapiens
gcttgaacatgggaggcggaggttgcagtgagccgagattaggccactgcactccagtctgcatgacggagtgagactccatctcaaaaaaaaaaaaaaawttttttttgttcagacttgtgttccaaaatatctcattatgtgtatgcagatatcccaaagtccaaaaaactccaaaatccaaaactcttctggtcccaa

SEQ ID NO: 2187 - DNA, 201 bp, Homo sapiens
gaccagaacctcaaaggcagcacggatgattttgtctcaccaaaaaatgaaacatgctgccccaaagaaaaggggggttcacatctttaatccccccactytgggagactcaggaaggaggatcacttgaggccaagagtttgaggctgcagtgagccaatatcgtgccactgcactccagcctgggcaacggggagactt

SEQ ID NO: 2188 - DNA, 201 bp, Homo sapiens
ccaaaatccaaaactcttctggtcccaaacattttggataagggatactcaacgtatacctagaattttttaagtatttaaaataaaatgcacaacatgargaagaggggaagacaaggaaactaacattgttggttccttactgtgggcatcgcatattatatgcattaattaatttaatgcacaccattttgtgggaga

SEQ ID NO: 2189 - DNA, 201 bp, Homo sapiens
aagaaaaggggggttcacatctttaatccccccactttgggagactcaggaaggaggatcacttgaggccaagagtttgaggctgcagtgagccaatatcrtgccactgcactccagcctgggcaacggggagactttgtctcaaaaaaaaaaaaaaggttgggggcgggttagtagtgccttcagtttaacaagggagca

SEQ ID NO: 2190 - DNA, 201 bp, Homo sapiens
cagaggaagcattctgaactcagtttcctggttattgagatttttatttatagagatacctctataaatccagaagacgcaccccaggaacagatttcaattttttttttttaaacgagactctgtgactaaaggcaaaaatgaaacaggtgccagaagaaagtgatgaaagatatcaggggcaaaattgtgtccaaggag

SEQ ID NO: 2191 - DNA, 201 bp, Homo sapiens
attctttcagttggtctcagttgcagaggaagcattctgaactcagtttcctggttattgagatttttatttatagagatacctctataaatccagaagaygcaccccaggaacagatttcaattttttttttttaaacgagactctgtgactaaaggcaaaaatgaaacaggtgccagaagaaagtgatgaaagatatca

SEQ ID NO: 2192 - DNA, 201 bp, Homo sapiens
ttttatttatagagatacctctataaatccagaagacgcaccccaggaacagatttcaattttttttttttaaacgagactctgtgactaaaggcaaaaaygaaacaggtgccagaagaaagtgatgaaagatatcaggggcaaaattgtgtccaaggagaaagttcatgcagtacaaattaacatggcagcaaatattct

SEQ ID NO: 2193 - DNA, 201 bp, Homo sapiens
ctgccaccacacctcctggttttttttttttttttttaattgtgctgttttgtgttttttggcaaacatctgtgcctatgaaagctttcaatatatctcaytgtggctggaccaggtattttctagtttgccaatccataactctcctgagacattattatttgtcctttgcagttgcatttgaagaaaatttcctaccta

SEQ ID NO: 2194 - DNA, 201 bp, Homo sapiens
cattatgtgtatgcagatatcccaaagtccaaaaaactccaaaatccaaaactcttctggtcccaaacattttggataagggatactcaacgtatacctasaattttttaagtatttaaaataaaatgcacaacatgaggaagaggggaagacaaggaaactaacattgttggttccttactgtgggcatcgcatattata

SEQ ID NO: 2195 - DNA, 201 bp, Homo sapiens
tctcattatgtgtatgcagatatcccaaagtccaaaaaactccaaaatccaaaactcttctggtcccaaacattttggataagggatactcaacgtatacytagaattttttaagtatttaaaataaaatgcacaacatgaggaagaggggaagacaaggaaactaacattgttggttccttactgtgggcatcgcatatt

SEQ ID NO: 2196 - DNA, 201 bp, Homo sapiens; identical to SEQ ID NO: 313

SEQ ID NO: 2197 - DNA, 201 bp, Homo sapiens
aacatttctctcctgaatgttgccagcatcagtcccagaaccagggtcaccatcctcgtaactgtcatcagagagatgcctgctgcagctcagatacatcwacttctaaaaaggaacatacgattgtcctgtgactttttgtgtagtagtgtaaaggggacctgttgccattagctgatcattaaaggagcgactcgttca

SEQ ID NO: 2198 - DNA, 201 bp, Homo sapiens
tttgtgtagtagtgtaaaggggacctgttgccattagctgatcattaaaggagcgactcgttcaagatgcagctctttctatcacaggtataatttcatgstcttgctatcagatcagagcaatcatcgttgtcctcaaaagcagtgagccccacaatggccgcttttgtccagccattcagccattagagcagctacttc

SEQ ID NO: 2199 - DNA, 201 bp, Homo sapiens
aacccttcatcctgccccagagagagtgcaaagtgcctttcttgattcagctgtttgccttccttcaattccaatcagtctgtgctgtgtggtatgacagwgacaaggtgaaatccctgctgagcagctctgaaatctgtgaagaaataggcttcatacacacattgtttggttgaacaagagaaactactggaatttcag

SEQ ID NO: 2200 - DNA, 201 bp, Homo sapiens; identical to SEQ ID NO: 317

SEQ ID NO: 2201 - DNA, 201 bp, Homo sapiens
ttttgtcataaccgttaatagagtatcccctctatgtctttgactgttttagattctagggataaaaagatgaataagacgtggtgtttgctctcagcaarcccacagtgtagtaagaaaggcaaagacaaaaatagataatgggggtgtaactaaggtaagaactacaaaaagagaattagcaaaatatgataagagagg

SEQ ID NO: 2202 - DNA, 201 bp, Homo sapiens
agttaatattaagtatataaagttaagtatagtaagtatatgaaattgccaatatttgactatttttgacctgcaaaatgacaatttcatatgattggacstaatacatttcatgacagaatatcataagattcagtaaagtataaataaggaaatttttcaaaaactcagagtccatcacctctgctgacattttggtat

SEQ ID NO: 2203 - DNA, 201 bp, Homo sapiens; identical to SEQ ID NO: 326

SEQ ID NO: 2204 - DNA, 201 bp, Homo sapiens
aggctggagtgcaggggcgtgatcttggctcactgcaagctccccctcctgggttcacaccattctcctgcctcagcctcccaagtatctgggactacagrcgcccaccacctcgcccggctaattttttgtatatttagtagagatggggtttcatcatgttagccaggatggtctcaatctcctgacctcatgatctgc

SEQ ID NO: 2205 - DNA, 201 bp, Homo sapiens
cagcctcccgagtagctgggattacaggcacgtaccaccatgcctggttaattttttgtgtttttagtatagatggggtttttgcatgttggtcaggctgrtcttgaactcccaacctcaggtgatccacctgcctcggcctcccaaagtgctgggattacagccgtgagccactgtgcccggctatataatttctttatc

SEQ ID NO: 2206 - DNA, 201 bp, Homo sapiens
atatatatatatatatatatatatatatatttaaagtaactttatatatatatatatatatatatatatttttttttttttttttttttttttttttttgkggggggggatggagtctcgctctgttgcccaggctggagtgcaatggcatgatcttggctcactgcaacctctgcctcctggatttaagagattctcttg

SEQ ID NO: 2207 - DNA, 201 bp, Homo sapiens
ttttttttttttttttaaatgattccacatataggtgagatcatgcagtatttgtgtttctgtgtctggcttttttgactaccataatgtcctgaagtttmatccatgttgttgtaaaatggcaggatttgcttatcttttagggccgaataatatcccattgtgtgtgtatatacaatttctttttttcttttttttttt

SEQ ID NO: 2208 - DNA, 201 bp, Homo sapiens
tggtttaggtgaagtggaaacttatctctctcacacttcaaaggagcccagagacaggcagtccagggctagcacggaagctccttggcaatcagggatcyggattccttgtatctttcttttccagcatccttgcaatggcttccatcctgaaggcaagtaacctcatggtccaagatggctgctatagtgctggctatc

SEQ ID NO: 2209 - DNA, 201 bp, Homo sapiens
cacacttcaaaggagcccagagacaggcagtccagggctagcacggaagctccttggcaatcagggatccggattccttgtatctttcttttccagcatcyttgcaatggcttccatcctgaaggcaagtaacctcatggtccaagatggctgctatagtgctggctatcttggacactttctaggcagctgacaagagga

SEQ ID NO: 2210 - DNA, 201 bp, Homo sapiens
tgagcaaaacgtgggcctgagcgattcggccctcctagctggttcgcacaagcttagagtatgtcttttgtttctttctacccttgacaagcgtgatggcyttgctttcatgctgactttcattcctatgatgttgaaggtaacaggctgtctgctggtcccatcacagctgagttttattttaaactttaatggatagca

SEQ ID NO: 2211 - DNA, 201 bp, Homo sapiens
ttgtttttagacctaaagtagataaactttaaagaacttcttgcaaagagttaaaatgttttatatatatatatatatatatatatatatatatatatatwtaaagtaactttatatatatatatatatatatatatatttttttttttttttttttttttttttttttggggggggggatggagtctcgctctgttgccc

SEQ ID NO: 2212 - DNA, 201 bp, Homo sapiens
tttgttccaagatgtataaaactgtggctccggcatatgctgtagctggagggaaaaaagttggggtggatttaatgctacatctgtgaccagttagttayagtaacctccaggtatttggtggtttcaacaaaagttctaatacacattccaggcatccagaactatatggaagactgtaaaaagatgcggacaaataat

SEQ ID NO: 2213 - DNA, 201 bp, Homo sapiens
tcagactcctgacctcaggtgatcccccctcctcagcctcctaaagtgctgggattacaggcatgagccaccacaactggctggccaactcttgatctacrgaatcaaatttgcaaaccatcgcctaccactttgtttgccagctcttttctaagtgcacattttgaatttgtgtgtgtaggtaggatggaaagagtcctc

SEQ ID NO: 2214 - DNA, 201 bp, Homo sapiens; identical to SEQ ID NO: 311

SEQ ID NO: 2215 - DNA, 201 bp, Homo sapiens
tggaagcagagggagactcagtgcaacatcatactctccaatcgtttctattgtcagaccaataaacctctaagctgttgtttctgagtttttaaaaacayggtccttctttccagtgtaggcttcctctctctcctgtaagcttttgtaagctgttttcctcatttcttccttggctccacatgtgcagagccccaaagc

SEQ ID NO: 2216 - DNA, 201 bp, Homo sapiens; identical to SEQ ID NO: 312

SEQ ID NO: 2217 - DNA, 201 bp, Homo sapiens
ttttttgagacagtttcactcttgtcgcccaggctggagtgcaaaagtgtgatcttggctcacggcaacctctgccctccaggttcaagcgattctcctgyctcagcctcccgagtagctgggattacaggcccccgccaccatgcccagctactttttttgtatttttagtagagacggggtttcaccatgttggtcagg

SEQ ID NO: 2218 - DNA, 201 bp, Homo sapiens
tcagggatccggattccttgtatctttcttttccagcatccttgcaatggcttccatcctgaaggcaagtaacctcatggtccaagatggctgctatagtrctggctatcttggacactttctaggcagctgacaagaggaagaattatcctcccagatgagttagcttcctttaaagagacttccaggaagtcctacact

SEQ ID NO: 2219 - DNA, 201 bp, Homo sapiens
ttctgcatatacagtcagccctctacattcacaggttctgcatccacaaattcaaccaactgcagatcaaaaatatcaagaaaaagaaacaaaataacaakacaacaacttaagaatacaactatcacagtataataactacacagtatttacatcgtattaactatcataagtaatctagagatgacttaaagtttacag

SEQ ID NO: 2220 - DNA, 201 bp, Homo sapiens
aattaacccaccaatgagctgagcattagccccagggcagatggaagctcactagacggcaataccaagcagcttgtgtgtgtcccgtgtctctgtgactractgatgtgaccagaacctcaaaggcagcacggatgattttgtctcaccaaaaaatgaaacatgctgccccaaagaaaaggggggttcacatctttaatc

SEQ ID NO: 2221 - DNA, 201 bp, Homo sapiens
tgtttcagttagcgtcaaatcttctaagccaacagtaaacatctaatgcacttgattagtgaaggatgttgctatgtgactctccatcatcatacaatgaygttcacggctactgtctttgcactgtatactacgtgtcaatcaatccattcctctcttgacacagatcatttctatttattgtgctccatccctgcttct

SEQ ID NO: 2222 - DNA, 201 bp, Homo sapiens
aaatatttatcttttctttatgctagggacattcaaagtattctcttccagctattttgaaatgaacaattggttaatgttaactatagacaccgtactgrtatatcaaatgccgggtcttatttcttctaagtgtatattgtatgtattaatcagcttctttttatccaaacccacccttcctggcctctggtacccacc

SEQ ID NO: 2223 - DNA, 201 bp, Homo sapiens
tcaggctggagtgcagtggcatgatttcggctcatggccacctccgcctccagggttcaagcgattgtcctccttcaggctcttgagtaactgggattacyggtgtttgccatcatgcctggctaatttttgtatttttagtagagacaggctctcaccatgttggccaagcttgtctcaaactcctggccccaagtgatt

SEQ ID NO: 2224 - DNA, 201 bp, Homo sapiens
tggagaatcatttgaggataggagatcaagaccatcctgggcaacatagcaagatccatctattaaaaaaattatttttaaaggaaaatgcacctaagaasaagtggtccctgggcagggtgccaaagggtgttcaagtattcaaatggccaggaggagcagtgtgcaggtgaggaacaggttggaagggtccagggtgtc

SEQ ID NO: 2225 - DNA, 201 bp, Homo sapiens
cacttgcctataatcccagctattcaggaagctgaggcaggagaattgcatgaaccctgacgcggaggttgcagtaagccgagatcacgacactgcactcyaggctgggcaacagagcaagactccatcttgaaaaaaaaaaagatcccatctctcaacactgccacattggggattaagtttcaacatgagttttggagg

SEQ ID NO: 2226 - DNA, 201 bp, Homo sapiens
cctgggtgacaaagcactacaacgttcatccaaactaatcttctgtgctactctaggcttcacagtgacaaagttctacagggacacatctgcctttttgygttgtactttttttttttttaagagacaaggtattgctctgttgcccagtgcagtggtgccatcataactcactgcagtctccaactcctgggctcaagc

SEQ ID NO: 2227 - DNA, 201 bp, Homo sapiens
aagttctacagggacacatctgcctttttgcgttgtactttttttttttttaagagacaaggtattgctctgttgcccagtgcagtggtgccatcataacycactgcagtctccaactcctgggctcaagcaatcctcctgtcttagcctcccaagtagcagggactacaggcacacaccatcatgcccagttaatttttt

SEQ ID NO: 2228 - DNA, 201 bp, Homo sapiens
tgggtcttaaccaattcagaatataggatgcaaaatcaccattttagatctttacacataaattgtaaaatcagcttttgatgttttacacttatcaaaascagtcgtgtcaattaatgtcaatgctaatttatcatagcagatgataaaaaataacacattggcagtaggctttgacaagcattatgtgaattattttac

SEQ ID NO: 2229 - DNA, 201 bp, Homo sapiens
gcatcacttctgagtcctcaaatttattatgcttcctcttccagacccattatttgtgtatttttttttaataacaaaactgtaacctccagaaatagtcygccaggtactttatgttttaactgaatctgcactgcctgtcatctagagtcattcattgtgacatcataaaaagcaggcctgacaatgcattagcagtct

SEQ ID NO: 2230 - DNA, 201 bp, Homo sapiens
ggtctctaactcctgggctcaagcgatcctcctacctcagcgtctcaaagtgctgggattacaggcatgaacctccgtgccggctctctctttgtcttcgytacctgtaggttggtcagtggtccacatcaatgaggcgcccccttgcatgagtagtctcccagcccctgattttgttacgtgcattaaacactactagaa

SEQ ID NO: 2231 - DNA, 201 bp, Homo sapiens
cactcaccaccacatctagctaatttttctttttaaattttttgtggagactaggtctccttatgtttcccaggctggtctctaactcctgggctcaagcratcctcctacctcagcgtctcaaagtgctgggattacaggcatgaacctccgtgccggctctctctttgtcttcgctacctgtaggttggtcagtggtcc

SEQ ID NO: 2232 - DNA, 201 bp, Homo sapiens
atcggggacacattagtacacgcagctggcggctgccccaggagccctcacaagctccacctaccttttctccaggttattgttttccttctccttccacrtggacctatacccttcttccttcatttgtatccctttgctccatcctgcttctctcttctctcttctctctttctctttctcttttcttttctttctttc

SEQ ID NO: 2233 - DNA, 201 bp, Homo sapiens
agagaactggatgagtctgagagctaagaaatgccccacagagagacaccaagggtaggaatgtgagacgggggtccaaaagagacccgagtgggtcttcyggtccagccgctttgcctcaaagatggctgtgcctctgcgttctcgacaaaggacaggttgtggactgggggtgtcactggtgggccgctgtgcagctat

SEQ ID NO: 2234 - DNA, 201 bp, Homo sapiens
ttgaagctacatgttaacgtgttgggccatcattcgtatgactggtaactttaccagcgtttaaagcacagcagatggactgtgaagcctgactgtgggayccctggctcaggggccctccttgcccccaggctgaagacttcctagcagtaaagtttccctccttcatagatcctttgggaggcaggaagtggaacctac

SEQ ID NO: 2235 - DNA, 201 bp, Homo sapiens
tatcaggagcttcacacatcagtggtccatacatacatcaggggtccatatatcagctggcccatatatcagggggtccatacatgagctggtccatacayaggggggtctacatatcagctggtccatatatcaactggtccatacatctgctggtctctagatcagctagttcatacaccagggggtccacacatcagc

SEQ ID NO: 2236 - DNA, 201 bp, Homo sapiens
agatatctagtagaatacccaggctgttcaaaaattcacatcctcacacacacacacaggtgagaagatatgtatcaaagtaaccatctctgagtagaaaragtataagcaatttttgttttttgtacttttttatattcttccaacattcattttcaacaatgaatccattactgtaataatttaaaaagcaaacagcta

SEQ ID NO: 2237 - DNA, 201 bp, Homo sapiens
attgattttggatattttctggttttccagcccataactaagctttgctgtaaatgactgcctaacaagttaacagggggtagaagtagatacagaattaytgttattatcattattattattattattattattattgagatggagtcttgctctgtcgcccaggctggagtgcagtggcatggtctcagctcactgcaa

SEQ ID NO: 2238 - DNA, 201 bp, Homo sapiens
caatatctcctgagcatctctcatgagccaggcactcacgattctaagatgagcgagacacagcccttgaccatgaggagcttgtgatcaggactgggagwtccacaggtgagcaaataattaaaacatagcaggataaatgttccaatactcagatacatgaagtgcaaatgagaaaagaacaaaatgcacaattccagc

SEQ ID NO: 2239 - DNA, 201 bp, Homo sapiens
taagcaacacgaatatgtggacaccaaaagttatcatagaatgagtatgccattgggatttccatggaaaaaccaggagattgcgggttttatcaacattkaaaccacacccagtgtgaatcaattcccttgcttatggctaaaggtagattccttccctggcatggtctcagtatctacctcaagaacacagctctttcc

SEQ ID NO: 2240 - DNA, 201 bp, Homo sapiens
tatttttaaaagagaaagaaactgaaattgaatcaggtcctttatcttgctatctcccaaactacttgatttaaaacctgaacactaagctgaccgatctstctgcttgctctaagtaaacaaaagaatcaggaggcctgcagtgagaactcctacagctttggctgagaccatcaggctctgggaacaggggtgtgttct

SEQ ID NO: 2241 - DNA, 201 bp, Homo sapiens
tctggaactcctagggtgactgttttagctccaacttcccatggggaaaatgattgccctgttttccattctaatgctaatgacctatctttgggagttcraagctggatcaacagtcagactgacttcctatttctaattttcacactcagcctactttgctttttcaccagacccactctccaccttcactaattttag

SEQ ID NO: 2242 - DNA, 201 bp, Homo sapiens
ttcgaggtgctttgcatttctctcattcattctcacacaaacttcatggagtgtgcagcgtaagaacagctaatgctcatagaatgttggctctgtactaratggtttcaccaaatatctaattctcataaccagactgtggatcattatcatatgacattttagaaggaactgaggctcagagacatgacgtcatttgcc

SEQ ID NO: 2243 - DNA, 201 bp, Homo sapiens
tccctgctgacttgaaaatggtgctcaattcattcttttacaaggaagttgccgtgggtacccacgcaaggatagagcctcgagggatggtatgtgcagaygacacaggacatcctgctggatcttatcagcgctgactgggaaaaatgcactaaattatcagttcagggagggagggggtcagagaaaggaaacattgca

SEQ ID NO: 2244 - DNA, 201 bp, Homo sapiens
tacaatttcttattaaacttgatttggtttggtttagcttagctcctagcattgaatcagtgttgttttctgatttactgcaaccctactctgttgttttrcaactctacagcccttaggtacattataaaacttccatggggttgacctagaaacccaacaatatgacattgttctgtggggaaacacatcctaatctca

SEQ ID NO: 2245 - DNA, 201 bp, Homo sapiens
gatccctagtgtcgtagaaaatctactctttgtttttagacctaaagtagataaactttaaagaacttcttgcaaagagttaaaatgttttatatatatawatatatatatatatatatatatatatatttaaagtaactttatatatatatatatatatatatatatttttttttttttttttttttttttttttttggg

SEQ ID NO: 2246 - DNA, 201 bp, Homo sapiens
acatgccgcaggcatcttcctttcacctgcacacgggccagcaggcgtttcctggccattgttcgccatggctgcagcggctctatttccgtccaccagtkaagtggggttggagctggctgagctttttgatggggctggcttttgtggcttttgtgtgtctctcacccaggccagcattaccatcagcccccgtagaag

SEQ ID NO: 2247 - DNA, 201 bp, Homo sapiens
tatatgttgttatatatacttaagttaatattaagtatataaagttaagtatagtaagtatatgaaattgccaatatttgactatttttgacctgcaaaaygacaatttcatatgattggacctaatacatttcatgacagaatatcataagattcagtaaagtataaataaggaaatttttcaaaaactcagagtccatc

SEQ ID NO: 2248 - DNA, 201 bp, Homo sapiens
agaatgaagaggtcccactgagctgtgtgaagaaaaggatctgctaccagagagaaggacaggcccactcattcctccttgaggagtgcctcctggccgcktgtcctgctgtctaaccgtggctccaaactgactggttgcatcttggccaactgctcctaggcagggctgcatttcgtccccgaggtgacagtgcacatg

SEQ ID NO: 2249 - DNA, 201 bp, Homo sapiens
aagctgaggcaggagaattgcatgaaccctgacgcggaggttgcagtaagccgagatcacgacactgcactccaggctgggcaacagagcaagactccatyttgaaaaaaaaaaagatcccatctctcaacactgccacattggggattaagtttcaacatgagttttggaggaaacaaatattcaaactatagcagatgg

SEQ ID NO: 2250 - DNA, 201 bp, Homo sapiens
catacatgagctggtccatacataggggggtctacatatcagctggtccatatatcaactggtccatacatctgctggtctctagatcagctagttcatamaccagggggtccacacatcagctggtccatacatcaggtggttcatacatcagcaggtccatacatcaaggggcccatatatcaagaagtccatatatca

SEQ ID NO: 2251 - DNA, 201 bp, Homo sapiens
acattttgaaatgaggatgttaggataaagagccagggtcaagaaaccacaagcatcttgaaattgtgaagtcatcttctctagaatctccagtatttcartcccattacattcccctaattgaatctgcctttgccagcctttctgctaaaatacaatttcttattaaacttgatttggtttggtttagcttagctccta

SEQ ID NO: 2252 - DNA, 201 bp, Homo sapiens
ctcccgggttcatgtgattctcctgcctcagcatcccgagtacctgggattacaggcacctgccaccacgcccggctaattctgtatttttagtagagatrgggtttcaccatcttacccaggctggtctcgaactccagacctccggtgatccgcctgccttgtcctcccaaagtgctgggattacaggcatgagtcacc

SEQ ID NO: 2253 - DNA, 201 bp, Homo sapiens
tattactgagcatttaaacattaacaccagcgttgccatcaagacattatagccaagtgaggcatcaactcttgtgtgtgtgtgtgtgtgtgtgtgtgtgygcgtgcgtgtgtgcgtgcgtgtgtgcgtgtggtgtgtgagaagagtcatctagaagagccattctgctcctagagaataaaggagaatttttttcctttt

SEQ ID NO: 2254 - DNA, 201 bp, Homo sapiens
catgcacccattcacagtatatttggctttcttattaacacaattcaatattttgcaggttacagagagtgaaaagggctctgtattcccctccgtttgtwaaacaaaacgtttcttctggtatattcatatcattccattggcttctgacctatcttttccttgcacacacactggccctaatgtgggcatcccatctga

SEQ ID NO: 2255 - DNA, 201 bp, Homo sapiens
acagagagtgaaaagggctctgtattcccctccgtttgtaaaacaaaacgtttcttctggtatattcatatcattccattggcttctgacctatcttttcyttgcacacacactggccctaatgtgggcatcccatctgaatacagctgcatctgtgggtgtttccttacaacaaaaagagagggcggtttagctagggga

SEQ ID NO: 2256 - DNA, 201 bp, Homo sapiens
cactgctgtcaactgcccgcatctcttagttgaaacttttgaaaaaattgagtttcagacagccggtggatgcttgagtactgggttagggtgtctccccrctccgatcagaggggaggggctggacaagggagaggtaggttggatggggaggagggaatgaccaggcatgggtgcctgagctttccccactgcaggtgc

SEQ ID NO: 2257 - DNA, 201 bp, Homo sapiens
tttgaaaaaattgagtttcagacagccggtggatgcttgagtactgggttagggtgtctccccgctccgatcagaggggaggggctggacaagggagaggkaggttggatggggaggagggaatgaccaggcatgggtgcctgagctttccccactgcaggtgctgcgggtgaggacagtttccaggccacagggactccc

SEQ ID NO: 2258 - DNA, 201 bp, Homo sapiens
gcagcccaggccccagcagggactcttccaggcttcacgcactgttgctgcatagaactggtggccttgcacctcccagtttcatgttgtgttcactctgstgtgccaccagctgaaaagcagactgtgttgctggaatcattcgaaaccacaaaatgtataataacacctaagcacatggggaaaaagaaatcgacctca

SEQ ID NO: 2259 - DNA, 201 bp, Homo sapiens
ctgcagcctcgaactcctgggctcaagcaattcttctacctcatcctctggagttgctgagacaggtgggcactaccatgcctggctgatttttaaatttygtgtagagacagagtcttactatgttgcacaggctggtctcaaactcctggcctcaagagattctcccagcttggcctcccaacgtgttgggattacagg

SEQ ID NO: 2260 - DNA, 201 bp, Homo sapiens; identical to SEQ ID NO: 314

SEQ ID NO: 2261 - DNA, 201 bp, Homo sapiens; identical to SEQ ID NO: 315

SEQ ID NO: 2262 - DNA, 201 bp, Homo sapiens; identical to SEQ ID NO: 316

SEQ ID NO: 2263 - DNA, 201 bp, Homo sapiens
actctttttttgagactgagtctcgctctgtcacccaggctggagtgcagtggtgtgatcccagctcactgcaacctccacctcccagtttcaagaaattstcctgcttcagcctcccgagtagctgggattacaggaatgggccaccacgcccagctatattttttgtatttttagtagagacagggttttgccatattg

SEQ ID NO: 2264 - DNA, 201 bp, Homo sapiens
gacattcctttttattgataataactctttcaaccaattgccagttagaaaatctttgaatctgcctgacttggaagtcccacttccagttatcccacttytctggctgaaccaatgaacatcttacaagtattgactgatgtctcatgtctccctaatatgtataaaaccaagctgcaccctgactaccttgggcacatg

SEQ ID NO: 2265 - DNA, 201 bp, Homo sapiens
ttttatttttaattctcagcaaggcaagctacttctatagaagggtgcgcctttacagatggagcaatggtgagcagcacacttggacaagggaggggaargggttcttatccctgacacacatggcccctgctgctgtgtccttcccctgttggccagggttagaccgcacaggctaaactaattccgattggctaattt

SEQ ID NO: 2266 - DNA, 201 bp, Homo sapiens
gactgggtgagtggtttggtgggagaaatggttatgcaggatggagaatgagtcagggcagagcaggtagcaggtaatcggaatgagttagagtggagccrgtaatcgcaatgagtcagggtggagcaagtgattgaaatgagtcagggtggaggaggtaatcgaaaaaggttactttacgaggaagttaagtttacaagt

SEQ ID NO: 2267 - DNA, 201 bp, Homo sapiens
gcaatgatgtcttatgtttcaaagatgaggtgtaagatgagttgggattatgtttacgtttcattttccccacttttaaataattttctttaaaagagaakaagaaatagattcacagtttagagaaagtctatggaaaaaataatagaaaaatcctgggtgaaggataaactacgaatttcaaaagataatgcagctatc

SEQ ID NO: 2268 - DNA, 201 bp, Homo sapiens
attataggcatgaaccactgtgcccagtctgctgttgatgaactttcatcttgacttaacaaagcaatgacaatgcagggaggcaagttcctaatgatttycctttatcaacccccaaagagaatcacactcttttccttcctgcggcatcaaccatctcatagttaagtcctcatgagccgagcaaagtgttatgtaaca

SEQ ID NO: 2269 - DNA, 201 bp, Homo sapiens; identical to SEQ ID NO: 332

SEQ ID NO: 2270 - DNA, 201 bp, Homo sapiens
tttgtctaccagcataagccaggaggagctggagttacacaccaacatgagaatatttgtcctcagtccttcctgccacttatcaccttccctgggtcccsgtgcacagcgactcactggacaaactcctccccttcctctgctttctcggccattctcctttctccttccagaggatccctagtgtcgtagaaaatctac

SEQ ID NO: 2271 - DNA, 201 bp, Homo sapiens
cttgcaaagagttaaaatgttttatatatatatatatatatatatatatatatatatatatttaaagtaactttatatatatatatatatatatatatatwtttttttttttttttttttttttttttttggggggggggatggagtctcgctctgttgcccaggctggagtgcaatggcatgatcttggctcactgcaac

SEQ ID NO: 2272 - DNA, 201 bp, Homo sapiens
tatatatatatatatatatatatatatttaaagtaactttatatatatatatatatatatatatatttttttttttttttttttttttttttttttggggkgggggatggagtctcgctctgttgcccaggctggagtgcaatggcatgatcttggctcactgcaacctctgcctcctggatttaagagattctcttgcct

SEQ ID NO: 2273 - DNA, 201 bp, Homo sapiens
aaggtaacaggctgtctgctggtcccatcacagctgagttttattttaaactttaatggatagcaatgctatatacccacatgtgtccttatatattgttctagctgcacatagataatccttcctaatttcactcacaattataaaaggggtagccaaacagccctgggacaccgcccctttctgaaaagggaaggcttg

SEQ ID NO: 2274 - DNA, 201 bp, Homo sapiens
gtaagctgttttcctcatttcttccttggctccacatgtgcagagccccaaagcttgagtatcccggggccctctaagtagtatgaaatttcagatcacaytaagatgtgtgttttaaagtaaggactatcccctagttggttgataagttaatccacatattaaaatataactgaaaaaaatcccttgaccacattaatg

SEQ ID NO: 2275 - DNA, 201 bp, Homo sapiens
gggccattggtcactcatattagtcctaattaccctctctaaatccaatcaagtcattatgcctcaggctttgtttaagaataaagtagaataggccaggktcgggtggctcacacctgtaatcccagcactttgggaggccgaggtgggcagatcacctgaggttcggagttcgagaccagcgtggccaacttggtgaaa

SEQ ID NO: 2276 - DNA, 201 bp, Homo sapiens
cttcaacccgggaggcagaggttacagtgagctgagatcatgccactgcacgccagcctggcgacagagtgagactctggcaaacaaacaaacaaacaaargttacagaagtccaataaggtttcagataccatgctagaccttttccaataggaatgaaaaagtaatacccacttccccgccctgctttttctcttccca

SEQ ID NO: 2277 - DNA, 201 bp, Homo sapiens
gaaatacccaccagggcagtcctcagtgagttgtcctcagctgaaatggagcccacaggaaacaggattctaaattctccgggtaaccaccctaccctctrgacctgtgctgtccaatattgtagccgctcatcacatacagctactgggcacttgaaatatggctcatgcaaattgagatgtgctgtaagtgtaagatac

SEQ ID NO: 2278 - DNA, 201 bp, Homo sapiens
ttttcaaaaaattttttcttagctctgtttagtgatctcttaatgatgccaaacaactgtcagaaatcatattgcaaagcctctcataaacgtaccagtcrgttgtctttaagttaccatgttgttactcctccagagttttgatgattttatttggccatgaagatgacgaccagcgtgtgcacctgtggtctgagtaag

SEQ ID NO: 2279 - DNA, 201 bp, Homo sapiens
gcagaagctaacggacagacaatgagctggaagcgaccaatccttccaccttgggaggacagctgtgtcccagaggcctggaggcaccacgttccctacartgatttggttttcagtttttagggtcctgcgcgtcatggtctgataggacttttgactgaatatgggaagggatttaggagtagacaagaataagaagtc

SEQ ID NO: 2280 - DNA, 201 bp, Homo sapiens
ggtttcacaatgttggccaggctggtcttgaactcctgacctcaggtgatccacacccttcagtcacccaaagtgctggaattacaggtgtgagccaccgygcccagccaatgagcattatttttggactctgcctctctccttgggatagagataaattatctgtccgttgttttcttttcttcccatggactttatcca

SEQ ID NO: 2281 - DNA, 201 bp, Homo sapiens
ccaaagtgctggaattacaggtgtgagccaccgtgcccagccaatgagcattatttttggactctgcctctctccttgggatagagataaattatctgtcygttgttttcttttcttcccatggactttatccagttcctgcctttgggttattgtatttcggaatcttattatttttaaaagagaaagaaactgaaattg

SEQ ID NO: 2282 - DNA, 201 bp, Homo sapiens
actcagcctactttgctttttcaccagacccactctccaccttcactaattttaggtaaaaatttatagaagtcagctgggcatggtggctcacgcctgtwatcccagcactttgggaggccaaggcaggtggatcatgaggtcaagagatcaagaccattctagccaacacagtgaaaccctgtctctactaaaaataca

SEQ ID NO: 2283 - DNA, 201 bp, Homo sapiens
ttgctttttcaccagacccactctccaccttcactaattttaggtaaaaatttatagaagtcagctgggcatggtggctcacgcctgtaatcccagcactktgggaggccaaggcaggtggatcatgaggtcaagagatcaagaccattctagccaacacagtgaaaccctgtctctactaaaaatacaaagattagctgg

SEQ ID NO: 2284 - DNA, 201 bp, Homo sapiens
tgctttttcaccagacccactctccaccttcactaattttaggtaaaaatttatagaagtcagctgggcatggtggctcacgcctgtaatcccagcacttwgggaggccaaggcaggtggatcatgaggtcaagagatcaagaccattctagccaacacagtgaaaccctgtctctactaaaaatacaaagattagctggg

SEQ ID NO: 2285 - DNA, 201 bp, Homo sapiens
acccactctccaccttcactaattttaggtaaaaatttatagaagtcagctgggcatggtggctcacgcctgtaatcccagcactttgggaggccaaggcmggtggatcatgaggtcaagagatcaagaccattctagccaacacagtgaaaccctgtctctactaaaaatacaaagattagctgggtgtggtggtgcatg

SEQ ID NO: 2286 - DNA, 201 bp, Homo sapiens
cccactctccaccttcactaattttaggtaaaaatttatagaagtcagctgggcatggtggctcacgcctgtaatcccagcactttgggaggccaaggcasgtggatcatgaggtcaagagatcaagaccattctagccaacacagtgaaaccctgtctctactaaaaatacaaagattagctgggtgtggtggtgcatgc

SEQ ID NO: 2287 - DNA, 201 bp, Homo sapiens
taacatttcaaaagagttcattaaacaaatagactttctggggaaggactggattggtgtttgaaattggctaaacaaacactcggggatgtcatacattyctgctatgcagatgtgtaggacatcatgtagttcatggattggacattaccttaaacccatgggcactattaaatagaataggtaactaagtcatgacgg

SEQ ID NO: 2288 - DNA, 201 bp, Homo sapiens
tttgacagtggcttgaacataggtttgtcaatggagaaatgtcatgatcgaaatgggatttatgtcagattgctctctaggctgtgtaggaaatctaagtctgtagagtaaggccaacagaagagccccagacataagactattgccaaaattgcaggaatatattggaaaggatgggtcaagaggatacaaatacaggac

SEQ ID NO: 2289 - DNA, 201 bp, Homo sapiens
gaagggtaactgtttgtctcacttcccacagaacccccagttcattaggcaggcagcaagcctctggctgatttcttaagttaatccacacatctatcccrtgctcctgggtatcaggcccagtgccaggctgcagctgcctgggtgataacaagtcagtgtggctcatgaggaccttggaggccactgagaagatgggga

SEQ ID NO: 2290 - DNA, 201 bp, Homo sapiens
agaggctgtacatgagggtcctaacatctttagaagaaaaccatcagggcagctggggcaggggcagctggtgggtgagactggggtcggggaagaggaarggttaggactagatgacacagagagggatggaaccacacagacccctgcatcctactaggaagtccccaggaagggcctttgtcactgccttcctgcccg

SEQ ID NO: 2291 - DNA, 201 bp, Homo sapiens
ttatattttacatcacataagcgagtttttttttttttttcctgtgtttaaatctcccaagatcaagtaagtggaagcaagagacccaaattgcaggaaartgggagtgggtagggataagggaattaggaggttaggcttgtttctctcacgtcttgcccaccatcccttgtccatgtactggtgaccggtgtggaaact

SEQ ID NO: 2292 - DNA, 201 bp, Homo sapiens
acaagctgacacgaggagagcaaacaattagaaatgatttttctcatgcagtaactatgcagattcaatctcctcacagtggaggtataggattgaaaaaytgtttgtcactctcttcttggtccccagcattgtaggttttgtttcagttagcgtcaaatcttctaagccaacagtaaacatctaatgcacttgattagt

SEQ ID NO: 2293 - DNA, 201 bp, Homo sapiens
agtgactacgattatttccagagtgcaaataattgctatccgtattcatcagtgtgttacagagaagcagaaccaacaggatgtgtgtgggtagatggatrgatagatggatggatggatggatggatagatacacagatagatagatagatagatagatagatagatagatagatagatagatacagatttgattataag

SEQ ID NO: 2294 - DNA, 201 bp, Homo sapiens; identical to SEQ ID NO: 327

SEQ ID NO: 2295 - DNA, 201 bp, Homo sapiens
cgattatttccagagtgcaaataattgctatccgtattcatcagtgtgttacagagaagcagaaccaacaggatgtgtgtgggtagatggatagatagatrgatggatggatggatggatagatacacagatagatagatagatagatagatagatagatagatagatagatagatacagatttgattataagaaattggc

SEQ ID NO: 2296 - DNA, 201 bp, Homo sapiens
ataattgctatccgtattcatcagtgtgttacagagaagcagaaccaacaggatgtgtgtgggtagatggatagatagatggatggatggatggatggatrgatacacagatagatagatagatagatagatagatagatagatagatagatagatacagatttgattataagaaattggctcatgccattatggaggctg

SEQ ID NO: 2297 - DNA, 201 bp, Homo sapiens; identical to SEQ ID NO: 330

SEQ ID NO: 2298 - DNA, 201 bp, Homo sapiens
ggatggatggatggatagatacacagatagatagatagatagatagatagatagatagatagatagatagatacagatttgattataagaaattggctcaygccattatggaggctgacaagttgcaagatcttcagcgtgagttgagaatcctaagacccaggagagctgatggtacacattccaatctgatggccagca

SEQ ID NO: 2299 - DNA, 201 bp, Homo sapiens
ctctgcctcctgggttcaagtgattctcctgccttggcctcccaagtagctgggactacaggtgcatgccaccacacccagctaattttttgttttttttktttttttttttttttttgagacagagtttcactcttgttgcccaggctaaagtacaatggtgtgatcttggctcaccgcaacctccacatcccaggttca

SEQ ID NO: 2300 - DNA, 201 bp, Homo sapiens
agaactaactctatttttcatcctacgggaagctggatttgacagctaatggatctgttttgttctaaaactaccatctgttccaaggccctttttaaggktttaatcatcaccattatgtgtgagatataaatatatattcataataattcatttcaaagaaaaaggtaaaagcacaattacacttagacgtaaacgata

SEQ ID NO: 2301 - DNA, 201 bp, Homo sapiens
taaccaaagaaattccagactgatatataacatatcaaaatatagctttgttctactcctttatctttcatgctccagccaatctgttaaactaatccatsgtacaaattcactaggtgtcaataatgtcttatcccttccaggtaacacagatgccttttaagcttaacctcaggaggcatttgccttcatctgggaaac

SEQ ID NO: 2302 - DNA, 201 bp, Homo sapiens
tgagcaagccccctcagctgattggagcctggtgaatcagctgacccaagggcagccaatccatgaccaggaaccaggaagaggtttacaaagattctctrcctagacaggggcaatggtgattgagtagacctatcagattatttcttttggaagtttttctccttaaaactcaaaagagtccatctgaaaaataacatc

SEQ ID NO: 2303 - DNA, 201 bp, Homo sapiens
cctgtgactttttgtgtagtagtgtaaaggggacctgttgccattagctgatcattaaaggagcgactcgttcaagatgcagctctttctatcacaggtayaatttcatggtcttgctatcagatcagagcaatcatcgttgtcctcaaaagcagtgagccccacaatggccgcttttgtccagccattcagccattagag

SEQ ID NO: 2304 - DNA, 201 bp, Homo sapiens
ctgcaacctccaactcctgggttcaagagattctcctgcctcagcctcccaagtagctgggattacagacatgcgccaccaccacccctggctaatttttstatttttttagtagagatggggtttcacaatgttggccaggctggtcttgaactcctgacctcaggtgatccacacccttcagtcacccaaagtgctgga

SEQ ID NO: 2305 - DNA, 201 bp, Homo sapiens
tcacaggcttgatgggtgaattgcctgctttgcactaaatggcagttctctgatgctgttgtattaaaaaaaaagaaaggaagaaagaaaaagaaagaaayccttcatcctgccccagagagagtgcaaagtgcctttcttgattcagctgtttgccttccttcaattccaatcagtctgtgctgtgtggtatgacagaga

SEQ ID NO: 2306 - DNA, 201 bp, Homo sapiens
ttgggattacaggcgtgagcctccgcaactggcctgtgcaaatattttcttctcaaaaattctggaagcaatctgcaagtaaccaaatagtgctcatgatsgtttgggagcttgatgtcctcttagggtattttttgtgtcattagcttcagaaacacaggaatataaagaacaccatttatcatattgctgagcccagca

SEQ ID NO: 2307 - DNA, 201 bp, Homo sapiens
caggcatggtggtaggtgcttgtagtcccagctacttgggaggctgaggcaggagaatcacttgaacccaggaggcagaggctgcagtgagctgagattgyaccactgcactccagcttgggcaacagcacgagactccatctcaaaaaacaaacaacaaaaaaggatagaaaggccaattctatttgattctatttgctc

SEQ ID NO: 2308 - DNA, 201 bp, Homo sapiens
gctgaggatttggctcaaggtacacagagagtacttgaaaccactgaatctttcagtgagtttataatatggtcccattcctctctgcttggccagttgcytgcttggcatcctccaattaaacttggaagaagtggtgaaaggaagtgaagtaatgtcttagccacaggtacaatgtgtgtcaatatccaatggaggaga

SEQ ID NO: 2309 - DNA, 201 bp, Homo sapiens
attttggtataagtacacctggtgcgagtctaaaacagagttgctttggtgagaagagagaatctgttttcctctatccctaaactgagaacaagtcatgraagaggcttcgggggccatctgggtagcagacatcatggacaggaagatgctgtttgaccataagagggcagttcttggaaagcatgcaggatgtgcagg

SEQ ID NO: 2310 - DNA, 201 bp, Homo sapiens; identical to SEQ ID NO: 301

SEQ ID NO: 2311 - DNA, 201 bp, Homo sapiens
tttattgataataactctttcaaccaattgccagttagaaaatctttgaatctgcctgacttggaagtcccacttccagttatcccacttctctggctgawccaatgaacatcttacaagtattgactgatgtctcatgtctccctaatatgtataaaaccaagctgcaccctgactaccttgggcacatgttctcaggat

SEQ ID NO: 2312 - DNA, 201 bp, Homo sapiens; identical to SEQ ID NO: 303

SEQ ID NO: 2313 - DNA, 201 bp, Homo sapiens
cagtcccccttcctcctcaaaaaatatgcccactagactttaaggttagttaaaacttgtcatagacttctaaagcaagttttcttcatctataaaatcargatgattttctcagtcctacatcttcctgaaaattgtaaggagtttaaaataagacaaataaatcctgttataatacagtaccagttggtaaatatttct

SEQ ID NO: 2314 - DNA, 201 bp, Homo sapiens
aaattgtaaggagtttaaaataagacaaataaatcctgttataatacagtaccagttggtaaatatttctgtgtctcagttcatggaaacctatttcaggraggttttttgttttgttttgtttgagacagagtctcactctgtggcccaggctggagtgcagtggcatgatcatagctccctgtagccttgaactcctag

SEQ ID NO: 2315 - DNA, 201 bp, Homo sapiens
aaaatctgcaggcagagagccactcatgttgacagcttcctcgggcattttcaagtacagtcatgcgtcgcttaatggggctgcactctgagaaatgcatyattagcagttttgtcattgtgtgaacaccatagagagtgcacttctacaaacctagatggtagaatctactacacacctagtcttcatggtagagcctat

SEQ ID NO: 2316 - DNA, 201 bp, Homo sapiens
aatgaatacagtttctgtttgggatgatacaaagtttctggaaatgaatagtcatgatggttgtaaaacaccatcaatgtacttaatgccactgaaacgtrtactttaaatggttaaacaaaagtacagaaaggtcaggcatggtggtaggtgcttgtagtcccagctacttgggaggctgaggcaggagaatcacttgaa

SEQ ID NO: 2317 - DNA, 201 bp, Homo sapiens
cttggactttgctttccttttgatgtatttaatcattttaaacataagaatcctcatctcttccccactgcactgctgcccccatgaccccagcatgctaraactgcttcattgctcctaaatttgtagcccatttaaattcaagcatctgttctggcactgtaacacaaggccatgccatgtctatccgcaccaccccac

SEQ ID NO: 2318 - DNA, 201 bp, Homo sapiens
ctgagattgcaccactgcactccagcttgggcaacagcacgagactccatctcaaaaaacaaacaacaaaaaaggatagaaaggccaattctatttgattytatttgctcaattccttgccaagagcttaggcatctctgttcccaataccatcttctggccagggatttgtaaatatattaccttgtgcccaagaagact

SEQ ID NO: 2319 - DNA, 201 bp, Homo sapiens
acacccttgtgccgtgcctgtcatatcatcaagtgtcttgagattaaagttggtcgtttcagctcacatgtctttagtggtctttcatgcctctggttaaraaatcaacagcccaaaacgagttcgggtcacagactcccatctttgctggatgactgatgctccaattcggaagtgtcatcccaggcattgatcgtacac

SEQ ID NO: 2320 - DNA, 201 bp, Homo sapiens
cagatttctgtacgggtactaaatgctcaaaaagtccctgttggctgggcacggtggctcacacctgtaatcccagcactttgggaggccgaggcaggtgkatcacctgaggtcaggagtttgagaccagcctggccaacatgatgaaaccatgcctctactaaaaatacaaaaaaatttagccgggtgtggtagcaggca

SEQ ID NO: 2321 - DNA, 201 bp, Homo sapiens
gtcatcccaggcattgatcgtacacagaacctcctggttccatcatcctctgttgcaaactctgttaatatgagtccaggggaagaatgagaagagatatytgtgtgaggcccaaaatgagggaaatcggggaaggcttcatgataccagatcatgccatgagaaggctagatgttagcacatctctgagggcgttaatgt

SEQ ID NO: 2322 - DNA, 201 bp, Homo sapiens
agattgtgcaatcagaatttaaacaaaataattaaacccttcaaaaacaagtctggcctggtatggtggctcatgcctgtaatcccaacactttgggaggytgagacaggggatcacttgagaccagggttgaagatcagcctgggcaacatagtgagaccctgcctatacaaaaattaaaaaattagccacacatggcag

SEQ ID NO: 2323 - DNA, 201 bp, Homo sapiens
tttttttttgagaccgagtctcactctgttgcccaagctggagtgcagtggtgcgatctcagctcactgccacctccaccttccaggttcaaatgattctmgtgcctcagcctcccgagtagctagaactacaggcatgtaccaccacacctggctaatttttgtatttttagtagagatggggtttcgccatgtcggcca

SEQ ID NO: 2324 - DNA, 201 bp, Homo sapiens
ccagggttgaagatcagcctgggcaacatagtgagaccctgcctatacaaaaattaaaaaattagccacacatggcagcatgtgcccatagtcctagcaastctggaggctgaggcaagaggatcgcttgagcccaggaggttgaggctgcagtgagctaagatggtgccatggcagtccagcctgggtgagagagggaga

SEQ ID NO: 2325 - DNA, 201 bp, Homo sapiens
tgaaatgagtaccccagtcaaggcagttaacatagtcatcttctctcatagttaccagtttttttgagtgtgtgctgagaacatttgagatgtactctatyagcaaattccaagtgtacatgatggcattagtaactaaagtcaccatcctatgcactcagtctccagtacttactcatcttatagcttagggtttgtacc

SEQ ID NO: 2326 - DNA, 201 bp, Homo sapiens
ccagaaatggaagccacctcccgtttgtagagtgccatgatgttcgaggtgctttgcatttctctcattcattctcacacaaacttcatggagtgtgcagygtaagaacagctaatgctcatagaatgttggctctgtactaaatggtttcaccaaatatctaattctcataaccagactgtggatcattatcatatgaca

SEQ ID NO: 2327 - DNA, 201 bp, Homo sapiens
tgaagtttaatccatgttgttgtaaaatggcaggatttgcttatcttttagggccgaataatatcccattgtgtgtgtatatacaatttctttttttcttyttttttttttttttttgagacagagtttcgctcttgttgcccaggctggagtgcaatggcgccatctcggctcacagcaacctccgcctcctggattcaa

SEQ ID NO: 2328 - DNA, 201 bp, Homo sapiens
ttatgttacctcctgataaacagggaaattgggaagcactttactgtgaataccttcagctccccaaatggggccatcaatcactttgtagttcatgagakctacagggcgagtgaccaggtgttcctaagagagcctgtccctgtaaagtgaatgttaggactggtcatgccccatggctctcaaactttggtgcacatt

SEQ ID NO: 2329 - DNA, 201 bp, Homo sapiens
gccctgccctgcccttccttctttccttccttccagaatagtattgcaaatagcatgtgccttttcaggttttttaaaaaagcatttagacttaaaactaytgaaataccataaagtgttccatcaagatttcctgaggttaatattataatctcaggtgaacagagtatcgagtgagtggagcttataatattaacctct

SEQ ID NO: 2330 - DNA, 201 bp, Homo sapiens
agggaaagtaaaaacaacaataatgatgatattaggacaatttgtcatgtgaggtcacagcaaagaattagaagaactaggaaatgtttttctacattttyattaatactttaggctggggcgtggtggcttatgcctgtaatcccagcactttgggaggccgaggcagatggatcacttgaggccaggagttcaagacta

SEQ ID NO: 2331 - DNA, 201 bp, Homo sapiens
gctggggcgtggtggcttatgcctgtaatcccagcactttgggaggccgaggcagatggatcacttgaggccaggagttcaagactagcctggccaatatrgtgaaaccccatctctactaaaaacacaaaaattagccagacgtggtggcgcatgtctgtaatcccagctacttgggaggctgagcaggataattgcttg

SEQ ID NO: 2332 - DNA, 201 bp, Homo sapiens
accgcgcccagccccaccggcatatttctgagtttatgatagcaggctcagcttgtgtggaaataaacccaaatctgcatttacgggttgagcaccccaarccaatatgctccagagtccaaaacttttttttttttttttggtgggggggacagagtctaactctgtcacccaggctggagtgcaggggcgtgatcttgg

SEQ ID NO: 2333 - DNA, 201 bp, Homo sapiens
ataccacctagaccatagcatcgcaagggagggtgctgacggggtcttatttgtctttatattcttcagcccagtgcctggcacttccaatgtaaaacaartgccctgatgaatttacgttggcgtaagcgtgcagcacccgcactctgggatggagaattgctggatgtttcgctcctggcctgccttccctagcccact

SEQ ID NO: 2334 - DNA, 201 bp, Homo sapiens
cctcctggattcaagcgattctcttgcctcagcctcccgagtagctgggattacaggcacgtaccaccatgcctggttaattttttgtgtttttagtataratggggtttttgcatgttggtcaggctggtcttgaactcccaacctcaggtgatccacctgcctcggcctcccaaagtgctgggattacagccgtgagcc

SEQ ID NO: 2335 - DNA, 201 bp, Homo sapiens
ccaccctgcagcagcactgggcctggctgagctctccccaggtgaggcctgttttcgtttgaaaggagcacttgattctgtgagctcctggggttaccatsgctggatggtcttttctcagtcccttgtcctccaccctccccctggcatgcatggacgtgtgacagctctcagagcccagctgtgtccctttcctgtctg

SEQ ID NO: 2336 - DNA, 201 bp, Homo sapiens; identical to SEQ ID NO: 329

SEQ ID NO: 2337 - DNA, 201 bp, Homo sapiens; identical to SEQ ID NO: 331

SEQ ID NO: 2338 - DNA, 201 bp, Homo sapiens; identical to SEQ ID NO: 333

SEQ ID NO: 2339 - DNA, 201 bp, Homo sapiens
tggtgctcaattcattcttttacaaggaagttgccgtgggtacccacgcaaggatagagcctcgagggatggtatgtgcagacgacacaggacatcctgcyggatcttatcagcgctgactgggaaaaatgcactaaattatcagttcagggagggagggggtcagagaaaggaaacattgcaacagttaccagggcctca

SEQ ID NO: 2340 - DNA, 201 bp, Homo sapiens; identical to SEQ ID NO: 334

SEQ ID NO: 2341 - DNA, 201 bp, Homo sapiens
gctgggtttaagttagaacacagaaaaagcaaacataaaactcccaacagatttaaaacaaattgacaaagaattcaagaaagcctagatattttctaacrttttctggccattttgtttttcttcagacagggtctccctctgttgcccaggctggagtgcattggtgcaatcacagttcactgcaaccttgacttcccg

SEQ ID NO: 2342 - DNA, 201 bp, Homo sapiens
gagccatggttggccaactcttttttttttttttttttttttttgagacagtttcactcttgtcgcccaggctggagtgcaaaagtgtgatcttggctcayggcaacctctgccctccaggttcaagcgattctcctgtctcagcctcccgagtagctgggattacaggcccccgccaccatgcccagctactttttttgt

SEQ ID NO: 2343 - DNA, 201 bp, Homo sapiens; identical to SEQ ID NO: 335

SEQ ID NO: 2344 - DNA, 201 bp, Homo sapiens
agctgggactacaggtgcgtgccaccacgcttgcaggcacatctaaatatggggttgtggtggattttatatattaaagaattaatacagtgttttttttkgggggggggggttgttgttgtttatttgagacggagtctcgctctgtcgcccaggctggagtgcagtggtgtgatctcagctcactgcaacctctgcctc

SEQ ID NO: 2345 - DNA, 201 bp, Homo sapiens; identical to SEQ ID NO: 336

SEQ ID NO: 2346 - DNA, 201 bp, Homo sapiens
ggagtgcagtggtgtgatctcagctcactgcaacctctgcctcccaggttgaggccattctcctgcttcaaaattagcagtggctaatttttttttttttyttttttttgtaaattttctgtagagatgggggtcttgctatgttgcccagactggtcttgaacttctgggctcaagcaatcctcctgcctcatcctccca

SEQ ID NO: 2347 - DNA, 201 bp, Homo sapiens
caaggattcagctagctgctgtttcttttttttgagacggagtctcactctgtcacccaggctggagtgcaatggctcgatctcagctcactgcaacctcygcctcctgggttcaagcagctctcccgccttagcctcctgagtacctgggattacaggtgcccaccactacacccagataattttggtatttgtagtaga

SEQ ID NO: 2348 - DNA, 201 bp, Homo sapiens; identical to SEQ ID NO: 337

SEQ ID NO: 2349 - DNA, 201 bp, Homo sapiens
ctgcctcatcctcccaaaatgttgggattacaggtatgagccactgtgcctggccattctggtcattttgcctcactcctttggtcagccccagtcctcasctaatgctttggcccccactcctatggtgaagattccccactctggatttccacaatgtgagccgaagcgaccatttccacttcagaggtattcaaaaat

SEQ ID NO: 2350 - DNA, 201 bp, Homo sapiens
cctggcctttttttttttttttttttttttttgatcagctgctgtttctaatcatgactttttccatcaacaaatctctctgaaagctgtttcttgttctycaaaaaggccagaagagttacgtagatggcttgctaacacttgcctcattgtagtcaactctgtagaagtgatcttgtccaaagcaagaaggggaattct

SEQ ID NO: 2351 - DNA, 201 bp, Homo sapiens
aagctctgcccagacagtctcgtctccagccgacaggtgtatgctggttctttaacctggaccggagtggtatagagaactgtaccaatcagggtccaacyaggaaaatgggatctgctctaaacattaaaatagaggaaatttggctgggtttggtggctcacacctgtaatcccagaactttaggaggctgaggagggt

SEQ ID NO: 2352 - DNA, 201 bp, Homo sapiens
cgtctgtacgtgactgcggactgggtcatggccagggtgggagtcctgccattatttctctcaccagggtggtccacttcccccattccagtaacttatcrtgcatctccccatcaccgtcgctatggcccagccaagggactgacaatattgaattctcctgacatatttttcttacgttagggcagggcactaggatgt

SEQ ID NO: 2353 - DNA, 201 bp, Homo sapiens; identical to SEQ ID NO: 338

SEQ ID NO: 2354 - DNA, 201 bp, Homo sapiens
ccctagttgtctgggacctagccctgggttgattcagggctgggaaaatattggcttgctgtgaaagagtcagataaggaggtggttgagagagcaggctytggatcacaggggaggtgtgagtaaccttggctgttagtttggccctgtgattaatgaaggccaaataaacaaactaagtccaaactaagaaaacacagt

SEQ ID NO: 2355 - DNA, 201 bp, Homo sapiens
cagaaacacttgtcagaagctgagcccaggggacctgtcccagcagagctcaagtcccaaaggagaggacgtagccctgctggagacactaactgaggttkggtggggaagaataccctggcttctccctccctcctgccttttcccctgccaccatgtctcccattggtgggactcaagtggaaaccacaacacagtcta

SEQ ID NO: 2356 - DNA, 201 bp, Homo sapiens
cactggcctcccatagcatagattcgctcccttttctgcctcctcctggttcttactagttgagtctcttgcagtgcccctgctgtgcggcctgtagcacytgcctgcaccccagctgcaaataaagctggaaaagagagtcctggcttctactgtggggaaggggaacgcaatggcggacgtccaagtttaccaaaggga

SEQ ID NO: 2357 - DNA, 201 bp, Homo sapiens
gtgctagcccatatgcctctggtttggtttctgctggaaagcccagcttttcttggagttagatgagatttattctggagaccctggtcaatgtttcttcycttgacttccccactctgtcctgtacattaaccgtgattgtttgttgtaattttttttaattttagagatggggtttcgccatgtttcccaggctggtct

SEQ ID NO: 2358 - DNA, 201 bp, Homo sapiens
gaaacagaaaggtaggcatgaaggagaattgtttttccccatcagaaacaaagtgctttgggaaaaagtaaataggtgtcaatagttaacagcttaaattwaaaaaaaaaaaaaaaaaagccaatactgctatggcttatgtgaattctgaatctgatgaataaatggtgctgtcagatcccagtctttggttactcaaaa

SEQ ID NO: 2359 - DNA, 201 bp, Homo sapiens
tgaaagagtcagataaggaggtggttgagagagcaggctctggatcacaggggaggtgtgagtaaccttggctgttagtttggccctgtgattaatgaagkccaaataaacaaactaagtccaaactaagaaaacacagttagggcagggatgaacagtgtcttctaccaggtattcggaatccagtagctgaaccaagta

SEQ ID NO: 2360 - DNA, 201 bp, Homo sapiens
cttgtcagaagctgagcccaggggacctgtcccagcagagctcaagtcccaaaggagaggacgtagccctgctggagacactaactgaggttgggtggggragaataccctggcttctccctccctcctgccttttcccctgccaccatgtctcccattggtgggactcaagtggaaaccacaacacagtctacaataccc

SEQ ID NO: 2361 - DNA, 201 bp, Homo sapiens
accttggctgttagtttggccctgtgattaatgaaggccaaataaacaaactaagtccaaactaagaaaacacagttagggcagggatgaacagtgtcttytaccaggtattcggaatccagtagctgaaccaagtatcatgtaagcaaatccaagatatgccctgataaatgcagtactgcaccagcagcttccatgtgt

SEQ ID NO: 2362 - DNA, 201 bp, Homo sapiens
ctctgatgagtgaataagaaaattggagacttaaggcctgaatatgggttggtggtgtaagtagatgttctctccatagtatgatctttaggaattattgaaaaaaaaaaacctgcttattcctttcttccacccatttaaaaataaaaatcatgcaaaacaaaacaaaaaaccctctgtagcagaaatttttctatgaag

SEQ ID NO: 2363 - DNA, 201 bp, Homo sapiens
ggggacctgtcccagcagagctcaagtcccaaaggagaggacgtagccctgctggagacactaactgaggttgggtggggaagaataccctggcttctccytccctcctgccttttcccctgccaccatgtctcccattggtgggactcaagtggaaaccacaacacagtctacaatacccaaggagcagggccagcccac

SEQ ID NO: 2364 - DNA, 201 bp, Homo sapiens
tttttttttttttttgagacagagttttgctctttcacccaggctggagtgaagtggcacaatcttggctcactgcaacctccacttcctgggttcaagarattctcctgcctcagcctcccaagtagctgggattataggtacctgccaccatgcccggctaatttttttgtatttttagtagacatggggttttgccat

SEQ ID NO: 2365 - DNA, 201 bp, Homo sapiens
tccccaatgccatgacacaaggcaaagaggaagagagtgaagaataagcccaaaggcaaaggagccaggcattagtacaaaatcacattgacaaatattcrttcaaaactgcatcaaggccagaaagacaaatcctgagagttggtcaagaaagcaaaaagaaactatacagttttgttttcagtacctgtatcaaccata

SEQ ID NO: 2366 - DNA, 201 bp, Homo sapiens
caagagattctcctgcctcagcctcccaagtagctgggattataggtacctgccaccatgcccggctaatttttttgtatttttagtagacatggggtttygccatgttggccaggctggtctcgaactcctgacctcaggtgatccacctgcctcggccccccgaagtgctacgatcacaggcctgagccaccgcacccg

SEQ ID NO: 2367 - DNA, 201 bp, Homo sapiens
atcaaggccagaaagacaaatcctgagagttggtcaagaaagcaaaaagaaactatacagttttgttttcagtacctgtatcaaccatacacatttacatycttagttgcaaatgataccactagcttgttggagaaaaaaaaacgttcatcaaagggtatcactaggtcacagaaattctgggagaccagaggcaggcat

SEQ ID NO: 2368 - DNA, 201 bp, Homo sapiens
gaggctcttctttctgaaattcaaaattcaatgagtgactgccaaaagaatgcataaaagtcagctccacccaggggcaagagttagaaggataagtccargttcatccctgaggaagaccattttaggaacctcgtcttcagagaccatcaggcaacccttttattcaccacccttgagattacattctggtggagtaag

SEQ ID NO: 2369 - DNA, 201 bp, Homo sapiens
tttgccaaaatactaaggaggaggatctccaactggttgaagctgaggttggatctttgctttttaagttgtgtgggaggtggggagcacgcgtgcgtgcwcacacacacacacacacacacacattaatcctcccttaataacattccagaatagctattcccttaccctacaacttcctatggattctcatgacactgg

SEQ ID NO: 2370 - DNA, 201 bp, Homo sapiens; identical to SEQ ID NO: 302

SEQ ID NO: 2371 - DNA, 201 bp, Homo sapiens
acagaaaatagagcagttgaatataccactaattttcttttcttttcttattttacagattcctatgaccctagcagagtggagagggtgtgatgaaatgycggtggagcttgcattccgttgcgaattgagtattctcaagtagctggtagatttagtctatcagccccacttccccatgtagaagctggaagctgctga

SEQ ID NO: 2372 - DNA, 201 bp, Homo sapiens; identical to SEQ ID NO: 310

SEQ ID NO: 2373 - DNA, 201 bp, Homo sapiens
cattttagaattttaagaccacccggcaaagcaagaatgcatacaggcttttttggaaatcatatgcagattctatttcattggacttgtgttggttttcrtgtgacattgggagtttgttaaagtggtttggttttccataacgtctgtggattgggacttaattatttaccttgacattaggtgtctaattcttagtca

SEQ ID NO: 2374 - DNA, 201 bp, Homo sapiens
cctcacagtctctgccgcatctattccacgctgctgctgtcatgcagaagcagccagatacagtgtgtaaatgagtgtgtggttgtagaccaataaaactwtattgacaaaaatagtcagtgggctgcctttggcccaagagccatggttggccaactcttttttttttttttttttttttttgagacagtttcactcttg

SEQ ID NO: 2375 - DNA, 201 bp, Homo sapiens
gcgcccaccacctcgcccggctaattttttgtatatttagtagagatggggtttcatcatgttagccaggatggtctcaatctcctgacctcatgatctgsctgcctcggcctcccaaagtgctgggattgcaggcgtgagccaccttgcccggccaatccaaaactttttgaatgccatgatgccacaagtggaaaattt

SEQ ID NO: 2376 - DNA, 201 bp, Homo sapiens
tggggtttcatcatgttagccaggatggtctcaatctcctgacctcatgatctgcctgcctcggcctcccaaagtgctgggattgcaggcgtgagccaccytgcccggccaatccaaaactttttgaatgccatgatgccacaagtggaaaatttcacacctgaccacatgtgatgagtgcacaaaattatttaagatgtt

SEQ ID NO: 2377 - DNA, 201 bp, Homo sapiens
acagtgtgtaaatgagtgtgtggttgtagaccaataaaactatattgacaaaaatagtcagtgggctgcctttggcccaagagccatggttggccaactcttttttttttttttttttttttttgagacagtttcactcttgtcgcccaggctggagtgcaaaagtgtgatcttggctcacggcaacctctgccctccagg

SEQ ID NO: 2378 - DNA, 201 bp, Homo sapiens
tctcctgacctcatgatctgcctgcctcggcctcccaaagtgctgggattgcaggcgtgagccaccttgcccggccaatccaaaactttttgaatgccatratgccacaagtggaaaatttcacacctgaccacatgtgatgagtgcacaaaattatttaagatgttatataaaattccctttaggctacgtacctaaggt

SEQ ID NO: 2379 - DNA, 201 bp, Homo sapiens
cagtgtgtaaatgagtgtgtggttgtagaccaataaaactatattgacaaaaatagtcagtgggctgcctttggcccaagagccatggttggccaactcttttttttttttttttttttttttgagacagtttcactcttgtcgcccaggctggagtgcaaaagtgtgatcttggctcacggcaacctctgccctccaggt

SEQ ID NO: 2380 - DNA, 201 bp, Homo sapiens
aatgatcctctatttagtcatgaaattcaaaggtaacactcttacaatgctaaatgcatttgttaggattgggttaagctgcctatgccagaaaattgaamatagcagtggtttaggtgaagtggaaacttatctctctcacacttcaaaggagcccagagacaggcagtccagggctagcacggaagctccttggcaatc

SEQ ID NO: 2381 - DNA, 201 bp, Homo sapiens
ccagggcagatggaagctcactagacggcaataccaagcagcttgtgtgtgtcccgtgtctctgtgactaactgatgtgaccagaacctcaaaggcagcayggatgattttgtctcaccaaaaaatgaaacatgctgccccaaagaaaaggggggttcacatctttaatccccccactttgggagactcaggaaggaggat

SEQ ID NO: 2382 - DNA, 201 bp, Homo sapiens
ggttctccttccttgtggctgctcttcaagtaatcaggtgccactgtttttatctgtttatatttctatctatctatcatctattatgtatctatcatctatctatctatctatctatctatctatctattcggctttaaaatttttgtgaaatacagttctattatctcatattttcatattttttaaactcatgacttt

SEQ ID NO: 2383 - DNA, 201 bp, Homo sapiens
caattgcctgcaggattgagtagagtcacttgctgcatggtttgcggcctaggagtaataggctatagcacgtagcctaggtatgcagtaggctacaccaycttggtttgtgtacatgcactctaggatgtttgcacaacaatgaaatcacctaacaacacaattctcagaacgtattctcatcattaagtgatgcatgac

SEQ ID NO: 2384 - DNA, 201 bp, Homo sapiens
cctgaatgctctgcctttctgtttcattctttcagttggtctcagttgcagaggaagcattctgaactcagtttcctggttattgagatttttatttatasagatacctctataaatccagaagacgcaccccaggaacagatttcaattttttttttttaaacgagactctgtgactaaaggcaaaaatgaaacaggtgc

SEQ ID NO: 2385 - DNA, 201 bp, Homo sapiens
gttctccttccttgtggctgctcttcaagtaatcaggtgccactgtttttatctgtttatatttctatctatctatcatctattatgtatctatcatctatctatctatctatctatctatctatctattcggctttaaaatttttgtgaaatacagttctattatctcatattttcatattttttaaactcatgactttc

SEQ ID NO: 2386 - DNA, 201 bp, Homo sapiens
agttcacagttatttgcatagttcttttttttttttttgagacagggtcttgctgtgttgcccaggttggagtgcagtagcatgatcatggctcactgtakctttgaactcttaggcttaagcaatcctcccacctcagcctcctgagtaactggaaccataggcatgtactactatacctggccatttatttttattttt

SEQ ID NO: 2387 - DNA, 201 bp, Homo sapiens
ttctccttccttgtggctgctcttcaagtaatcaggtgccactgtttttatctgtttatatttctatctatctatcatctattatgtatctatcatctatctatctatctatctatctatctatctattcggctttaaaatttttgtgaaatacagttctattatctcatattttcatattttttaaactcatgactttct

SEQ ID NO: 2388 - DNA, 201 bp, Homo sapiens
tttcaatatatctcattgtggctggaccaggtattttctagtttgccaatccataactctcctgagacattattatttgtcctttgcagttgcatttgaaraaaatttcctacctacttgatgataaagccaaatcaatcaatcagttgtcagtcaaacatttattcatgtgcattatatatgctctgcatcaaatagtta

SEQ ID NO: 2389 - DNA, 201 bp, Homo sapiens
tgcatagttcttttttttttttttgagacagggtcttgctgtgttgcccaggttggagtgcagtagcatgatcatggctcactgtagctttgaactcttargcttaagcaatcctcccacctcagcctcctgagtaactggaaccataggcatgtactactatacctggccatttatttttattttttagttttttggaaa

SEQ ID NO: 2390 - DNA, 201 bp, Homo sapiens
tctccttccttgtggctgctcttcaagtaatcaggtgccactgtttttatctgtttatatttctatctatctatcatctattatgtatctatcatctatctatctatctatctatctatctatctattcggctttaaaatttttgtgaaatacagttctattatctcatattttcatattttttaaactcatgactttcta

SEQ ID NO: 2391 - DNA, 201 bp, Homo sapiens
gtggtacaatcttggctcactgcaacctctgcctcccgggttcaagcaattctcctgtctcagcttcctgagtagctgggattacaggcatgtgccaccaygcctggctaatttttttatttttaatagagatggggtttcatcatgttggccaggctggtctcgatctcctgacttcaggtgatccacccatgtcggctt

SEQ ID NO: 2392 - DNA, 201 bp, Homo sapiens
aggattacaggcatgagccaccgtgcccagtctggatatttcatataaatgaaatcatacattatgtgactttttgtgtctggcttatttcacttagcatwgtaatttttttcgtttgtttaaatttaatttttctaaagagacagggtctcactgtgttgctgaagctggagtgcagtggcacaatcatagctccctgca

SEQ ID NO: 2393 - DNA, 201 bp, Homo sapiens
catgcctctaatcccaccactttgggaggccaaggtgggaactttgcttgagcccaggagttcaagaccagactgggcaacacagggagagcccgtctccrcagaagatacaaaaattagctgggcatggttgtgtgtgtctatagtccagttacttaggaggctgagggaggaagatggcttgagcccaggaggtcaagg

SEQ ID NO: 2394 - DNA, 201 bp, Homo sapiens
tggtccatacatcaggggtccatacaccaacaggtccatacattagccggtccatacaccagctggtccacacatcagctggtctatacatcagctggctyatatatcagggagtccatacatcatctggtccatgcatcagtgagccaatacatcaatgagtccatacatcagctggtctatacatcagctggcccatac

SEQ ID NO: 2395 - DNA, 201 bp, Homo sapiens
gcaggcagctttgaactcctaggctcaatcgatcttcctgtctcagtctcctgagtagcttggatgacaggtgcatgctgttgtacccagctaattttttktttaaattttttgtagagacagggtctcattttgttgcccaggctggtcttgaactcctggcttcaagtgatcctcctacatcagcctcccaaagtgctg

SEQ ID NO: 2396 - DNA, 201 bp, Homo sapiens
tgagcccaggaggtcaaggctgcagtgagctgtgatcacaccactgccctccagcctcaatgacagagtgagagttcatgtcaaaaaaaaaaaattatgcratatagtctgtgaattaatataaagcatagcaataactaaaaacaagttttattagcacttgttgacataaaatcctttctagatttttttcaatttggc

SEQ ID NO: 2397 - DNA, 201 bp, Homo sapiens
aagcaattatctaatgaactctagatatttttatgtatttcagaagggacttttgaaaaggtcttccaacatttccatccctgacagccattagtagcaaacacacacacacacacacacacacacacacacacacacggaagaagcatccacatttcacactctctatccctgatgttctgctgggatttgacagacgga

SEQ ID NO: 2398 - DNA, 201 bp, Homo sapiens
ttctttatacatagctttatgatttatcatgtcatgtcacatcacatttttacttatttaaatgaataaataaaatgtaacgtatctcctcctaggactaygaaagcctcatgaagacagagattctgtctactattgcatctcagtacttaggactgtgttcatcactgtgggaactcaatatgtatttgcagaataatt

SEQ ID NO: 2399 - DNA, 201 bp, Homo sapiens
atcaaatgccgggtcttatttcttctaagtgtatattgtatgtattaatcagcttctttttatccaaacccacccttcctggcctctggtacccaccaatmtactctctatcctcacaagatccttgccagtttctgtgtaaccactattgcctgactttctaaaacaagccaacaagagagacctcaaggttttatcgag

SEQ ID NO: 2400 - DNA, 201 bp, Homo sapiens
agcaattatctaatgaactctagatatttttatgtatttcagaagggacttttgaaaaggtcttccaacatttccatccctgacagccattagtagcaaacacacacacacacacacacacacacacacacacacacggaagaagcatccacatttcacactctctatccctgatgttctgctgggatttgacagacggaa

SEQ ID NO: 2401 - DNA, 201 bp, Homo sapiens
tgtaacgtatctcctcctaggactatgaaagcctcatgaagacagagattctgtctactattgcatctcagtacttaggactgtgttcatcactgtgggarctcaatatgtatttgcagaataattgaagagcaaattatggttattccccagccctgggcctaaggtctctccaatcttcagatgggtcaatggtgggac

SEQ ID NO: 2402 - DNA, 201 bp, Homo sapiens
cctgactttctaaaacaagccaacaagagagacctcaaggttttatcgagaatgtggggttttggccgggcacggtggctcacgcctgtaatcccagcacyttgggaggccaaggcgggtggatcacgaggtcaggagttcgagaccagcctgaccaacatggtgaaaccccgtctttactaaaaatacaaaaattaacca

SEQ ID NO: 2403 - DNA, 201 bp, Homo sapiens
acatgcatttcagagagtctgtgatgatgcccctggtacaggcagcctcaagaatctactgtggcttctttgtcccatcaaggccaattccgctccgccartcgtagtctccctgcttggttgagaagtggacagaatggcctcaatgcacacagacagattatcaagataaccaagcatgggggctggggaggggcagcc

SEQ ID NO: 2404 - DNA, 201 bp, Homo sapiens
cttgggaggccaaggcgggtggatcacgaggtcaggagttcgagaccagcctgaccaacatggtgaaaccccgtctttactaaaaatacaaaaattaaccrggcgtggtggcacgtgcctgtaatcccagctactcaggaggctgaggcaggagaactgcttgaacctgggaggtggaggttgcagtgagctgaaattaca

SEQ ID NO: 2405 - DNA, 201 bp, Homo sapiens
ccgttgtttcaaccagcaagttgggccaaggactccaagctccacctcctacagattcaggacagagaaaagtctactctttaaatgttcactgtgcaacrtacttacaaaaacttgccaaaagcatgtgagagctactttttccttttttttttttttaatcttgagcacgtagaaggggcccttatatttcacagggat

SEQ ID NO: 2406 - DNA, 201 bp, Homo sapiens
aaagagaaagccttggagagccaagttcactttcctgacaccatgacaaccacccctgataacgccatcactcttttttttttttttaatatggagtttcrctcttgtcacccaggttggagcataatggcatgatctcagctcactgcaacctccacctcccaggttcaagtgattctcctgcctcagcttcccaagtag

SEQ ID NO: 2407 - DNA, 201 bp, Homo sapiens
tcatgcattaatttagatacctcatcatgttacttgaaaggggtcccaatccagaccccaagagagggttcttggacctcatgcaaggaagacttcagggygagtccatagagtaaagtgaaagcaagtttattaaagaagtaaagaaacaaaagaatggctacttcataggcagagcagtggcgacggctgctcaactga

SEQ ID NO: 2408 - DNA, 201 bp, Homo sapiens
gagggaaacagaaaggtaggcatgaaggagaattgtttttccccatcagaaacaaagtgctttgggaaaaagtaaataggtgtcaatagttaacagcttawatttaaaaaaaaaaaaaaaaaagccaatactgctatggcttatgtgaattctgaatctgatgaataaatggtgctgtcagatcccagtctttggttactc

SEQ ID NO: 2409 - DNA, 201 bp, Homo sapiens
aaacagaaaggtaggcatgaaggagaattgtttttccccatcagaaacaaagtgctttgggaaaaagtaaataggtgtcaatagttaacagcttaaatttwaaaaaaaaaaaaaaaaagccaatactgctatggcttatgtgaattctgaatctgatgaataaatggtgctgtcagatcccagtctttggttactcaaaag

SEQ ID NO: 2410 - DNA, 201 bp, Homo sapiens
tgtgtgttgggtggggtggtacagacagacatggcatggcctgttccatgcctagtgttatgtaatgtgaggcttagcctggaagaaactaagcatcttartaacaggtgctcccactagccgaagtgtgacttccacacgttctcataatttcatgaccgcacaccttattctcaatggagaaaaagacacctttgctca

SEQ ID NO: 2411 - DNA, 201 bp, Homo sapiens
agagagagttaattatgaactaaaggagtttcatggcctctaatttttttctttcatttcttagcttcagatggcttctaatttacatgcctctaatttayatccctctcccctccctctctccttccctccctcctcccttcttcccttcccttccctgccctgccctgcccttccttctttccttccttccagaatagt

SEQ ID NO: 2412 - DNA, 201 bp, Homo sapiens; identical to SEQ ID NO: 328

SEQ ID NO: 2413 - DNA, 201 bp, Homo sapiens
tacaaaaatacatcctgtaacttattcctttcagaattgttataattactgtaatgctattgaagaaatgctcagagatctatttccagcagagaaatggrctcgaagctaattaaaattctacatttgctcactggaaaatttgagctcttgctggattcaccttcccacactgtctccaaatagaatacaagtcacaca

SEQ ID NO: 2414 - DNA, 201 bp, Homo sapiens
tcattaggacagatcctaagaagtgagattattccatagggtttcagatgtttaaagattttgttacatattaataattcttttcttttcttttctttttyttttttttttgagacagagtatccgctctgtcacccaggctggagtgtagtggcacaatctccgctcactgcagtttccacctcaggttcaaaggatcct

SEQ ID NO: 2415 - DNA, 201 bp, Homo sapiens
gcaattatctaatgaactctagatatttttatgtatttcagaagggacttttgaaaaggtcttccaacatttccatccctgacagccattagtagcaaacmcacacacacacacacacacacacacacacacacacggaagaagcatccacatttcacactctctatccctgatgttctgctgggatttgacagacggaaa

SEQ ID NO: 2416 - DNA, 201 bp, Homo sapiens
tcttttcttcccatggactttatccagttcctgcctttgggttattgtatttcggaatcttattatttttaaaagagaaagaaactgaaattgaatcaggkcctttatcttgctatctcccaaactacttgatttaaaacctgaacactaagctgaccgatctctctgcttgctctaagtaaacaaaagaatcaggaggcc

SEQ ID NO: 2417 - DNA, 201 bp, Homo sapiens
acgtgcctgtaatcccagctactcaggaggctgaggcaggagaactgcttgaacctgggaggtggaggttgcagtgagctgaaattacaccactgcactcyagcctgggtgatagagcgagactccatctcaaaagaaaaaaaaaaaagagagaacgtggggtttttttggtcaatgggtacaaagtttcatttaggagga

SEQ ID NO: 2418 - DNA, 201 bp, Homo sapiens; identical to SEQ ID NO: 339

SEQ ID NO: 2419 - DNA, 201 bp, Homo sapiens
caatgcaacctctgcctcctgggttcaagtgattctcctgccttggcctcccaagtagctgggactacaggtgcatgccaccacacccagctaattttttkttttttttttttttttttttttttttgagacagagtttcactcttgttgcccaggctaaagtacaatggtgtgatcttggctcaccgcaacctccacatc

SEQ ID NO: 2420 - DNA, 201 bp, Homo sapiens
aacccattaatctattaatccatgaatagattaatccattcatgagggcagaaccttcaggatccaatgatctcttaaagatcccatctcttgggctgggygcaatggttttcacctgtaatcccaccactttgggaggctaaggcaggcagatcgcaaggtcaggagttcgagaccagcctggccaacatggtgaaaacc

SEQ ID NO: 2421 - DNA, 201 bp, Homo sapiens
gtccatctgaaaaataacatctgcatcacttcaaggttcacttctacctttttgctctctgttgccagttcaccagaagcccctgtgatgattactattctttttttttttttttttttttgagatggagtcttgctctatcgcccaggctagagtgcagtggcacattctgggctcactgcaagctccgcttcccggatt

SEQ ID NO: 2422 - DNA, 201 bp, Homo sapiens
gggaggctaaggcaggcagatcgcaaggtcaggagttcgagaccagcctggccaacatggtgaaaacccaactctactaaaaatgcaaaaattttctgggygcgatggcacttgcctataatcccagctattcaggaagctgaggcaggagaattgcatgaaccctgacgcggaggttgcagtaagccgagatcacgacac

SEQ ID NO: 2423 - DNA, 201 bp, Homo sapiens
tgaggcaggagaatctcttgaacccaggaggcgaaggttgcagtgagcttagattgcaccactgcactccagcctggtcggcagagtgagactctgtctcaaaaaaaaaaaagaaattgtttaagatttctgggccctacctctagcttcctaaccaataatagccaaccactacttctttttcttttcaaatgatccata

SEQ ID NO: 2424 - DNA, 201 bp, Homo sapiens
agtttcaacatgagttttggaggaaacaaatattcaaactatagcagatggatatgctaaacaccctgatttaactattacagaatgtatacaagcatcawaacatcacactgtaccccataaatatgtacaattattatgtgtcagtgaagacaacaaattttttttttaaaagagcgttaatcttttaaaaaatgagaa

SEQ ID NO: 2425 - DNA, 201 bp, Homo sapiens
ttttaaatatatggtttttaattttaatgccaccatgccttctctcttagcttatttatgtgtatggattatttggtaaagtaggaaacttttttgatgtkaaggaagaaaatatagatgagtgaacctaaattagtagcctgaactttgaagctagacagacccagttcaaaccatggatctaacacaagctgtgtaacc

SEQ ID NO: 2426 - DNA, 201 bp, Homo sapiens
ccctacatttgagctggcagccttcttcttggcatgcccagccaggaggataataattgagaaatcaaatggggaaatgggcactttgcaaggcatttaarctcaaagaactacaacgggccaggcatggtggctcactcctgtaatcccagcactttaggaggctgaggtgggcagatcacctgaggtcaggagttcaag

SEQ ID NO: 2427 - DNA, 201 bp, Homo sapiens
gatggatatgctaaacaccctgatttaactattacagaatgtatacaagcatcaaaacatcacactgtaccccataaatatgtacaattattatgtgtcartgaagacaacaaattttttttttaaaagagcgttaatcttttaaaaaatgagaactggtagtgtctttacagactaagaaaaacaaaatcaatatctaaa

SEQ ID NO: 2428 - DNA, 201 bp, Homo sapiens
ctcttagcacattcaatcaatgctaactattattatcacaggtaacatgtgaataacagaattgagctaccatttttcagccaacccccaaccctccgctmttctctcttctctaagtttaattgtaaaacacagttcatttaaaaaacaaacaaacaaacaaacaaacaaaaacaaaaaacttttgacaagcatatgttt

SEQ ID NO: 2429 - DNA, 201 bp, Homo sapiens
ttccaccgtgattgtgatgcctccccagccatgtgcagctgtgagtccattaaacctctttccttaataaattacccagtcttgggtatgtctttattagyagcatgggaatagaataatacaccctctttcctctttgttaattctattcccagatctttagaaaagctttccacctttctgcttgcccctctccccaca

SEQ ID NO: 2430 - DNA, 201 bp, Homo sapiens
tcatgccactgcactccagcctgggcaacaagagtgaaactctatctcaaaaaaaaaaagactttcataaggaaaagagaactctgggcttgtgtagtgarttgggtgtgtatgattgatcagtgtgttgttttctcgtcatgaacccaaagagttaaaatctatttttggttgctagttaactgccccggggtggctgcc

SEQ ID NO: 2431 - DNA, 201 bp, Homo sapiens
aaaaattgactcactaactgtttattatcagtaggttattatagtagcaatagagaaagggcttatttgggatcaaaagaactggctgtgagtgtgtgtgkgtgtgtgtgtgtgtgtgtatttatacataaatatacaggcatttcctcatttactttaatatttgaacaggtattttcttatctattttaacatcaattt

SEQ ID NO: 2432 - DNA, 201 bp, Homo sapiens
cttttttgacaagaagtaatatcactgctgttaataactgtgactccccagaaaaaaaaaaaaaagtctgcatttccttttctatcttttaaattttgtcraatcctattttcccagcctttgtgtctctccctagccacaatccacttgtccttcaaagtcttccctggtggttccaagtcaaacagcagtagctgtaca

SEQ ID NO: 2433 - DNA, 201 bp, Homo sapiens
gccatgtgttaggactctgcttcttggttcccttgtaatctcttcatcttgcctcagataggagtcattttagaactttgtaaaagctatttcacaaccaygcacccattcacagtatatttggctttcttattaacacaattcaatattttgcaggttacagagagtgaaaagggctctgtattcccctccgtttgtaaa

SEQ ID NO: 2434 - DNA, 201 bp, Homo sapiens
aaattgactcactaactgtttattatcagtaggttattatagtagcaatagagaaagggcttatttgggatcaaaagaactggctgtgagtgtgtgtgggkgtgtgtgtgtgtgtgtatttatacataaatatacaggcatttcctcatttactttaatatttgaacaggtattttcttatctattttaacatcaatttta

SEQ ID NO: 2435 - DNA, 201 bp, Homo sapiens
tcctattttcccagcctttgtgtctctccctagccacaatccacttgtccttcaaagtcttccctggtggttccaagtcaaacagcagtagctgtacaagwgttaatggtagtagctactattttcttttctttcttttttttttttttcttgagacagagtctcactctattgcccaggctggagtgcagtggcatgatc

SEQ ID NO: 2436 - DNA, 201 bp, Homo sapiens
ccagtgtggcttcttgcctttacattcattagaaggcatcagtgcgtccttgccatgttaatcagtaaaaggagtgggctcatttaaatagctggcgtgaktcgggggttaggggtttatgacccagctttcttcccttagaagtgcagttgcaggaaggatgttgttcagagataccctgactcccagtgagaggttcta

SEQ ID NO: 2437 - DNA, 201 bp, Homo sapiens
tacaggcatttcctcatttactttaatatttgaacaggtattttcttatctattttaacatcaattttaacatttaacatttattttaacatttgacatamaacgtttgaagttccttccaactcttaagtgtatgaatctgaattatttgcctttatctccttacatacatctttaaatattatggcaaaagaacaacca

SEQ ID NO: 2438 - DNA, 201 bp, Homo sapiens
taggtgtctaattcttagtcaccagcttaacaagcttcctgaagtctctaagtgtcactgtgggcatgcagcatgtaagaaactgttactccgcctggagkgggcgagcaaatatttgttgaacagaggcctttaatctgctgggccttcctcctgtaaaacttcaccctttgctgcagagactggaaggtcaggcccttg

SEQ ID NO: 2439 - DNA, 201 bp, Homo sapiens
tttttttttttttaatttttccattctgagttcatctttgtggaagccagacccaagcgcaggagttcaaagcccatgctgtggaggaactgcgacttcargggcttccatccaggtcgatatcagtgggtgcctttccaacatgcctcctacttaatttcctctgtgcacgttgataactcaagtgcctttgaattgctt

SEQ ID NO: 2440 - DNA, 201 bp, Homo sapiens
gaagttccttccaactcttaagtgtatgaatctgaattatttgcctttatctccttacatacatctttaaatattatggcaaaagaacaaccaggattgcyggatcatatgataattctacttttaatttttgaggaacaaccgtactgttttttggtagtcctatttttgggtatatatctcaaagaattgaagtcaaga

SEQ ID NO: 2441 - DNA, 201 bp, Homo sapiens
atgaaagaatttagatactattaggaagaagcaccaagatacattccaaagaaggaaagaaaaaaaaaaaagcaagcaacttgtctgtgtaggaagaatarttagagaaacagaaaccagattgttgctactggttatctcttggcacagtggggttactaggaacttttcctttttacttaagcactgagttttgcagtg

SEQ ID NO: 2442 - DNA, 201 bp, Homo sapiens
cctttatctccttacatacatctttaaatattatggcaaaagaacaaccaggattgccggatcatatgataattctacttttaatttttgaggaacaaccrtactgttttttggtagtcctatttttgggtatatatctcaaagaattgaagtcaagatcttgaagtgatagctttactcccatgttcactgaagcactat

SEQ ID NO: 2443 - DNA, 201 bp, Homo sapiens; identical to SEQ ID NO: 305

SEQ ID NO: 2444 - DNA, 201 bp, Homo sapiens
agactgggtgcagtggctcacgcctgtaatcccagcactttgggaggctgaggcagatgaatcatctgaggtcaggagtttgagaccaggccggccagcakggtgaaccctctctctactaaaaatacaaaaattagccggacatggtggtaagcacccactgtgatcccagctaattgggaggctgaggcaggagaattg

SEQ ID NO: 2445 - DNA, 201 bp, Homo sapiens
atgacactggttttgtttttgcacaaaagatttgacttggtcagtcacactcctttgttattttgtacttttaaccccctttctctgtggagaaaggctascacgagaaaggtaactttctcttgtccaaagcccaggaccacataggctcggtaccaagcttcttttgggacagtatttgacagggcataccaacacgtc

SEQ ID NO: 2446 - DNA, 201 bp, Homo sapiens
actgtaccaatcagggtccaaccaggaaaatgggatctgctctaaacattaaaatagaggaaatttggctgggtttggtggctcacacctgtaatcccagmactttaggaggctgaggagggtggatcacctgaggtcaggagtttgagaccagcctggccaacatggtgaaaccccgtctctactaaaaatacaaaacat

SEQ ID NO: 2447 - DNA, 201 bp, Homo sapiens; identical to SEQ ID NO: 309

SEQ ID NO: 2448 - DNA, 201 bp, Homo sapiens
aggcagaggctgtacatgagggtcctaacatctttagaagaaaaccatcagggcagctggggcaggggcagctggtgggtgagactggggtcggggaagargaagggttaggactagatgacacagagagggatggaaccacacagacccctgcatcctactaggaagtccccaggaagggcctttgtcactgccttcctg

SEQ ID NO: 2449 - DNA, 201 bp, Homo sapiens
ggtgatgaaacaatattgttatattaaattatataataagaatgtggatattatatatgttgttatatatacttaagttaatattaagtatataaagttaygtatagtaagtatatgaaattgccaatatttgactatttttgacctgcaaaatgacaatttcatatgattggacctaatacatttcatgacagaatatca

SEQ ID NO: 2450 - DNA, 201 bp, Homo sapiens
taaacagcagctctttgctacggtgagtgtaacagagttgttttccattaatatgtggctttacgtgagaacaagctgacacgaggagagcaaacaattaraaatgatttttctcatgcagtaactatgcagattcaatctcctcacagtggaggtataggattgaaaaactgtttgtcactctcttcttggtccccagca

SEQ ID NO: 2451 - DNA, 201 bp, Homo sapiens
gcaagcaacttgtctgtgtaggaagaatagttagagaaacagaaaccagattgttgctactggttatctcttggcacagtggggttactaggaacttttcytttttacttaagcactgagttttgcagtgtttacttttgaaatcactttacatgacttttgtacttaggaaataaatagaaatgtaaagatcatatgaaa

SEQ ID NO: 2452 - DNA, 201 bp, Homo sapiens
ttgccagtttctgtgtaaccactattgcctgactttctaaaacaagccaacaagagagacctcaaggttttatcgagaatgtggggttttggccgggcacrgtggctcacgcctgtaatcccagcaccttgggaggccaaggcgggtggatcacgaggtcaggagttcgagaccagcctgaccaacatggtgaaaccccgt

SEQ ID NO: 2453 - DNA, 201 bp, Homo sapiens
aacctccagaaatagtccgccaggtactttatgttttaactgaatctgcactgcctgtcatctagagtcattcattgtgacatcataaaaagcaggcctgwcaatgcattagcagtctgactgggcatttgtggattttctagttaccattctgccagcgcaacctacaattcttgttcaaattgaactttgctgaagagt

SEQ ID NO: 2454 - DNA, 201 bp, Homo sapiens
acagctatttttgcaaatagccaaaaattccaaaagatttaaaaatcttatccagtttgagtcctttcttaatgacttctaatctttcagaaatgttaatkaggtacttaaggtctcataaaaatattgctagccaaagcaataattgtgtgacacagaatttagaggtgaaagagaagacaggagaaagagtgtgtgtaa

SEQ ID NO: 2455 - DNA, 201 bp, Homo sapiens
gcaagtgtaacttctgtttcatctccgtcccgttcacccgggaattctgtgtaaagaccctgcttgtcccattgaactcatggacacaatttgtctgggcratcacattccactttgctttccttatctttttcccaccctgtgttaatgtgttcagcatgttttcctagaagtgccattgttaatgtcttttaaaatgta

SEQ ID NO: 2456 - DNA, 201 bp, Homo sapiens
ggctcacgcctgtaatcccagcactttgggaggccgaggcgggcggatcacgaggtcaggagatcgagaccatcctggctaacacggtgaaaccctgtctstactaaaaatacaaaaaattagccgggcgaggtggcgggcgcctgtagtcccagctactccggaggctgaggcaggagaatggcgtgaaccccagggggc

SEQ ID NO: 2457 - DNA, 201 bp, Homo sapiens
aatatcaattgagaaaaacgcgtcaaagccacacggtacggtttcctccctaaagtcatgcaatccaggaaagcgttcacaggactgtcaggaatgagaayggtgcttcataaaagcctactcaccatcagcctaagagcagaggtaagagggtagattgtttctgatgcaaagcaccaaccgcatacttcctaatgattt

SEQ ID NO: 2458 - DNA, 201 bp, Homo sapiens
atatgtatataaacaaatttggtatgacattgaatctagggttctgtatcctgtctttattatttagcgtggtatcacgagcatttccctgtgctgttgtrtacctgaaaacataattttatgtatgtgtatacatattatagtccactatatggatgcaccagaatttttttttgagatggagcctcattgtcgctcagg

SEQ ID NO: 2459 - DNA, 201 bp, Homo sapiens
ttcaggatccaatgatctcttaaagatcccatctcttgggctgggcgcaatggttttcacctgtaatcccaccactttgggaggctaaggcaggcagatcrcaaggtcaggagttcgagaccagcctggccaacatggtgaaaacccaactctactaaaaatgcaaaaattttctgggtgcgatggcacttgcctataatc

SEQ ID NO: 2460 - DNA, 201 bp, Homo sapiens
acccaaatgctcaaaacataatttcaatgacaacaaaagcaacacagaaattgtgacctcctaccgtgcccggtgttaagacagtacaggtcttataccaygtacaggtcgttaacacagaagcattgaggctgctcagtggcaaatgtcttacctcagattgattttggatattttctggttttccagcccataactaag

SEQ ID NO: 2461 - DNA, 201 bp, Homo sapiens
tttcttttcttttttttttttttttgagacagagtatccgctctgtcacccaggctggagtgtagtggcacaatctccgctcactgcagtttccacctcargttcaaaggatcctcccacctcagcctactaggtagctaggactacaggtgagcgccaccacgcctggctaatttttgtatttttagtaaaggtggggtt

SEQ ID NO: 2462 - DNA, 201 bp, Homo sapiens
ttcaaaggatcctcccacctcagcctactaggtagctaggactacaggtgagcgccaccacgcctggctaatttttgtatttttagtaaaggtggggtttmaccatattggccaggctggtctctaactcctgacctcaagtgatatgcctgcctcagcctcccaaaatgctgggatcaaaggtgtgagccagtgaacctg

SEQ ID NO: 2463 - DNA, 201 bp, Homo sapiens
tcagaaatgttaatgaggtacttaaggtctcataaaaatattgctagccaaagcaataattgtgtgacacagaatttagaggtgaaagagaagacaggagaaagagtgtgtgtaagtgcatgtgtgtgtgttcacattagttgtggaaagaaaaaaaagaggagtcagaagggataatacttaggaaaaaaattcagtgca

SEQ ID NO: 2464 - DNA, 201 bp, Homo sapiens
ttttaaaagctttaatcatctcataagtgaataatggcattttggtttaatttgcatttctttgattacaggtgagggtgaccatgcttttcatctttttwatagtatatttgtctctctttttaaagttaatttttagtttgtgttctaggccaattttaaaaaggaaaaaagttctggttgatttaatgagttccttaa

SEQ ID NO: 2465 - DNA, 201 bp, Homo sapiens
cagaaatgttaatgaggtacttaaggtctcataaaaatattgctagccaaagcaataattgtgtgacacagaatttagaggtgaaagagaagacaggagaaagagtgtgtgtaagtgcatgtgtgtgtgttcacattagttgtggaaagaaaaaaaagaggagtcagaagggataatacttaggaaaaaaattcagtgcat

SEQ ID NO: 2466 - DNA, 201 bp, Homo sapiens
gtcttcagatgacctatttagccctgttctgtgtcgtggccacaagctgtactctttttcctggggcagctgacttcgatgcctgctgctcatcacaggcragaataggctagagaaaggggcctgcttcctagagctagaaggactctaaagaacctctagttcagccttctcattttactccttcaggagaagactgag

SEQ ID NO: 2467 - DNA, 201 bp, Homo sapiens
ttgggaggccgaggcgggcggatcacgaggtcaggagatcgagaccatcctggctaacacggtgaaaccctgtctctactaaaaatacaaaaaattagccrggcgaggtggcgggcgcctgtagtcccagctactccggaggctgaggcaggagaatggcgtgaaccccagggggcggagcctgcagtgagccgagattgc

SEQ ID NO: 2468 - DNA, 201 bp, Homo sapiens
accctgtgtgtgatgttgaaccagtgagcctggggactttgttctagtctgccaggattctgttactaagccattaatttcttttctttctttcttttttytttttttttttttttttttttgagacagggtcttgctgtgtcactcaggctggagtgcagtggcatgatttcggctcatggccacctccgcctccagggt

SEQ ID NO: 2469 - DNA, 201 bp, Homo sapiens
tggccaggctggtctcatacttctgacctcaggtgatccacccacctcagcctccaaagcgctaggataacaggcatgagccactgcgcccggccttggayacagagtttgaggggctatccttaccttttaaggcaaagaggtaattccaaaataagaatagtagcaataaaaatagaagtttttaccagggctcctgcc

SEQ ID NO: 2470 - DNA, 201 bp, Homo sapiens
gttgattcaggtactatagcaggatttgggtgtggacatccttggctgagagatgcaaaaacttttccccaagatctactgggaagaaatttgattcataraagtttcataaggaggccgggtgtggtggctcatggctgtaatcccagcactttggaaggcagaggcgggtggattacctgagtttaggagttcgagacc

SEQ ID NO: 2471 - DNA, 201 bp, Homo sapiens
aacattagagcagggctagggatacatcagtactgaggaaagacggaagccaaacattttgaaatgaggatgttaggataaagagccagggtcaagaaacyacaagcatcttgaaattgtgaagtcatcttctctagaatctccagtatttcagtcccattacattcccctaattgaatctgcctttgccagcctttctgc

SEQ ID NO: 2472 - DNA, 201 bp, Homo sapiens; identical to SEQ ID NO: 325

SEQ ID NO: 2473 - DNA, 201 bp, Homo sapiens
aagcacatggggaaaaagaaatcgacctcactagtaatcaaagaaatgcaaattaaagtagtgagaagttatggggaaaaatagttgtaataactagggawgaaaaggttcagcaagaccggctctcctctgcacgacaggagggactataaattggatagtttatctaaggtcagtttgacaacatgcatcacacaacac

SEQ ID NO: 2474 - DNA, 201 bp, Homo sapiens
attaatttcttttctttctttcttttttttttttttttttttttttttttgagacagggtcttgctgtgtcactcaggctggagtgcagtggcatgatttyggctcatggccacctccgcctccagggttcaagcgattgtcctccttcaggctcttgagtaactgggattaccggtgtttgccatcatgcctggctaatt

SEQ ID NO: 2475 - DNA, 201 bp, Homo sapiens
cacagagccaggctgggagaggagccctgaaaccctctcccaggcggtttccacctggaggaaacctttgtcatcccttcctaacactgtgtttgcctttrgtgctgcactgggaccaggcacagattggggaggaagagctctgagtctacagagcgtgttatgtaactgcatgtcagcagttagatatggacaaaggac

SEQ ID NO: 2476 - DNA, 201 bp, Homo sapiens
gataggagtcattttagaactttgtaaaagctatttcacaaccatgcacccattcacagtatatttggctttcttattaacacaattcaatattttgcagsttacagagagtgaaaagggctctgtattcccctccgtttgtaaaacaaaacgtttcttctggtatattcatatcattccattggcttctgacctatcttt

SEQ ID NO: 2477 - DNA, 201 bp, Homo sapiens
ttgccaagtcagatgcttctccagcgaggagcaagaggagttagcactgatggagccaggctcaggggggaaaatcacaatgaagaaggggctggaagctrtttctctttcaccttgtgcttcagaactcacacttctgtcgactactgtcaaggccttcactttcttggctgccattttccagcatggagctggaaaagg

SEQ ID NO: 2478 - DNA, 201 bp, Homo sapiens
agggtagaaatagcaaatgcatacatgtttgcagacatccctgccagtgccccaagcttcagagactggctgcaaggttccctgggttgaaatgaaagacttttttttttttttaggtgcccaatagagaactgaaaattggagggaaacagaaaggtaggcatgaaggagaattgtttttccccatcagaaacaaagtgc

SEQ ID NO: 2479 - DNA, 201 bp, Homo sapiens
cactgggtgatgcttaccatcagagagatgaggggactctgctagagacatctttctcaatcttggctgcacactgggaatctccggggacacttggagartctcggatgcctgattgcctcgccctccatttaccacccacacgtcttaagattgtaatgtaatgtgtctaggatactgcctggcatctggatttttgaa

SEQ ID NO: 2480 - DNA, 201 bp, Homo sapiens
gggaaacagaaaggtaggcatgaaggagaattgtttttccccatcagaaacaaagtgctttgggaaaaagtaaataggtgtcaatagttaacagcttaaatttaaaaaaaaaaaaaaaaaagccaatactgctatggcttatgtgaattctgaatctgatgaataaatggtgctgtcagatcccagtctttggttactcaa

SEQ ID NO: 2481 - DNA, 201 bp, Homo sapiens; identical to SEQ ID NO: 299

SEQ ID NO: 2482 - DNA, 201 bp, Homo sapiens
ggaatgtgagacgggggtccaaaagagacccgagtgggtcttccggtccagccgctttgcctcaaagatggctgtgcctctgcgttctcgacaaaggacasgttgtggactgggggtgtcactggtgggccgctgtgcagctatggggcctggggcctttaggcggcctccctagggtgtcatcaccagagacccagctgc

SEQ ID NO: 2483 - DNA, 201 bp, Homo sapiens
aacagaaaggtaggcatgaaggagaattgtttttccccatcagaaacaaagtgctttgggaaaaagtaaataggtgtcaatagttaacagcttaaatttaaaaaaaaaaaaaaaaaagccaatactgctatggcttatgtgaattctgaatctgatgaataaatggtgctgtcagatcccagtctttggttactcaaaagc

SEQ ID NO: 2484 - DNA, 201 bp, Homo sapiens; identical to SEQ ID NO: 300

SEQ ID NO: 2485 - DNA, 201 bp, Homo sapiens
aatgtgagacgggggtccaaaagagacccgagtgggtcttccggtccagccgctttgcctcaaagatggctgtgcctctgcgttctcgacaaaggacaggktgtggactgggggtgtcactggtgggccgctgtgcagctatggggcctggggcctttaggcggcctccctagggtgtcatcaccagagacccagctgcag

SEQ ID NO: 2486 - DNA, 201 bp, Homo sapiens
aaagatggctgtgcctctgcgttctcgacaaaggacaggttgtggactgggggtgtcactggtgggccgctgtgcagctatggggcctggggcctttaggmggcctccctagggtgtcatcaccagagacccagctgcagggtccttcaggctctcagaaacccatgactagtgaccaccttttctgctcctcacagccct

SEQ ID NO: 2487 - DNA, 201 bp, Homo sapiens
cgccatattggccaagctggtcttgaactcctgacctcaggtgatccacccaccttggcctcccaaagtgccaggattacaggcgtgaaccactgagcccrgcccagtccaagccttttacagtaaggggaaaagaaaaacttggtccttacgagttgagttagaggaatgccctctcctgagctgggcccttccctcttc

SEQ ID NO: 2488 - DNA, 201 bp, Homo sapiens
ctatggggcctggggcctttaggcggcctccctagggtgtcatcaccagagacccagctgcagggtccttcaggctctcagaaacccatgactagtgaccrccttttctgctcctcacagccctcatcttggcttctgaagaaccgtgggtcggaggcaccgcgaatactccataaatatttgttgaataaatgaataagt

SEQ ID NO: 2489 - DNA, 201 bp, Homo sapiens
aggagtttgaggctgcagtgagctgtgattgtgccactgcactctagcttgggtgacagagtgagaccctgtctctaaaaaataatgttttgtggcccacrttataattttactggacctggatagtccatgagctgaagaaagagccaggggactgtgggcagcaggtgtgtcctgtggaggtgtctctagtgtgcctgg

SEQ ID NO: 2490 - DNA, 201 bp, Homo sapiens
aaacccatgactagtgaccaccttttctgctcctcacagccctcatcttggcttctgaagaaccgtgggtcggaggcaccgcgaatactccataaatattygttgaataaatgaataagtaaatgaaagcaagagtggtgctagaaaaaggcaaatgagaacgaggctggtctttctccatgtctatcatggcactctgtg

SEQ ID NO: 2491 - DNA, 201 bp, Homo sapiens
tggacctatacccttcttccttcatttgtatccctttgctccatcctgcttctctcttctctcttctctctttctctttctcttttcttttctttctttcttttttttttttttttttattttgagacagggtctctctctgtcacccaggcgagtgcagtggcaccatctcagctcactgcagccttgacctcccaggct

SEQ ID NO: 2492 - DNA, 201 bp, Homo sapiens
tgttttgtaggttttgtaatcaacccccctcagcatggtcctctcatcccccgactggtaacgaccaagcctaccggagaagaggacggcaagaagccagragccagaagccgagggagcacgaaaacctggaggccagaggaatggcccaagcccacagcctgcctgtccacgtgagggagggtccatgggaagttggag

SEQ ID NO: 2493 - DNA, 201 bp, Homo sapiens
gagagagaatggattagagcttctcttcctgccttgttttaataaatgaaatactggtttgttctgcatccgtattgtggaaatgggtgtagcttcttcakcagagaccagccatccccaggaggagcagcgtcttgtgatgacagtcagctacgtcactctttcctggcattgtgaaggcctgttgattacagcttagac

SEQ ID NO: 2494 - DNA, 201 bp, Homo sapiens
aattgctttcctgtgccccttcttcaaatgtccaaatttagcatcacttctgagtcctcaaatttattatgcttcctcttccagacccattatttgtgtatttttttttaataacaaaactgtaacctccagaaatagtccgccaggtactttatgttttaactgaatctgcactgcctgtcatctagagtcattcattgt

SEQ ID NO: 2495 - DNA, 201 bp, Homo sapiens; identical to SEQ ID NO: 306

SEQ ID NO: 2496 - DNA, 201 bp, Homo sapiens
atccccaggaggagcagcgtcttgtgatgacagtcagctacgtcactctttcctggcattgtgaaggcctgttgattacagcttagacaaagacaatgccratctgaaataatcatcaccttcagacagacactcggttcttcaccctttcctgtgtgccacccgcacccccttccccaggcgatcaagcaaacagagctt

SEQ ID NO: 2497 - DNA, 201 bp, Homo sapiens; identical to SEQ ID NO: 307

SEQ ID NO: 2498 - DNA, 201 bp, Homo sapiens
cttccagaggatccctagtgtcgtagaaaatctactctttgtttttagacctaaagtagataaactttaaagaacttcttgcaaagagttaaaatgttttwtatatatatatatatatatatatatatatatatatatttaaagtaactttatatatatatatatatatatatatattttttttttttttttttttttttt

SEQ ID NO: 2499 - DNA, 201 bp, Homo sapiens
ttactgagcatttaaacattaacaccagcgttgccatcaagacattatagccaagtgaggcatcaactcttgtgtgtgtgtgtgtgtgtgtgtgtgtgtgygtgcgtgtgtgcgtgcgtgtgtgcgtgtggtgtgtgagaagagtcatctagaagagccattctgctcctagagaataaaggagaatttttttccttttaa

SEQ ID NO: 2500 - DNA, 201 bp, Homo sapiens
gagcccagctgtgtccctttcctgtctgggagaggcctataaagactgcatcctgacctgtctacacgagataatgcacataacactgctcttctgtggaygttgtaaagggagcatacatggaaggcaggattatccatcatctggggcttagctggaatatcagcattgtctggtgagaatggtcaggactgttcctta

SEQ ID NO: 2501 - DNA, 201 bp, Homo sapiens
tgatgagatttttgagcatacaggacacttgtttcctaatgtgctgagggggctgttgctttgagctttcactattagcagatcaagtagtactgagcatytaggacaggagaagaatgacaattctgttggggagaaagacaaaggagcatgtgaacttgctaaaaatctcttaggtgcaagtagtggagaaggaccaag

SEQ ID NO: 2502 - DNA, 201 bp, Homo sapiens
ccattagggacgatatcttacatttgttttgctcaggtggccccctgtgggcctttcatgtgatggtcaccaggcctcaatattcaaaaccactcgtcttkagagcaactgaggtcatatgatggaggtagtaatacttttgacgtatgtccacttttccgctcactgttgcttcacaagttagagtaaagccttgttgtt

SEQ ID NO: 2503 - DNA, 201 bp, Homo sapiens
aacaaaaaccctcaaacaaaacaagaacaacaaaaagaataattcagaataaataaatctcttcaaatattttagagttcgactctttgttaacaaaacaragtcataatttccaccaagaatatcaacccttctctatgttataaataaagtttcagtgccgtaaaagaaatagcacttgaatgtaaaattttattttta

SEQ ID NO: 2504 - DNA, 201 bp, Homo sapiens
gttgttttgtttttgttgtggtttttgtttttgttttgagatggagtctgtctctgtcacccaggctggagtgcaatggcatgatcttggctcaccacaamctcccgcctcccgggatcgtgggattttcctgcctcagcctccgagtagctggaactacaggcacccaccactatgcctggctaatttttgtattttttt

SEQ ID NO: 2505 - DNA, 201 bp, Homo sapiens
  misc_feature (1)...(201): n = A,T,C or G, or insertion/deletion polymorphism (see Tables 1-2)
ttttctttctctttctccctttctttctctcactctttctttctttctttctttttctttctatttctccctttctctctctctctctttctttctttttntcattcactctgtcacccaggctggagtgcagcaccaagatcatacttcactgcagcctcgaattcctgggctcaagctatcctcccacctcaacctcct

SEQ ID NO: 2506 - DNA, 201 bp, Homo sapiens
cccgcctcagcctcccaaagtgttgggattacaggcgtgagcctccgcaactggcctgtgcaaatattttcttctcaaaaattctggaagcaatctgcaastaaccaaatagtgctcatgatcgtttgggagcttgatgtcctcttagggtattttttgtgtcattagcttcagaaacacaggaatataaagaacaccatt

SEQ ID NO: 2507 - DNA, 201 bp, Homo sapiens
agatgtttcccaagcagttgctagtagttgtttcgctggcctcatctctcctgagatgagagatggggctgttggcaagtgtaacttctgtttcatctccrtcccgttcacccgggaattctgtgtaaagaccctgcttgtcccattgaactcatggacacaatttgtctgggcgatcacattccactttgctttccttat

SEQ ID NO: 2508 - DNA, 201 bp, Homo sapiens
atcaggttgagaaggaaaatgaccacatattctctagctgttggtgaagttaaccagggaatgtatggacacacacattctttttgaccattttcaccaaygtaattgggaacaaaacaaatcagtcattttgaatttattttgaaacaatcatgatttcatgtattgtgaatcacttttgtacagcagagctgatgtgta

SEQ ID NO: 2509 - DNA, 201 bp, Homo sapiens
gctgtactccttccagattgcttagacattttctctttaaaaaataagaagcctttgagctgctatggcaggaaaatcttaccacaggaggcgcacgtgtragccttaggtttgtctggattccagacagacatctgtgaattggaggttgtgggacttggcagcacccagcagcagcagtagtggcagtttaggatgatt

SEQ ID NO: 2510 - DNA, 201 bp, Homo sapiens
ggctttcaaaatgactaatctgtgtcgaacctgaccaggaagcagtcttctcagcattcaaaacccaaatgctcaaaacataatttcaatgacaacaaaarcaacacagaaattgtgacctcctaccgtgcccggtgttaagacagtacaggtcttataccatgtacaggtcgttaacacagaagcattgaggctgctcag

SEQ ID NO: 2511 - DNA, 201 bp, Homo sapiens
ggaactggagccagaagcccaccctcaccacctagggaagaaagctctcagcttcttcattttgcagaggacgaaatcttgatgcatagtgggaaattgamtttaccaaggacatggtacagcctccacccccagcacagtgctcaatccatcatacttacaatgatttattgccaccatagaacctaagagggatttagg

SEQ ID NO: 2512 - DNA, 201 bp, Homo sapiens
aatggatcagtgcgtgaggggccagactcgtacatacctgtgttagaaggctctagaagccttgcgctgacaggtgagcatccagccctggggctgcctaktggtcagtggtgatgagagacagaaagcctctctctgccagccaagcagtcaggatttgaggatcctcacgccttcaagggacagcgtttgatcacaaag

SEQ ID NO: 2513 - DNA, 201 bp, Homo sapiens
gatattttctggttttccagcccataactaagctttgctgtaaatgactgcctaacaagttaacagggggtagaagtagatacagaattattgttattatyattattattattattattattattattgagatggagtcttgctctgtcgcccaggctggagtgcagtggcatggtctcagctcactgcaacctcctcctc

SEQ ID NO: 2514 - DNA, 201 bp, Homo sapiens
gtgtcgaacctgaccaggaagcagtcttctcagcattcaaaacccaaatgctcaaaacataatttcaatgacaacaaaagcaacacagaaattgtgacctyctaccgtgcccggtgttaagacagtacaggtcttataccatgtacaggtcgttaacacagaagcattgaggctgctcagtggcaaatgtcttacctcaga

SEQ ID NO: 2515 - DNA, 201 bp, Homo sapiens
aagcccaccctcaccacctagggaagaaagctctcagcttcttcattttgcagaggacgaaatcttgatgcatagtgggaaattgaatttaccaaggacayggtacagcctccacccccagcacagtgctcaatccatcatacttacaatgatttattgccaccatagaacctaagagggatttaggatctgtaagccctt

SEQ ID NO: 2516 - DNA, 201 bp, Homo sapiens
ttaaaatgtctaaaaattaacctttatacacttgtagattttgttccctagacaaattcgtggtctaaggattaaacagaaaatagagcagttgaatatamcactaattttcttttcttttcttattttacagattcctatgaccctagcagagtggagagggtgtgatgaaatgccggtggagcttgcattccgttgcga

SEQ ID NO: 2517 - DNA, 201 bp, Homo sapiens
cataaaatgagaaatattatatgataccacttgtctgaggtatccagaagaggtatatttgtaaatggaagacagagtagaggttatcaggggctgaaggkaatggggagttattgcttaatgaatacagtttctgtttgggatgatacaaagtttctggaaatgaatagtcatgatggttgtaaaacaccatcaatgtac

SEQ ID NO: 2518 - DNA, 201 bp, Homo sapiens
ggtttcactgtgttggccaggctggtctcatacttctgacctcaggtgatccacccacctcagcctccaaagcgctaggataacaggcatgagccactgcrcccggccttggatacagagtttgaggggctatccttaccttttaaggcaaagaggtaattccaaaataagaatagtagcaataaaaatagaagtttttac

SEQ ID NO: 2519 - DNA, 201 bp, Homo sapiens
tgaggataagaatcctctgaaatgcttgttaaaaatacagatggagccgggcgcggtggctcacgcctgtaatcccagcactttgggaggccgaggcgggyggatcacgaggtcaggagatcgagaccatcccggctaaaacagtgaaaccccgtctctactaaaaatacaaaaaattagccgggcgtagtggcgggcgcc

SEQ ID NO: 2520 - DNA, 201 bp, Homo sapiens; identical to SEQ ID NO: 318

SEQ ID NO: 2521 - DNA, 201 bp, Homo sapiens
acaggcatgagccactgcgcccggccttggatacagagtttgaggggctatccttaccttttaaggcaaagaggtaattccaaaataagaatagtagcaayaaaaatagaagtttttaccagggctcctgcccacagccttctgcctctgtgattggaagggctctcctgcagcccaggccccagcagggactcttccagg

SEQ ID NO: 2522 - DNA, 201 bp, Homo sapiens
cctgtagtcagtcccagctacttgggaggctgaagtggaaggattgcttgagcccaggagtttgaggctgcagtgagccatgattacaccactgcacctarcctgggtgatagagtgagaccctgtctcaaaaataaatatataaataaaaatataaatacaaatgcctgggccctaacccagacctaccaagtctgaact

SEQ ID NO: 2523 - DNA, 201 bp, Homo sapiens; identical to SEQ ID NO: 319

SEQ ID NO: 2524 - DNA, 201 bp, Homo sapiens; identical to SEQ ID NO: 320

SEQ ID NO: 2525 - DNA, 201 bp, Homo sapiens; identical to SEQ ID NO: 321

SEQ ID NO: 2526 - DNA, 201 bp, Homo sapiens
gctgaggcacaagaattgcttgcacccaggaggcggaggtggcaatgagccgagattgtgccactgcactccagcctgggcgaaagcgagactcagtctcaaaaaaaaaaaaaaaaaaaaaatacagatgggccaggcatggtgcttcatgtctgtaatcccaacacatgaggaggcggaggtgggaggatttcttgaggc

SEQ ID NO: 2527 - DNA, 201 bp, Homo sapiens; identical to SEQ ID NO: 322

SEQ ID NO: 2528 - DNA, 201 bp, Homo sapiens
aaagtagcagataaaatgccggcaaagcacagatgaatgtcttcaagaagctcttgtatttctctgcacagtgtaaatatccttgctatttcaggatggcrgctggcctgctcagtaacatacatgttccaaataaagattttgcatgaaagtacctatgtccgttgtcttttactgtgggtgcaagagctgccctagagg

SEQ ID NO: 2529 - DNA, 201 bp, Homo sapiens
gccagaagggttcaagagtaaaacaattggaaaactacgtctgtacgtgactgcggactgggtcatggccagggtgggagtcctgccattatttctctcascagggtggtccacttcccccattccagtaacttatcgtgcatctccccatcaccgtcgctatggcccagccaagggactgacaatattgaattctcctga

SEQ ID NO: 2530 - DNA, 201 bp, Homo sapiens; identical to SEQ ID NO: 324

SEQ ID NO: 2531 - DNA, 201 bp, Homo sapiens
ctggtttggtttctgctggaaagcccagcttttcttggagttagatgagatttattctggagaccctggtcaatgtttcttcccttgacttccccactctstcctgtacattaaccgtgattgtttgttgtaattttttttaattttagagatggggtttcgccatgtttcccaggctggtctcaaactcctgggctcagg

SEQ ID NO: 2532 - DNA, 201 bp, Homo sapiens
tggtctcgaactcctgagctcaggtgatcagtagaagagttgagataaatgtcaaaagatccacatcataagccatggactggaagggaccttctgtcatytagtctaagccttttctccctcccctcccctcccctcccctcccctcccctccccttcccatttttttctttttgagacagagtctcactctgttcccca

SEQ ID NO: 2533 - DNA, 201 bp, Homo sapiens
tttgggaggccgaggcgggtggatcacgaggtcaggagatcgagaccatcctggctaacccggtgaaactccgtctctactgaaaatacaaaaaattagcygggcgtggcggcgggcgcctgtagtctcagctactcaagaggctgaggcaggagaatggcgtgaacctgggaggcggagcttgtggtgagccgagattgt

SEQ ID NO: 2534 - DNA, 201 bp, Homo sapiens
gagtgagaccctgtctctaaaaaataatgttttgtggcccacattataattttactggacctggatagtccatgagctgaagaaagagccaggggactgtrggcagcaggtgtgtcctgtggaggtgtctctagtgtgcctggcacaaaagaccactaaaaaggtgtgagctgaaatgaccatctgtaatctaaagacact

SEQ ID NO: 2535 - DNA, 201 bp, Homo sapiens
tgaaacacacaacccaggaattgggggactcatcctgggcctggctctgccattaactagctgtgacattgaccccctttccctggaacacttcatcctgyaagtggagagggagattgagctcagttagctggtttcttccaactctaagcttatataactattttctggcaaacctgaacgtccatagggtcttttgtc

SEQ ID NO: 2536 - DNA, 201 bp, Homo sapiens
gacgtatgtccacttttccgctcactgttgcttcacaagttagagtaaagccttgttgttaagtcactgagaagcgcttggactttgctttccttttgatrtatttaatcattttaaacataagaatcctcatctcttccccactgcactgctgcccccatgaccccagcatgctagaactgcttcattgctcctaaattt

SEQ ID NO: 2537 - DNA, 201 bp, Homo sapiens
gtgaaaagggctctgtattcccctccgtttgtaaaacaaaacgtttcttctggtatattcatatcattccattggcttctgacctatcttttccttgcacrcacactggccctaatgtgggcatcccatctgaatacagctgcatctgtgggtgtttccttacaacaaaaagagagggcggtttagctaggggaacaggat

SEQ ID NO: 2538 - DNA, 201 bp, Homo sapiens
tggacaggaagatgctgtttgaccataagagggcagttcttggaaagcatgcaggatgtgcaggcccgtggtttaatgctgggggatagctcccggacttsagttgaacaggggcacaggagtgggtaataaggggatcattccagagggggaaatggccagtagaaaggctgatgggccagggggcctgactcagtggcc

SEQ ID NO: 2539 - DNA, 201 bp, Homo sapiens
atgctggtctcgtgatagtgagtgagttctcgcgagatctgatggttttataaggggctcttcctcgctttgcttgacatttcttcctgccttgtgctgcrttgtgtggaaggtgtcttgctttccctttgccttccgccataattgtaagtttcctgagacctctccagccatgaactgtgagtcagttaaacctctttc

SEQ ID NO: 2540 - DNA, 201 bp, Homo sapiens
gtttcaaagttaatgcttacagagagaaatagaagaaatagtacaatagggatccgttgcttggaaatggtctaagatttgttggaatattctcagatgcrtggaactctatagggcaaacgtatattgaacgaacaagtggaggccgggagtggtggctcacgcctgtaatcccagcactttgggaggctgagatgggca

SEQ ID NO: 2541 - DNA, 201 bp, Homo sapiens
cactgtatcagtctgttctcatgctgctaataaagacatacccaagactgagtaatttataaaggaaagaggtttagttgactcacattcagcacagctgrggaagcctcaggaaacttacaattatggcagaaggggaagcaaacatgtccttcttcacatggcagcagcaaggagcagtaccgcgcaaaaggggggaaa

SEQ ID NO: 2542 - DNA, 201 bp, Homo sapiens
taattatgggtcatcatcattttaggtttgggcaatcaggaggaggatgtagcagttgtggtcctagctagaaagagagggcacactaaaactcaaacaaygcaaggagggtttcatgaaaagattatatctgaaggtatcgtcagagtatgaggaaacccagggataagggatcacctggggactacaaagcagaattgc

SEQ ID NO: 2543 - DNA, 201 bp, Homo sapiens
ataggtgcatgaaactgagagaagcattgtagaccaggagttctgaaagttgtggtttcaagaccagcaacggcagctccgagagacttgttagaaatgcsaattcttcatccccaagtcagacctcaccaataaaaaatctggggttagagtggtgatatggtttggctctgtgtccccacccaaatctcatctcaaatt

SEQ ID NO: 2544 - DNA, 201 bp, Homo sapiens
ggtttcaagaccagcaacggcagctccgagagacttgttagaaatgccaattcttcatccccaagtcagacctcaccaataaaaaatctggggttagagtsgtgatatggtttggctctgtgtccccacccaaatctcatctcaaattataatccccacatgttgagggagggagatgattggatcatgggggcggtttcc

SEQ ID NO: 2545 - DNA, 201 bp, Homo sapiens
aagttgttttctctttaattaagattcaaacgtaaaaggttgtattccaaggataaatgaacatagtgatcaagattatgttagtagtctcaagcatttakaaatacaataccagggttactgtttttccacaccaataatggtatgcagcttcgtataattgggaagggtacctttatgctttatgaacagaccatagga

SEQ ID NO: 2546 - DNA, 201 bp, Homo sapiens
cctgtgaaatctgcccacccaccagttgttcccatttcagctaacagatccactatccactcacttgctcaggccccaaatcattatttattcttctgtcygccactccccacaaacaatcttccaggaagttcttccagctctctctctaaaaatataccgcaaatccaacttcttttcaccatctccacttctattttc

SEQ ID NO: 2547 - DNA, 201 bp, Homo sapiens
ctcaggctttagagagatactaagtaaggaatttgagttttggaaaccagagaggatgaaaataaaaagctcatgaggaaatgatttcagtctgagctcckggattatttctgccaccactttgatttcctctcacaggctgagagagttaatctaatattccaaggattgaagttgctggatctgagaaatcagacctgc

SEQ ID NO: 2548 - DNA, 201 bp, Homo sapiens
gtcacagaaagtttccttactggttattctcacctgaagggggatagaattcaatttattactgctgtaacaggttaaacatgaatgtggccataggcacmaaatatgttgaactggttttaaagaaaataaactttcccttttcctgaacctttcatccattttgaagctttgaactacttagataaaaatttccctctc

SEQ ID NO: 2549 - DNA, 201 bp, Homo sapiens
gttttggtattgccactcttgtgtgttaaaacagggaaaagatccaagaatataaaatatgtcacagaaagtttccttactggttattctcacctgaaggsggatagaattcaatttattactgctgtaacaggttaaacatgaatgtggccataggcaccaaatatgttgaactggttttaaagaaaataaactttccct

SEQ ID NO: 2550 - DNA, 201 bp, Homo sapiens
acgttttttctcctaaggtctggaattattccaaaagcattcccaatgtaatttaaaattcaataagaaaccaagatttattttatgttcagctttgtacrattgtgtctcttctggaatgacctgtcacagaatgagcgcaggtataataactgaatcataaggtcatttgaaaaacaaggtctatggctaaaatggact

SEQ ID NO: 2551 - DNA, 201 bp, Homo sapiens
aactcccgacctcaggtgatctgccatcctcagcctcccaacgtgctgggagcacgactcttcaacaatgactcgtgtcacctcggaaggattgctgtcgygtatatgtttgttattgtgagtacacacaatttttcacagagagctgagacaaatgccacaagcagctggcaaaggaggagactgttgcatattaatttc

SEQ ID NO: 2552 - DNA, 201 bp, Homo sapiens
ccccatctctactaaaaatacaaaaattactgagatgaggtggcacacacctgtaatcccagctactcgggaggctgaggaaggagaattgcttgaagccrggaggtggaggttgcagtgagccaagatcccgtcactgcactccagcctgggcaacagagcgagactctgtctcaaaacaaaacaaaacaaaaacaagtg

SEQ ID NO: 2553 - DNA, 201 bp, Homo sapiens
caaaatcatctcaaatcattgcttcttttctttgtgtacaccagaaaacaaagaagtgtaaagataatttaggagtaatatgatctgctgagagtattagwgtttccctgttttttttttttcctgagttagaaggaaatgatctcttttccttttttcatctgaaaaaaagtaaggaagagcctcttccatttttaagtc

SEQ ID NO: 2554 - DNA, 201 bp, Homo sapiens
gccttggcctcccaaaatattgtgattacaagtatgagccactgtacccagtctgcaactttcatattatttaccacgctcctcaaatttgtatttaaatmgttaatttcaagaataaaatcatttacggtaataattttaaagcaacctttcaaaggaaacatgtaagatagttttaaaaataagacttgtatatcctta

SEQ ID NO: 2555 - DNA, 201 bp, Homo sapiens
cctccctccttcctccctcccccctccttcctcccttcctccttccttaccctcccctcccctcccctcctctcctctcctctttcttctcgttctcaaakattctcctccattacttggaaattcatttccctagacttgttttcaatttcattagaaatactcaccattttcaacaaccaaggctaaaagctgtcatct

SEQ ID NO: 2556 - DNA, 201 bp, Homo sapiens
cctggtatggatttttctcaggcctcaacccttagaaccagttttagtcttctttggtttctgtggttctattctctatgctccgttcctaatcagccttracagatacctgcttcgctttcattgctggcacttaggacttattcacaagttcaattcactggggaaaacaccccagggaacatccttaatattcgtata

SEQ ID NO: 2557 - DNA, 201 bp, Homo sapiens
gcctccctccttcctccctcccccctccttcctcccttcctccttccttaccctcccctcccctcccctcctctcctctcctctttcttctcgttctcaargattctcctccattacttggaaattcatttccctagacttgttttcaatttcattagaaatactcaccattttcaacaaccaaggctaaaagctgtcatc

SEQ ID NO: 2558 - DNA, 201 bp, Homo sapiens
agggatgcaatgggtgttcaaatggaacaattctcaccgtggtggcttcagtattgcaaggtgttaaacaccccatcctactaaatgccacaatcactttycatccattgtgatacccaccatgtgataactctgcacatttccaatctcttcttggaaagtggtatacgcatacacccctgaagtcttcccctagcccca

SEQ ID NO: 2559 - DNA, 201 bp, Homo sapiens
ggaggactcacccaaactccattgagacagatcttgagaagggttatggcagtagagtatagcagttaaaatgtacagattcgttaatgctctaggggagrgatacttcattttctatgatgacgtgattattacacactgcatacttgtatcaaaaaaatctcatgtgccccatatatacatatgcctactatgtaccca

SEQ ID NO: 2560 - DNA, 201 bp, Homo sapiens
aactcagtcatctacagtagtctcgaggcaatagaattattcagaacattaacttctcttcaggtttaaaatctacagagaaagctttaagattctttggyttagtagtctactcaataagcagttgtggaaggctgatgttcatagcatgaaatttaccttcaagaatcttgcattctgccgataaaaccagatttctaa

SEQ ID NO: 2561 - DNA, 201 bp, Homo sapiens
aaaagaaagagaaacccagcaaaatggctttgatagaggaggcactgtagctcaggccctcacaagttgcaacaaggaaggttgttgctaagagtaaagaygctggctcttcctcatgtgacaccacaaagtgggctgggaatgtatacagcacagttttctcatgaggaccactaaagaatcaatcatggctcttttctt

SEQ ID NO: 2562 - DNA, 201 bp, Homo sapiens
agatatacttaaaaacttctaattgaatggttgataagttacgtaaatattaagctaacctaagaattgtgaatggaagaaaacttttccagtttcaggtrtgtaatgagtcaactatcaaagcagataaatttgattgataacttggacatagtgcttacgtttaggggaaaaaagttatcttagttttaaaatggatcc

SEQ ID NO: 2563 - DNA, 201 bp, Homo sapiens
tgcagtggcacaatctcagctcactgcaacctccacctcctggtttcaagcaattctcttgccttagtctccagagtagctgggattacagggatgtgccmccatgcccaacgaaattttttgtatttttagtagagatgaagtttcactaggttggccatctcctggcctccagtgatccaccagccccagcctcccaaa

SEQ ID NO: 2564 - DNA, 201 bp, Homo sapiens
cctgtgtgatctacattttaagaaatgtcattttttcttctacaagatagttagctttatcctctgatttttcagacaatcctctgaaatttttacttacrtaattctattctaattttattatatcctactttttcccaaagcaatataatattatttttattgatggtgtattttgttaattgggatttaaaaatcttc

SEQ ID NO: 2565 - DNA, 201 bp, Homo sapiens
catcagaagtcaggggtcttttgggagagtcctgagtagcaggagtcatagatctggaataattagattattaaaatgaacacttgaacaaaggggaacaraaagctgttaaccttaagaaaagattccagacaattctgtttgactctcttttttatcaaaacaaataaaggagtataagttaaaatgtattcagtgaag

SEQ ID NO: 2566 - DNA, 201 bp, Homo sapiens
ggtattactttgccaacttaaaaataccatgtggccaagttttaaaacccgtaagggaaagaaagcatgccacttctaggacaaaattcttaggtggccaraatgggtttgtatttatgggaattttcttctgggctaaaaacaaaaaccaaacatttcagcatttacaaagacagtatctatttggtttgaaataaaatc

SEQ ID NO: 2567 - DNA, 201 bp, Homo sapiens
gagctgttttttgtgcccaattatttcctcagtcctgtgttctcaccctaagcaacttaatgaaattggaaaggcatatccttttagaaatgtatctgtaktaaagataatttgaaagcactaaactctagaaaatcttttccgctgggcgcggtggctcacgcctgtaatcccagcattttgggaggccgaggcagcgga

SEQ ID NO: 2568 - DNA, 201 bp, Homo sapiens
tatttatgggaattttcttctgggctaaaaacaaaaaccaaacatttcagcatttacaaagacagtatctatttggtttgaaataaaatccgcccgttaartagacagacaattattgaatggttgttctagtagtaagccccgcaacatattgcagtaaaacttttgacagtaaagtaagttgtttactttgtactcggt

SEQ ID NO: 2569 - DNA, 201 bp, Homo sapiens
gggctgaattttgttgttggatgtgctgtcatctgaacacttctcatatgagaaaaaagcaaaaataaagaaaccaagtaaaaacccgaataacacaaacrgataaagaatgagtgcagttacctccctgaatatttatccccatcttgagccctgaataattcattgacgcttaagtaacagtgagtcaacatatctgcg

SEQ ID NO: 2570 - DNA, 201 bp, Homo sapiens
gctatagaatttctaaaaatgatcaattatgatggaaattatctatgtacctctaattttctctttatcactaggtcgataaagcctaatgatttttttgytatatatttattggttactaatagaaataaaaactaataaactaatatattcataaaaccaaaagggcccatgttgctttaaactctggcctagaatagt

SEQ ID NO: 2571 - DNA, 201 bp, Homo sapiens
catgaggtttgcttttagagaactgctcactatctgtggtggtgtttctgatggtcaggaggactcacccaaactccattgagacagatcttgagaagggytatggcagtagagtatagcagttaaaatgtacagattcgttaatgctctaggggagagatacttcattttctatgatgacgtgattattacacactgcat

SEQ ID NO: 2572 - DNA, 201 bp, Homo sapiens
tcatggctcttttcttttttaaggtttcttaacattgtctgggggcaatggaaggaagcgattcatgaggtttgcttttagagaactgctcactatctgtrgtggtgtttctgatggtcaggaggactcacccaaactccattgagacagatcttgagaagggttatggcagtagagtatagcagttaaaatgtacagatt

SEQ ID NO: 2573 - DNA, 201 bp, Homo sapiens
ttagaatgctggcagctaaacataaggattaaatggtactataacggattacaagtcatatctgttatattctgcttgggatcagtgttctgtttataaargaaagagaaacccagcaaaatggctttgatagaggaggcactgtagctcaggccctcacaagttgcaacaaggaaggttgttgctaagagtaaagacgct

SEQ ID NO: 2574 - DNA, 201 bp, Homo sapiens
gattccttcctctctcacattgggggcagtaaaggataggctcttatttagattgatgtcaaatacaaactcctcacttactggctgagtcaacttgggtracttaaactaacatctctgagactcagttttcacatctttaaattgggccaatgacactagagatttaccttatagggtaaatctcaaagattttaccta

SEQ ID NO: 2575 - DNA, 201 bp, Homo sapiens
gaaccactggcctaggatatgtgggttcggttatctgaatctcaattacagaaaatcaacagcacttctggtagtagaaggtaacccagttaagaattaaraagtatagactgtagtttgaatactgaatcttttggaaaatcattgaattatttgaacctcagtttactcatctattaagtggtaatccaccctctctcc

SEQ ID NO: 2576 - DNA, 201 bp, Homo sapiens
gatcacacttaaatgttttcctaaaaaggacactatccttaaaatatagaacaactcacacaccccaactctgaaaaccaattacaatatatttaaagcawtccatggtactattttatagatatataatacatttgtagaatacatatattatatataatatgcatatataaatatttacatataaaatatacatatata

SEQ ID NO: 2577 - DNA, 201 bp, Homo sapiens
atacctggctattctgatagttagattatgtttatgaatgaagacttaggatgactggtataagtaatgtgctatgtttcctctgaagtagtgaagatctkatttccctgtagagaataagagtagggcttttggagaacgagatcatatcccttgcagggatgtgcatggagctggaggctgttagcaaacttgcacagg

SEQ ID NO: 2578 - DNA, 201 bp, Homo sapiens
gaattattccaaaagcattcccaatgtaatttaaaattcaataagaaaccaagatttattttatgttcagctttgtacgattgtgtctcttctggaatgamctgtcacagaatgagcgcaggtataataactgaatcataaggtcatttgaaaaacaaggtctatggctaaaatggactgaattttattattttatttaaa

SEQ ID NO: 2579 - DNA, 201 bp, Homo sapiens
ttctcataaagtagacgagacagtatcagctcatgaggatttaaggtccatctcagtaggagagtggcacaaaatcttaatatatcaaaagacagcaggtrattaggtcatacggaaatggaagaggcagaggtctgaggagccaggtgaatccagtgggctggtggagactgtctggaaatggcccttgctctgggtcca

SEQ ID NO: 2580 - DNA, 201 bp, Homo sapiens
aaactttatagatttaggggatacaaatgtagttttattatatggacatattatgtagtggtacagtcttggcttttagtatacccatcacccaaatagcrtacattgtacccgataggtaatttttcatcccccctcccatcctcccaccttttggagtctccattgtatattattccattcactatgtccatgtgtaca

SEQ ID NO: 2581 - DNA, 201 bp, Homo sapiens
gaggtagaaatgtctctctcttacaactgtggcggaggcagaatagaggaaaacttacagagattgtgttttatacattaaactagatgcccatttagtascacatcttgcctagtaagcccagttaaacttaactgtagtccctgcagttgagacgagattatgtggagagggaagatgccaaaaaaaaaaaaaagataa

SEQ ID NO: 2582 - DNA, 201 bp, Homo sapiens
ggtcacctcacttgagacactggttatgttggagtctacgtgaccttatctaacctcacctcgcctctaagaagcactggctttattaacatttgaacaaragacctagaaatgttaattcaggtatctcagtaactgttgagtgaattccctgtgagtcacatttggatactatgaactatgataatgtcatagtaaagg

SEQ ID NO: 2583 - DNA, 201 bp, Homo sapiens
ggcctcccaaagtcctgggattgcaggcatgagccactgtgcctggccacgcctcccaggtttaagcaattcttgcgcctcaacctcctgagtagctcagwctacaggcacctgccaccacacctggctttttttttttttttttttttgtattttattagagataatgtttcaccaggttggccagggtggtctcaaaac

SEQ ID NO: 2584 - DNA, 201 bp, Homo sapiens
tgttgaacactttgggtctgacgtgtagttggtgttcaagaagcacatgctggataattaattgtgctgagcctgaaggagacttttttgtttgtttgttkgtttgtttgtttgctctttgttgcccaggctggaatgcagtggcacattctcggctcactgccacctccgcctcccaggttttttttttttttttttttt

SEQ ID NO: 2585 - DNA, 201 bp, Homo sapiens
cctcacttactggctaagtaagcttgggtgacttacctaatatctctgagactcagttttcacatctttaaaatgggccaatgacactagagatttatctyatagggttgttgggttataggtttgtagggttataggttgttggatgttgcccagcatatgaagtattagcacaatgcttaacacatattgtctgggcgt

SEQ ID NO: 2586 - DNA, 201 bp, Homo sapiens
agcacaggaatattctctccagtaacttaatttttctgaatccactgattgcaaatatgtcacttactagtttaaacattttacgttaaaaaattttcaaytgtagcacttgcattaatgactcttataaatgaattaccttatcttggacttagactctgtttgctttaactttacccatctctaccttttgcagacttt

SEQ ID NO: 2587 - DNA, 201 bp, Homo sapiens
attccctgattcagcaaataaaaataacatgatgcccctaccctacccagaagccctctccattgaatggtagtaggagggagaggagaaagaacattccrgtaagaggaaaaatgcatattccaaggcactcaggtagggaagcagcttggtgcttatcagaatctaagttagacataaggaaaaacagtccaaaaaaac

SEQ ID NO: 2588 - DNA, 201 bp, Homo sapiens
taaggagttccaggaaatatgttcttaatggagagaaaaaaactcagaaaaataaagcaaggaacaaggaatgacctaataataatggtttttcaggtggyaaatatttcataaaccaatggtgaccagatgtttcctaccctcataaaacagagctaccgggcttcatgtacaagccgagggatgtcctgcattgaacca

SEQ ID NO: 2589 - DNA, 201 bp, Homo sapiens
cttaattcttgtgaaaatcaagagatcttatgtaccttaaaatactttaaaaaatataaaaacctacataaggaaataatatagtcattcctcagtatctrtgggggagtggttccaggacctcccttggataccaaaattcagagatgctcaagttcctaatataaaatgatgtagtatttgcataaaacctatgcacat

SEQ ID NO: 2590 - DNA, 201 bp, Homo sapiens
tcttaggttatagagttaatttgcatctgagcctgcaatcgatccctctttttgactggatccctaggtcttaacaactatgctatccagaggtaagcttytgaataatttattaataaggtgtcaagatgggccatgatgctgaatacataaatggataatgagggattaaatcaactgctttggaatgaactgcatttt

SEQ ID NO: 2591 - DNA, 201 bp, Homo sapiens
ttcaccattggaactcataaccgagagaacaaagctagttttcacttgcaattagtattatttttggccaggaaaagcttttgattggatttctctatcasagttcaggagaccagcagtttagtcctatttcagcagatatccaataggatgctatttcttggctcaaatcaattaaaattaaataggaaagaaccattt

SEQ ID NO: 2592 - DNA, 201 bp, Homo sapiens
catccctaccagtaactggacaattgggaagttttgctaaactattcatatcttagtatgttatttttaaaatggagaaaacaaatttctagttcactgamtctaacatgaaatcaccactagataccattgttttatgaaccactaataaagaaacagcatatagtactggccaagtaaataattaagctgccaaacaat

SEQ ID NO: 2593 - DNA, 201 bp, Homo sapiens
aaccccaaagaggttactgtctttatttccttctgtatcctactcaaagttttaaggaagtaatgccatgagcatgactttttttttttttttttttttttgagatggagtttcactcctgttgcccaggctggagtgcaatggcgcgatctcagctcaccacaatctctgcctcccgggttaaagcgattctcctgcctc

SEQ ID NO: 2594 - DNA, 201 bp, Homo sapiens
gaatatttaagtttcttttctgatctatgaagaaaagctttgtgaagatgtacagaaccccaaagaggttactgtctttatttccttctgtatcctactcraagttttaaggaagtaatgccatgagcatgactttttttttttttttttttttttgagatggagtttcactcctgttgcccaggctggagtgcaatggcg

SEQ ID NO: 2595 - DNA, 201 bp, Homo sapiens
accacttcaaatgtatgaatcactcatcattacaaattccaccaaaaagccaacttttggtgttaataatcccagacacattactgtcacgttatgtctttggatagtttgcctacctctctgagtctcagttttctcacatctaaaacacgtaataacagaacctaccctacagagcttgcgagataactggatgagaga

SEQ ID NO: 2596 - DNA, 201 bp, Homo sapiens
aagaaatattttgtttaatgagaaggttgagattgttggctaaaatatcagacttccagatttgagatcttaactatcttcctttattaccaattgcagtrgataaattagagttagctattgttactccatttctatcaaagtacattcagtcactattctggagagtaaatcctcaaaaacttctaattctttacagta

SEQ ID NO: 2597 - DNA, 201 bp, Homo sapiens
actaagcaaggcctttcttctcaggctttaagcttctagtgcttcaggtattataagggccaagcctattgaccagccaccatactacaatagattcatcygcctcggcctcccaaagtgctgggattacaggtgtgaaccaccatgcccggcctggcactgataaaaaatgctgtaactcagtcaggcctggcactgata

SEQ ID NO: 2598 - DNA, 201 bp, Homo sapiens
gtgttgcattttcataaattaactatgaaaagaaattgtgagaggcctttgcacaacctttaggttttccaaagcatctttatttatttatttatttattkatttatttttattttttgagacagtcagtggcgccatctcggctcactgcaacctccgcctcccgggttcaagcgattctcctgcctcagcctcctgagt

SEQ ID NO: 2599 - DNA, 201 bp, Homo sapiens
aaggaatgccaaatacaaactccaactccttacagctaatttaataattttgcagtgaaaaatggctttttatcatctcaggagcaagtgctttttttttyttttcttcccacctgctaaaaactcttttcattaaaaagggggcttggagtgcctttgctttgatgtaggagaatgtgtaatacctgcaatatttcttgg

SEQ ID NO: 2600 - DNA, 201 bp, Homo sapiens
gacaaactgctcaggctagagtcttggacatgtcattcactacctgggtgactgacacattacttatccttgctgtgcctcagttttctcacttgcaaaaygtggataacagcagtataaccttaaaggtgtgtgtatgtgtgtgtttgtgatgatgagaccagtttgggaaacatacacatacgaatttgagcacatagt

SEQ ID NO: 2601 - DNA, 201 bp, Homo sapiens
tgataaaattatccatacaggtgaggctgtgagaaaacactccaggtgctaagagccttgggtaatttctaacacttgccccctatcatccattggctttragcacagatgattagtgcaggtgtagcattgtgtttgcatgatgaaaggaaaactaaattgtgtttctgtagacctacctgaggatacgaagacctcctg

SEQ ID NO: 2602 - DNA, 201 bp, Homo sapiens
aagcagctggcaaaggaggagactgttgcatattaatttcattccctgggaggtctgatctggaaccatttgggatatggatgtttaatggtctctagcastgaactatcaccagctctgccttttctcattgcttcttggaactgtttctcatgccatctgcttctaatccttcaccttgtctctttcagattccctttc

SEQ ID NO: 2603 - DNA, 201 bp, Homo sapiens
attttttaaacatctatcctgcccaatgcttgattgatgtgtctttcaatcaatcagaaggttcctgtatttcttcagcaaaagctaattttcttctaatrtttctttcaatggtttccctttctttcattatctgtgatttcttcttatggaattctactgaatgcaccttggcctccatgaatctccctcaagtctcta

SEQ ID NO: 2604 - DNA, 201 bp, Homo sapiens
ataataacattctaattaggtaacagcgtctagtctctttgcctactaattaattctgtccatggatagaattaattagaagggaaagatatttttaaaakaatttagttataaaagtaataaaagatgatcttaaaaattaaaacaacagcaaggtagaaagtaaaaagccagtcttctccctcaactcccaaaggtttg

SEQ ID NO: 2605 - DNA, 201 bp, Homo sapiens
ccttcaaatgatgactcagactcttgggacagggtataatatacagtatttaatataattaaatatgtagctcattttcaaacatttagctcattttcatytacttcatttaatttttttttttgccctcctgccatttgcattcaatcatctacaccattatggaggtagaaatgtctctctcttacaactgtggcggag

SEQ ID NO: 2606 - DNA, 201 bp, Homo sapiens
ctcgcccggctaatttttttatacttttagtagagacgaggtttcaccatgttggccaggctggtcttgaactcctgacctcaggtaatccgcctgcctcrccctcccaaagtgctgggattacaggtgtgagccaccacacccggccaatcttgagttctattaaaagagagtaaaggaaatagtcatttacactaagga

SEQ ID NO: 2607 - DNA, 201 bp, Homo sapiens
agacaaaacgaaatactgaccccctataagtgagactaatttgcttgtatagcaaaaatttgatcttgagtgcccagcttgattagcaaagttcccaaagrgggcgcccccatagtgagtgaggaatgtaactacagaagtttaggtgggcactgggcacggggagactctcccagtggctctttagaagctcataaatat

SEQ ID NO: 2608 - DNA, 201 bp, Homo sapiens
attttcaatctgagattggttgaatccacagatgcagatatggaggttgtattaggttgtattaggaataatcctcagtagtcattatctttgggtaatgmgataaaagacagccaattagtatgagataacctattatgtaaactgttctagtagctatagaggattcaaaggaaaataagacagaattggtgcccctgt

SEQ ID NO: 2609 - DNA, 201 bp, Homo sapiens
ctaccgggcttcatgtacaagccgagggatgtcctgcattgaaccagggcttagtgatagttccctgtgtgccaggcactgcgctggcctcagtgggggcyggacagacatggtctctgctgccacggaccttggactcagggaaagatgtggtaaatgaacagtttttaaaatcgccgttgtcacaaatatcagaagttt

SEQ ID NO: 2610 - DNA, 201 bp, Homo sapiens
tgtgcccaattatttcctcagtcctgtgttctcaccctaagcaacttaatgaaattggaaaggcatatccttttagaaatgtatctgtattaaagataatytgaaagcactaaactctagaaaatcttttccgctgggcgcggtggctcacgcctgtaatcccagcattttgggaggccgaggcagcggatcacaaggtca

SEQ ID NO: 2611 - DNA, 201 bp, Homo sapiens
tgaaaagtaacacattttgggagtcaactggaatttaaatgaagtcagggattgcaattaaaattttttccttagatatacttaaaaacttctaattgaayggttgataagttacgtaaatattaagctaacctaagaattgtgaatggaagaaaacttttccagtttcaggtatgtaatgagtcaactatcaaagcagat

SEQ ID NO: 2612 - DNA, 201 bp, Homo sapiens
atatttcataaaccaatggtgaccagatgtttcctaccctcataaaacagagctaccgggcttcatgtacaagccgagggatgtcctgcattgaaccaggrcttagtgatagttccctgtgtgccaggcactgcgctggcctcagtgggggccggacagacatggtctctgctgccacggaccttggactcagggaaagat

SEQ ID NO: 2613 - DNA, 201 bp, Homo sapiens
aaaaagtgagttagctttccttgccaataaggagttccaggaaatatgttcttaatggagagaaaaaaactcagaaaaataaagcaaggaacaaggaatgmcctaataataatggtttttcaggtggcaaatatttcataaaccaatggtgaccagatgtttcctaccctcataaaacagagctaccgggcttcatgtaca

SEQ ID NO: 2614 - DNA, 201 bp, Homo sapiens
ttttcaggtggcaaatatttcataaaccaatggtgaccagatgtttcctaccctcataaaacagagctaccgggcttcatgtacaagccgagggatgtcckgcattgaaccagggcttagtgatagttccctgtgtgccaggcactgcgctggcctcagtgggggccggacagacatggtctctgctgccacggaccttgg

SEQ ID NO: 2615 - DNA, 201 bp, Homo sapiens
aacattttacgttaaaaaattttcaattgtagcacttgcattaatgactcttataaatgaattaccttatcttggacttagactctgtttgctttaacttyacccatctctaccttttgcagacttttaccagagccattacaacattataaggctttttttccccagacttgccctcctcacagtcgttttgagtccctt

SEQ ID NO: 2616 - DNA, 201 bp, Homo sapiens
acaatcgccaggctgctctggatagaacccagggagcagcaagttttctcagcaaagcgggtccacagagggctcgctgcggtgctcaggtctgaataaartggttccacctgcagcaaattacccctctccccaccaggcagattcagccatcttcctcctttttagttagggaaaggctggaacctggtatggattttt

SEQ ID NO: 2617 - DNA, 201 bp, Homo sapiens
gtttgactctcttttttatcaaaacaaataaaggagtataagttaaaatgtattcagtgaagtctctaaccggcaccaaggtactgagagttctttaagtsttcttgtaaattacacaccacgttgcttatgtgattattaatgcgatgatgtaatagttgtatttttatgtacaaagaatacgagcctggattgtgtgct

SEQ ID NO: 2618 - DNA, 201 bp, Homo sapiens
cagaaagtggagaaagagatgattgatctgctaatatcagatctttcattctaatactcatattcagctatctaaaaggaaaattagaacacaatcgccakgctgctctggatagaacccagggagcagcaagttttctcagcaaagcgggtccacagagggctcgctgcggtgctcaggtctgaataaagtggttccacc

SEQ ID NO: 2619 - DNA, 201 bp, Homo sapiens
tcggggtggttctatacacattttacaaatgaggaaatgaagatttaagaaggttaaatagggtgtcttaggttatagagttaatttgcatctgagcctgsaatcgatccctctttttgactggatccctaggtcttaacaactatgctatccagaggtaagcttttgaataatttattaataaggtgtcaagatgggcca

SEQ ID NO: 2620 - DNA, 201 bp, Homo sapiens
gaggctacagtgagctgtgattgtggcactgcactctagcctgggcgatagagtgaggccctgtttcaaaaagagagagagaaaaaaaaagaaaattggtygtctgcttattagcccttattaggtagtgtatctgtctatagcaactttgggaaaggaaggggtcttggtggtgatttgggcttcactgacttatccttg

SEQ ID NO: 2621 - DNA, 201 bp, Homo sapiens
ttcagaggctggggtaggaggaactcataggactaggagtttgagaccagcctgggcagcatagggagaccccgtctcgacaaaaatataaaaaattagcygggcttggtggctcatgcctgtagctccagctacttaggaggctgaggtaggaggattgattgaccctgggagatcaaggttgtagtgagctgtgatcga

SEQ ID NO: 2622 - DNA, 201 bp, Homo sapiens
ctgctgatgtccgtggaaggatggcttggaccagggctgagcagtgtgggtggcaagaagcgtgttcagatttggaggttttgccaatgggacctgctgaygaagtaagctgtgaaggaacagagtatgactctcaggctttggctttaagcaagtggctagatggtggtgccattttctgagactatatgaggaacagat

SEQ ID NO: 2623 - DNA, 201 bp, Homo sapiens
ttcaacacataagcaggtaaataaacaaatgactgcagagagtggtaaatgctacacaattaacaaaaaaaaaggcaatggggtagaaagaaatggggtargggagggatcctttggcgggagtgttcagagcagggcttcctgagatggtgacttttgagctgagacctgtcatcatgagaagatctaggaaaaagagca

SEQ ID NO: 2624 - DNA, 201 bp, Homo sapiens
actcaaatacttgtaggcctgggggagctccatgacttgaatatggtaattctctgctttggatggtatgattgaagcacttaccatttttctttgttttmgttttctgttttgataaaaaaaaaatgtagttttgcactgactcagacaaagtaaagtcatcccttttaacttaggattagccctgaggaactcttctct

SEQ ID NO: 2625 - DNA, 201 bp, Homo sapiens
gcttttagaattgtctcttcatcttgagattgcatcaagagctttattattttttaaacatctatcctgcccaatgcttgattgatgtgtctttcaatcartcagaaggttcctgtatttcttcagcaaaagctaattttcttctaatatttctttcaatggtttccctttctttcattatctgtgatttcttcttatgga

SEQ ID NO: 2626 - DNA, 201 bp, Homo sapiens
tctgagatcactagtcagatgcctaataggtatctccaacttaacatgtctaaaacagaagcttgacaccaactgtcttctcaaccacctgcctgtgaaayctgcccacccaccagttgttcccatttcagctaacagatccactatccactcacttgctcaggccccaaatcattatttattcttctgtctgccactccc

SEQ ID NO: 2627 - DNA, 201 bp, Homo sapiens
aattttttttccaggctcttgtctaactgaaatagaattatcaccattcgacatggcccttcaatcctaaaacccgtttcagagtaaaaacataattagcrtgaaccctaaggacagaaagagggtgaggtggtttctgtagttttgtgtttcggaaacagaaagaagcctagagaaagacacaatgactgtaacaggcac

SEQ ID NO: 2628 - DNA, 201 bp, Homo sapiens
caccctcccatctcagcctcccgagtagctgggaccacaggcacaacccaccatgtctagccatgagtggcggttttagttaccataaaaccacagatcccagagacaaactgctcaggctagagtcttggacatgtcattcactacctgggtgactgacacattacttatccttgctgtgcctcagttttctcacttgca

SEQ ID NO: 2629 - DNA, 201 bp, Homo sapiens
gcaatctcggctcactgcaacctccgcctcctgggttcaagtgattctcctgcctcagcctcccaagtagctgggattacaggcacctgccacctcgcccrgctaatttttttatacttttagtagagacgaggtttcaccatgttggccaggctggtcttgaactcctgacctcaggtaatccgcctgcctcgccctccc

SEQ ID NO: 2630 - DNA, 201 bp, Homo sapiens
ccactgcactgagtactgtatcaggagggacaggaagtcgatttcttactaagcaaggcctttcttctcaggctttaagcttctagtgcttcaggtattayaagggccaagcctattgaccagccaccatactacaatagattcatccgcctcggcctcccaaagtgctgggattacaggtgtgaaccaccatgcccggcc

SEQ ID NO: 2631 - DNA, 201 bp, Homo sapiens
taaaaaattgttttgaacacccaccgagatgaacatctgttttgcattcactgcccttatgcttttggtttagacgctgcaatactaatttttttttttttgagaagtgtgacattgcaatcaattgacaattttaattatttcaatgatatctttgtaaaaaaagaaaattcatcactcaaaaagcagaccacatggaaa

SEQ ID NO: 2632 - DNA, 201 bp, Homo sapiens
tttgctaaatgctactatagaaaataaggtattaaaaaacctcttggttttctgagggttaaagatttgtttcttcaattctaactctcatttttttttttgtggttcttgttccttgaactattgcccatgaatgtctaatggctggttaacttttctaaaattaaatagccctttgatggatatctttgtttctcatct

SEQ ID NO: 2633 - DNA, 201 bp, Homo sapiens
tgagggaaattgctaaacaatttttaaagcagcaagaaaacaatagtcaaagagattttatttttggaaggtgttctaaattgacagtaatccacagtacrgctgaccttcacagcttctacatttagaaagagaggatggggagataattagttgtatgaaggaggagtagagacagaaacaaatcacttttctttggct

SEQ ID NO: 2634 - DNA, 201 bp, Homo sapiens
ttctaatactcatattcagctatctaaaaggaaaattagaacacaatcgccaggctgctctggatagaacccagggagcagcaagttttctcagcaaagcsggtccacagagggctcgctgcggtgctcaggtctgaataaagtggttccacctgcagcaaattacccctctccccaccaggcagattcagccatcttcct

SEQ ID NO: 2635 - DNA, 201 bp, Homo sapiens
atcttctacttacagttcacagaatcacacatagagtaaatagatgaatgaactggtaagttttagagcatgtggtgcagaataaatgaagcagaaggaamagagggaagaaactctggaaagcttctgggagaaaggagaactgaatggtaaagaaggcaacggtggttaggatgaaatgcaaagaaaattcatggactg

SEQ ID NO: 2636 - DNA, 201 bp, Homo sapiens
gcactccagcctgggcgacagagtgagactctgtctcaaaaaaaaaaagggtattaatatgaactccatttacgaacactgactatactatgtgttagaarctgtgctaagaggtcttaaaccttttctctctctaatccatgatcccggaacttcggggtggttctatacacattttacaaatgaggaaatgaagattta

SEQ ID NO: 2637 - DNA, 201 bp, Homo sapiens
cgagagcatcctggctaacacggtgaagccccgtttctactaaaaatacaaaaaattagccgggcgtggtggtgggcacctgtagtcccagctactctggrggccgaggcaggagaatggcgtgaacccggggggcggagcctgcagtgagccgagattgcgccactgcactccagcctgggcgacagagtgagactctgt

SEQ ID NO: 2638 - DNA, 201 bp, Homo sapiens
catgtaagctaatattttaggtgaagaaggtatatgctttgctttagctgcaacaattacttctttaagtatttattttcatttatttagcctggttttawttttaaaaacaaaaatatcaatacttagtcattttgtctgtaattatttgatttaaaattataacagctttatttgattttgtaattgtcttctgtctgc

SEQ ID NO: 2639 - DNA, 201 bp, Homo sapiens
gattacaggaacacttgctctgcttcctgccttctaatctgtgcagggagctgtctagaataaagtagggctataaaccacaggcagaagtagccacttcyaggcttcatgccttagtcacgagagtatggagtaccctgcacctaagaggcaaagagacatcggggcagccccaaggtgtgacacttttcctcccatctt

SEQ ID NO: 2640 - DNA, 201 bp, Homo sapiens
tccgttgcttggaaatggtctaagatttgttggaatattctcagatgcgtggaactctatagggcaaacgtatattgaacgaacaagtggaggccgggagyggtggctcacgcctgtaatcccagcactttgggaggctgagatgggcagatcacctgaggtcacgagtttgagaccagactggccaacatggtgaaaccc

SEQ ID NO: 2641 - DNA, 201 bp, Homo sapiens
gaaattggaaaggcatatccttttagaaatgtatctgtattaaagataatttgaaagcactaaactctagaaaatcttttccgctgggcgcggtggctcaygcctgtaatcccagcattttgggaggccgaggcagcggatcacaaggtcaggagatcagaccatcctggctaacacgatgaaactgtctctactaaaaat

SEQ ID NO: 2642 - DNA, 201 bp, Homo sapiens
ctgagtagtattccatggtgtacatgtgtgtatattatatatattatatataatgtataatatatatatctacatacacacacacacacacacacacacamaccacattttctttatccaatcaaccattgatggacattggacacttaggttgattccacaattttgctttccatttgctttgtggttttaatttatatt

SEQ ID NO: 2643 - DNA, 201 bp, Homo sapiens
gggctcttcctcgctttgcttgacatttcttcctgccttgtgctgcgttgtgtggaaggtgtcttgctttccctttgccttccgccataattgtaagtttyctgagacctctccagccatgaactgtgagtcagttaaacctctttcctttataaattacctaatctcaggcagttctttatagcagtgtgaacacggtca

SEQ ID NO: 2644 - DNA, 201 bp, Homo sapiens
actgcaaactttgtagaagctacgtaagtgttggcaaattctccattaattcaaattatgcaaattagcactagtaacaagagagttagaaactgtttttycaaaaataatgacaagtagtaaaacattacagttcaatgaaagaacatggattgggggcagagtatcaaactgaaaagcaaaactaaattagtaattgag

SEQ ID NO: 2645 - DNA, 201 bp, Homo sapiens
attgctccataacaaaaatcttttaaaaaaattaagagcgtacttagcctcaaatattttaatgtttaccatgtcagcattacaacttgttaaataataayagtcgcttttgttttaaacaattctaaaaatacaggtaacatgcattgctgtgagactatgaacatctgtggtgaccacggattggctgacatagaggtg

SEQ ID NO: 2646 - DNA, 201 bp, Homo sapiens
tggttttcacttgcagtttgggggccagagctgggggatgagtaaacatgggacatgaaggatggagctgctgttggtacaacacagtagcccgtaggggkgagaggtgacctcatcagaaaaaggctgaagatgaggaactgatttgcaggagctgaggaaggagtcccaaatggccattggtaatgaggagacgaaggg

SEQ ID NO: 2647 - DNA, 201 bp, Homo sapiens
gcattgatcattacacccctttatactctacctgacagcatatattgagggtaccttgaattacttctaggaaatatacattgaaatttgtaagatgctakttgaatttcatatgaactcaaatattatttttaaaagcgccaggtaaaattcactggtttatatactgcttgcttgcatgctctctctctctctctttct

SEQ ID NO: 2648 - DNA, 201 bp, Homo sapiens
cagtgtgaattccatccctaccagtaactggacaattgggaagttttgctaaactattcatatcttagtatgttatttttaaaatggagaaaacaaatttstagttcactgactctaacatgaaatcaccactagataccattgttttatgaaccactaataaagaaacagcatatagtactggccaagtaaataattaag

SEQ ID NO: 2649 - DNA, 201 bp, Homo sapiens
gtagtcctggttactttccagcctgcatctttatctttttcaagaacttaacaccatttaaaattacattacttacttatttgtttatgtatttgctatcwttttcctcttgccagcacataaacttgaaggcagaaacctaatctgtcttgttcatagcgatatctccagtgcttagaacacagacttactcctgaactt

SEQ ID NO: 2650 - DNA, 201 bp, Homo sapiens
tctcctcatgtgcctctctctggagctcctctggcttaagtcaagctggataggttttagctgaatgaatgcaccgtgttctttcttacctccaggtttgrttttcttggtctggaacaccttccttcctgacttatctctaagcctcctgcagaggtgttgcatctcccccagctctgtgctgcactcatcacatgtgta

SEQ ID NO: 2651 - DNA, 201 bp, Homo sapiens
tggttactaatagaaataaaaactaataaactaatatattcataaaaccaaaagggcccatgttgctttaaactctggcctagaatagtaagaaatttcarcttttatttagagtatttttaaaaactaaaatgaaaaatatttgtagataattgaaaagaatctcaatagataatccaatggaaaagtttgattttttaa

SEQ ID NO: 2652 - DNA, 201 bp, Homo sapiens
ctcttttgcgtaatggtcaatttagcctttctttcagtttccaaattgcctctctactcttgggtcctccaagagtccctggaactggtggcctcttttgmgtaatggtcaatttagcctttctttcagtttccaaattgcctctctactcttgactcctgccccagcataacaaacaatctcttagagaataaaaattgc

SEQ ID NO: 2653 - DNA, 201 bp, Homo sapiens
gggtctaaccatccatttcagattgatcatcatcagcttaaaatttatagctagtctacttaagcaattctttgttactccaaagcagtcttattaccaarcattctgacaaatagtagaaaaaggggaaaaaatcaccacatggtcccacaattatatatattcacacatacataatcaagaaatcttactactataagc

SEQ ID NO: 2654 - DNA, 201 bp, Homo sapiens
gggaaagcctttctgatcttttaagcttgcctgtaatttatttttggagcctctgcctgtgaatgtgaaacgttgagatggaatctgatagtagtcgcctmtgacgactatggaagtcactgtggaaagccttcatggaaaccagctagagcatctgctaatgagaaaatcgttagggctcatgtcgcagcacagactggg

SEQ ID NO: 2655 - DNA, 201 bp, Homo sapiens
cccttatagacagcataaaggaggactcttggtcagatatttgtagaggtggctatagttccctttatttgcctaaacttgctgagtttcttaagagggakgcaatgggtgttcaaatggaacaattctcaccgtggtggcttcagtattgcaaggtgttaaacaccccatcctactaaatgccacaatcacttttcatcc

SEQ ID NO: 2656 - DNA, 201 bp, Homo sapiens
attcctcctttggtctttctcatctgaatggcataattatctagtcatctagtcattcagacttgtaggaatcacctttattgtttctttctcctttattmttaatttcaataactcaccaaatcatgaaaaatatcttcaaaacattccttgattcaggcccctaatttctattactgtaggttcttcccctctcagttt

SEQ ID NO: 2657 - DNA, 201 bp, Homo sapiens
ggtagctcttttttttcccacggacattcctcctgaaataattaagtttatatatgttgaagtctcaatactggcctcatttcagatgaactacttccccygaatatcaatggatgggaaccactctacttcaagtaaagctaagctttggaaatcctctttaaagggttagaaaaataataagagaagtttgaataatct

SEQ ID NO: 2658 - DNA, 201 bp, Homo sapiens
ggggaaaaaatcaccacatggtcccacaattatatatattcacacatacataatcaagaaatcttactactataagcaatatcataacattattattttcyagtcctttttattcatgccttgaattaagggtatttgacaaaagggagaatattttaaaaatatgctctgtaatttgcacaaacacttcttccagagact

SEQ ID NO: 2659 - DNA, 201 bp, Homo sapiens
atatatattcacacatacataatcaagaaatcttactactataagcaatatcataacattattattttctagtcctttttattcatgccttgaattaaggrtatttgacaaaagggagaatattttaaaaatatgctctgtaatttgcacaaacacttcttccagagactggattctctgttgggaatatctaggtatcag

SEQ ID NO: 2660 - DNA, 201 bp, Homo sapiens
taattgtgtaccactctcccccttcgcctggctccctgcacttgcgctaatactatgctgcaggttacatgactgagggagggagtcagattttgaagagmaaaacacattttttttttttttctcgagacagagtttggctctgttgctcaggctggagtgcagtggcacaatctcagctcactgcaacctccacctcct

SEQ ID NO: 2661 - DNA, 201 bp, Homo sapiens
gagtagctgggattacagggatgtgccaccatgcccaacgaaattttttgtatttttagtagagatgaagtttcactaggttggccatctcctggcctccrgtgatccaccagccccagcctcccaaagtgctggaattacaggtgtgagccaccgtgcccggcccaaagcataattcttaatggcacacctagttcttat

SEQ ID NO: 2662 - DNA, 201 bp, Homo sapiens
atataaattcctttgtaaaaaatgccagacatatgtagcactccatttagtgttagtcatttaatttctcattgacagagagtgaacgaatgagaaaattycacttacaacatcaaatgtctttttggactttcacatcaatgtgattcttttactaagttatagaattggagttgaagtttacttaagtctaaaagcaaa

SEQ ID NO: 2663 - DNA, 201 bp, Homo sapiens
atttaatctaatatttagcattagctttaagtccacagagcattttggtttttgttttaaaggaacattggcacttttgttaacctgctgtactcaattargcaaaatcctgaaggcgtgtctaaaaggtattactttgccaacttaaaaataccatgtggccaagttttaaaacccgtaagggaaagaaagcatgccact

SEQ ID NO: 2664 - DNA, 201 bp, Homo sapiens
tttatacaaagtttcagttacaaacctgcgggggtcaagtctgatgtagattcaccatatgccgcactaaccagttccagagcacatttggcctgcatctsagacaagaatcctgattcattcattacatgattagagaacgtgcagcctgcttaattttagttatcttagagatctttttagaataataaaaatcatcac

SEQ ID NO: 2665 - DNA, 201 bp, Homo sapiens
aacctacataaggaaataatatagtcattcctcagtatctatgggggagtggttccaggacctcccttggataccaaaattcagagatgctcaagttcctratataaaatgatgtagtatttgcataaaacctatgcacatcctccagtataccttaaatcacttctagattactcataatacctaatatgatgactgcta

SEQ ID NO: 2666 - DNA, 201 bp, Homo sapiens
acttttgacagtaaagtaagttgtttactttgtactcggtaaataaccaaggttattgcattcggaggctgtaatttgaagcccggttccctgttgaattrcaacgatatacatttacacggtagataaaggcttccatacttgccagcatcataaagcaaggcaaaaagcacaagaagggaagagacaggaaacgtggtc

SEQ ID NO: 2667 - DNA, 201 bp, Homo sapiens
gagggtggagaggtggacagactctagaacatgctggctgggccttacttgtagattatattaagaacagaagattttgttctaaattaataaaaaaaaaatctgctccagacatcagcctgctgacaaccacctgtgctggtgggttgttggcaggctgatgtctggatcagatttacaatttaaaaagaacactctgac

SEQ ID NO: 2668 - DNA, 201 bp, Homo sapiens
ttcagagcagggcttcctgagatggtgacttttgagctgagacctgtcatcatgagaagatctaggaaaaagagcactccaggcagaaggaactggaaatrcacaggccctgagacttcctgtgcttggaaatcttgagaaatggaaagaaagcttactcagaacacagctgtaggcgtgagttggggagaagatggtaga

SEQ ID NO: 2669 - DNA, 201 bp, Homo sapiens
tggaggcttcatttgcttctcttaatttttttttttacccctggcttcaagcttgtttcctgctctgatcaactaagatccacttactctatttggctgayaaaattatccatacaggtgaggctgtgagaaaacactccaggtgctaagagccttgggtaatttctaacacttgccccctatcatccattggctttgagc

SEQ ID NO: 2670 - DNA, 201 bp, Homo sapiens
tactaaaaatacaaaaaaattagccaggtgtggtggcgagcgcctgtaatcccagctactcaggaggctgaggcaggagaatcgcttgaacctgggcctcrtgccactgcactccagcctgggcgacagagtaagactgtctcaacagataaataaataaataaataaataaataaaatgagtgagagtgtaaaataaata

SEQ ID NO: 2671 - DNA, 201 bp, Homo sapiens
cacaatgactgtaacagacaccaatcgcgggtaatcacccacttgcacaatgggaaagcctttctgatcttttaagcttgcctgtaatttatttttggagsctttgccggtgaatgtgaaacgttgagatggaacctgggactttagagttgggagacgttttttctcctaaggtctggaattattccaaaagcattccca

SEQ ID NO: 2672 - DNA, 201 bp, Homo sapiens
aaggcttccatacttgccagcatcataaagcaaggcaaaaagcacaagaagggaagagacaggaaacgtggtcaatattgcttggcaggaattaaaatccygtgacgtttcttctagaattgcaaagagacacaagcccctgattgtatttttcaaaagccatcagtcccacttcacaatttttattattttctaggcagc

SEQ ID NO: 2673 - DNA, 201 bp, Homo sapiens
ctgagtggtaatggaattggtattacatcactcctctggtttaggatgaattccatctttacctgggatatcctgtccaaaaatttgaaggcagcctttcrtctctgtaatttgttcaggcaaaataatcataaggttctgggtctaaccatccatttcagattgatcatcatcagcttaaaatttatagctagtctactt

SEQ ID NO: 2674 - DNA, 201 bp, Homo sapiens
tgaacccaactcctctttctttttggatcataatttgcttcaataccacggatgtgagaaggtttaacatttcaaccagaacaaactgtaatgaaagacasgttttggctgggtttggtctttttctgatttgtcaaaatctgaaagatcaaaatctgaaagccagaaaactatccaaaggcaaagagaaaaaacacatat

SEQ ID NO: 2675 - DNA, 201 bp, Homo sapiens
taaccttaagaaaagattccagacaattctgtttgactctcttttttatcaaaacaaataaaggagtataagttaaaatgtattcagtgaagtctctaacyggcaccaaggtactgagagttctttaagtgttcttgtaaattacacaccacgttgcttatgtgattattaatgcgatgatgtaatagttgtatttttatg

SEQ ID NO: 2676 - DNA, 201 bp, Homo sapiens
ttcatcacctgtagataataatccagctgttatgagaataaatatttaggcaatgtctgtaaaagtgccttgtaaagtgtaaagtgctgagcaaatacatrtaatttaaatattattatcatatggaaatatctgttgattagtggagggaaaagtcacggtagctcttttttttcccacggacattcctcctgaaataat

SEQ ID NO: 2677 - DNA, 201 bp, Homo sapiens
gtaactgttgagtgaattccctgtgagtcacatttggatactatgaactatgataatgtcatagtaaaggacagctaggctcagaataaaactctcatctyctcatcctaatgaagcccagagagattttcttccatgtggacagacaatggagactgggaagggtgaaggctgggagaagggtgatgaaggcagactact

SEQ ID NO: 2678 - DNA, 201 bp, Homo sapiens
ctaggttggaaatgaattggtcaagatatttgtagagctgagtgtgtacaatggggcagcacaaatgttcagtcagtgaaactgaccccaaactgaggcaygccattccttgtctgcacacctaacacctagatacactataccatgtggccccctgatgaattttactgtgggcagaggaatctctctccttttgatgtg

SEQ ID NO: 2679 - DNA, 201 bp, Homo sapiens
aaaaggtctgtaaatgttcagtacagacaccattttttttcaaatattttcaatctgagattggttgaatccacagatgcagatatggaggttgtattagrttgtattaggaataatcctcagtagtcattatctttgggtaatgcgataaaagacagccaattagtatgagataacctattatgtaaactgttctagtag

SEQ ID NO: 2680 - DNA, 201 bp, Homo sapiens
ggcacgtgtatggtgtttgtgtcccaagagacccacaaaatctgaagtagcttttacgttgtttccctggggatgacttggacaaccctccagaaacaagkttagctgggagaaacattgtcctggtgtaaaaatggtccctttctgttagggtgggctagctcatgagattacttgcaaaatcagttaacttttttagtg

SEQ ID NO: 2681 - DNA, 201 bp, Homo sapiens
actataccatgtggccccctgatgaattttactgtgggcagaggaatctctctccttttgatgtgctcattgactttttaggctatgacgacaatctctcrttccaaagttaatttgatttcttcaatcttcatgcttccctcttagctccctgttcaaagttaaaattatttatttcgtaaaaaatgatcttgcagaatt

SEQ ID NO: 2682 - DNA, 201 bp, Homo sapiens
gtatgaaggaggagtagagacagaaacaaatcacttttctttggctttgatcccataccctgcagcagtgaaggaacagaaggccaagtgaggtaaaaatktataaaaaaaatagtatgttatacagagaccaagggaaagtatcccactacttcctggcagcctttgtgatgattccgactctgagatacaaatctagga

SEQ ID NO: 2683 - DNA, 201 bp, Homo sapiens
tgagaagaaagggcagtttggagagagaggtgagtagtggtcattgatggttataggagaatatgaatgtcttaaaatgatatttagctttccagatgacytgccttcttggctcccttacagattgtgggcatgcctgtgatgtaagttcctcatctgtctcctttcagaccatcttctgtgaagtttattcagctcata

SEQ ID NO: 2684 - DNA, 201 bp, Homo sapiens
cctttcagaccatcttctgtgaagtttattcagctcataagtgtgaataaaaaattgctaaatgtgaactcaaagagacagtgcagttttacatctgagtscactgaatgcatcacagaagcagcatgtgcagcaacaggagtccaataggtgagaaaagatatggaagacatgctttgaactttcacaaaccataaaatt

SEQ ID NO: 2685 - DNA, 201 bp, Homo sapiens
tgggcccatgctggtccattaacataatcaaattcatatattgatatggagaattcttggtctttgtagtggttcaaagtccaaaactgaaacattttctktctcatctccctagatgtccacaactgtatatctattgcattctctttgcactaacacaattagaatattctctgtcaaagcaattggtctgtaatgtct

SEQ ID NO: 2686 - DNA, 201 bp, Homo sapiens
ttggaatgtcatgactgtaggaattatattaagcaatttctcattcggttaaatctttcaattttctttgtatacttaccttttcattttaagggcaaagsctttaaaacattttattagattccagatagaaaaaaggaagtggattgtttacttactcagaataattccctggatctatacttcaaatcatgaggcaca

SEQ ID NO: 2687 - DNA, 201 bp, Homo sapiens
agataatttgaaagcactaaactctagaaaatcttttccgctgggcgcggtggctcacgcctgtaatcccagcattttgggaggccgaggcagcggatcayaaggtcaggagatcagaccatcctggctaacacgatgaaactgtctctactaaaaatacaaaaaaattagccgggcgtggtggcaggcgcctatagtccc

SEQ ID NO: 2688 - DNA, 201 bp, Homo sapiens
ctagtttcctaggtgggagcactcaacaaagtacttcagaattctttgccactaaaaacctgccacaataattgttaatagggtgcagcagtttttttttwaatttattttaaaaaattttcttttttctctctgttgcccaggctagagtgcagtggtatgatcatagctcactgcagcctcgaactcctagggtcaagt

SEQ ID NO: 2689 - DNA, 201 bp, Homo sapiens
ctttgtaatgttgattatgatgaactcctggcaccatgacaataaatggcattccaaagaaattccattttcacttatgtaacaggatgttagaatggggmtcctctggtctctgcttcaatggaagcacaagcatggtggtggataatgggtacccacgtgtatctgagacagatccatatatttggattttcaaagaaa

SEQ ID NO: 2690 - DNA, 201 bp, Homo sapiens
tatacttaccttttcattttaagggcaaagcctttaaaacattttattagattccagatagaaaaaaggaagtggattgtttacttactcagaataattcmctggatctatacttcaaatcatgaggcacattttataattctatacattttcaattatcattcccgttttgcttctacttatttttaaaatcctacttaa

SEQ ID NO: 2691 - DNA, 201 bp, Homo sapiens
ctccacgttcattgtggtgttattggcggtgttatgctggccacacacacacacaacacacacactcccacacactccccacttggttttcctaataaccwgaggcaagtttgccagaaattggcttttctactttacaaacagggaaacttagtttctgaaaggttaaatcactggccgggtgcttgccacacacccagt

SEQ ID NO: 2692 - DNA, 201 bp, Homo sapiens
aggctacagtgagctgtgattgtggcactgcactctagcctgggcgatagagtgaggccctgtttcaaaaagagagagagaaaaaaaaagaaaattggtcrtctgcttattagcccttattaggtagtgtatctgtctatagcaactttgggaaaggaaggggtcttggtggtgatttgggcttcactgacttatccttga

SEQ ID NO: 2693 - DNA, 201 bp, Homo sapiens
tcccataatccccaagtgtcaagggagagaccaggtggaggtaattgaatcatggaggtcgtttcccccatgctggtctcgtgatagtgagtgagttctcrcgagatctgatggttttataaggggctcttcctcgctttgcttgacatttcttcctgccttgtgctgcgttgtgtggaaggtgtcttgctttccctttgc

SEQ ID NO: 2694 - DNA, 201 bp, Homo sapiens
ccatagactgtttatgaaacaaaaaatatttcctcttggtgtaagagcacccaccctctaaacttagaagaagacttctcccactgaatagcacttacccrcatgaactggtcatgttcatgaccagaacacatcagtcaatcagatcaaaggagagtatagcacagttagaaggaaggtgtcaagctgttagaccaagat

SEQ ID NO: 2695 - DNA, 201 bp, Homo sapiens
aagaaagtagattttgtataatctgtttgtcttatcaagtttatggccactcccatttgccttcactctgggaatcttggatgaaggtggggaaggcatgsgcctaccctcaactttatgctaacactcctgcccataggaaatgcattaattctgtaagccatcacagaacaggacaagatcttatgacagttttatttg

SEQ ID NO: 2696 - DNA, 201 bp, Homo sapiens
cacctaattccatagactgtttatgaaacaaaaaatatttcctcttggtgtaagagcacccaccctctaaacttagaagaagacttctcccactgaatagyacttacccgcatgaactggtcatgttcatgaccagaacacatcagtcaatcagatcaaaggagagtatagcacagttagaaggaaggtgtcaagctgtta

SEQ ID NO: 2697 - DNA, 201 bp, Homo sapiens
aacatgtttttaacaaagaaggaagaaatatgacaattacagtcctcatttctgcaactggtcacgtggtcatagctggtattgatgactaccttcttctmctacccattctgtattccctttgcctttagcaagcacctcagcaggtcatggtttttttcctggagtgacccaaaccttcattcctgaagggtctgagcc

SEQ ID NO: 2698 - DNA, 201 bp, Homo sapiens; identical to SEQ ID NO: 344

SEQ ID NO: 2699 - DNA, 201 bp, Homo sapiens
tcacgtggtcatagctggtattgatgactaccttcttctactacccattctgtattccctttgcctttagcaagcacctcagcaggtcatggtttttttcmtggagtgacccaaaccttcattcctgaagggtctgagccatctgcagtcctgcctggattgggctgctgtagtttcccattgaccttaatcacagggcat

SEQ ID NO: 2700 - DNA, 201 bp, Homo sapiens
aaattgaataattctgttatttttaccattttacttaggagtaagaattataacctgtttggttctgaaaatgattttagacctttcaggcggatgcaccytttggttcatgtgatatatacctgcatatgcctcattttatgtaattaaaagtttcctgataattatactcccagtttccaataaattcttccaccacac

SEQ ID NO: 2701 - DNA, 201 bp, Homo sapiens
ttttttttttttttacagattttaccttgatttagttgcataatgaatgcaacacctattttccacataagaagataaagactgatttgaaatttttcaaytctgtccatcactgttgtatccaactgacttattagcatacaccttgctgcaagggttttatttttactgagggattcttcgtgtgcctcctcattttca

SEQ ID NO: 2702 - DNA, 201 bp, Homo sapiens
acccatgaagtactgcaatacaagcatggagaaactgagcacattcaagcatgacctgagatgtacaaacaatcaaatcaataatatccaagaattcctcraagtacttgagcatatttaccctggagatctgatcagcatgctcaaatatcctaataacttcactgggaaaaagaattagaggtgttgtgtttgacccca

SEQ ID NO: 2703 - DNA, 201 bp, Homo sapiens
ctctttccctggtgaagtaacctggatctcacataagcttggcagacagctcctatcccttgggctaaggattaataaaaccagccccagcagtgaatccrttatttccttcccaagtcccacactgcttctggcccctggcaaagccactgccctggcacaggttacatctgcccagaagaggcaggtttcctaactggt

SEQ ID NO: 2704 - DNA, 201 bp, Homo sapiens
ttcaacaaatatttatcaatcccttgtctaactactgaacatataaccacaaataaaacagacatggcacctactctcatggagcttacattctggtcagaaaaaaattaacgataaacaagtcaacacctaatggaaatgattctttcagctatgaatttcagtattagtttgtatcatttttagcttcatggtaacaag

SEQ ID NO: 2705 - DNA, 201 bp, Homo sapiens
ggcttttctcatcctcttcaccatgtaaagaagctgtccccaccattaatagttctttcctccatgtctcatctatcttgtatgttcttttccctataccttctcaggcaatctgagaaaagtggttggctcaaggtttgacagagggaagacaaataaatactgcatcttattagtcggggttctctagagtgacaaaac

SEQ ID NO: 2706 - DNA, 201 bp, Homo sapiens
tgccctaatgaatctcctatattccctgcatacccttccttacctctgttgtgtagtagtagactgatttcgtcttgatagtctgggtcaatcaccccagmcagcactgtaacccccttcttagcctgttgacttaaaggtaggaggagcccaaagtgtccaggtggcaatcttaacttccagttcaaaggaatcattgtt

SEQ ID NO: 2707 - DNA, 201 bp, Homo sapiens; identical to SEQ ID NO: 345

SEQ ID NO: 2708 - DNA, 201 bp, Homo sapiens
cttgagtccaaagttaagagaccatatctggtggacactctctacagtcctaaggtagtgcatggtatcacatagcgaggaagttgagcatgctaaagtgytagctcaagtcactcttcctcttcttataatgccaccagttaatccattaactcattaatccatggatagactaatctattcctatggacagatctctca

SEQ ID NO: 2709 - DNA, 201 bp, Homo sapiens; identical to SEQ ID NO: 346

SEQ ID NO: 2710 - DNA, 201 bp, Homo sapiens
atcatgtctttttccacagggtataaggccctatgctcaatagcttgaattagtcacagaatgtctttctgttggcaacttttggattaacatccacaaaytaaaatcagctcaacctcaaactaaagtatctggttatcattaataacttcgccactggacagaatgataaaaaataaaaagagaaaactcattaattta

SEQ ID NO: 2711 - DNA, 201 bp, Homo sapiens
attgcctctctcaaccttctctgcactagggaagctcccttgccccagtctttcacccctgaaaatgtacacctgtgccaagtgtgttcccacctttctcygtttgagagcacctgtcaggtgctaagcccaccactctctgcagtagttctcaagcaaccagagacactaacagatgagagcttcagcagtttggcagcc

SEQ ID NO: 2712 - DNA, 201 bp, Homo sapiens
gcccaaattatttttacttttcttttcttcataataatgtctgtttctgttatcataaatgtagtggtctctgagaagctatgcacttttatatttgttaytcagacctcttgaaaaatgttcaaaattattaatatacacaaatgtatagaaaatatccatatacattaatatacagaaataatttcctctcagtagagg

SEQ ID NO: 2713 - DNA, 201 bp, Homo sapiens
ctgcacatgtggaataaaatttaatataaaactcagtcacctgaataatgacaacttagaaacagtcacactggtcatagagagtatctgtcgacttgaakgagaaggaagcagccatgtctttataggaaactagttcctgttttactatagagatgacagggggttggggttttattttcattatttttttttttttta

SEQ ID NO: 2714 - DNA, 201 bp, Homo sapiens
ttcttagaacaagaatataacccaatatcataatcaaccacctaattccatagactgtttatgaaacaaaaaatatttcctcttggtgtaagagcacccamcctctaaacttagaagaagacttctcccactgaatagcacttacccgcatgaactggtcatgttcatgaccagaacacatcagtcaatcagatcaaagga

SEQ ID NO: 2715 - DNA, 201 bp, Homo sapiens
agtggatccatccccacagcagctggcctgctttctcttgattttcttcagatgacagtaactaatggttttaatatttacttgaatctagagtttcttcrcctttgtttctttagaacttttactcaaagcttaattcttgcctctgtccttgattctgtcttgaaaggttctccaaactttaacttttcaatcatcagt

SEQ ID NO: 2716 - DNA, 201 bp, Homo sapiens
tgttgacttaaaggtaggaggagcccaaagtgtccaggtggcaatcttaacttccagttcaaaggaatcattgttgtgtctcctggtgttcctccctctgsaactaagacttctaggccagcagaacataatattgtgggaacaggaagcaaaattttgctagtgggtcactaggagtaatggtgagtggtgccatcaaaa

SEQ ID NO: 2717 - DNA, 201 bp, Homo sapiens
ataaccctaaaattgaataattctgttatttttaccattttacttaggagtaagaattataacctgtttggttctgaaaatgattttagacctttcaggcrgatgcaccttttggttcatgtgatatatacctgcatatgcctcattttatgtaattaaaagtttcctgataattatactcccagtttccaataaattctt

SEQ ID NO: 2718 - DNA, 201 bp, Homo sapiens
gggtggcttttctcatcctcttcaccatgtaaagaagctgtccccaccattaatagttctttcctccatgtctcatctatcttgtatgttcttttccctayaccttctcaggcaatctgagaaaagtggttggctcaaggtttgacagagggaagacaaataaatactgcatcttattagtcggggttctctagagtgaca

SEQ ID NO: 2719 - DNA, 201 bp, Homo sapiens
aagtaataatagaaataaattgaaaagaaatagaagtaaatgtaaaatgatgtgattaagtccaaaaggacaattgttttgtacagaatggagatgtggcrtagtagcaatacaggcaactaagacttagagattttagtctacagaaaggttaatgtgaatcaacagtaaatggaatatttttgagtgaatgaataaatg

SEQ ID NO: 2720 - DNA, 201 bp, Homo sapiens
gcatggagaaactgagcacattcaagcatgacctgagatgtacaaacaatcaaatcaataatatccaagaattcctcaaagtacttgagcatatttaccckggagatctgatcagcatgctcaaatatcctaataacttcactgggaaaaagaattagaggtgttgtgtttgaccccagtggttacaagtaggacagatgt

SEQ ID NO: 2721 - DNA, 201 bp, Homo sapiens
gtattttttagtatctgctatacttacagtattgaaagacgttgctttcctcaactgtgaattcctgggtgtcttgagtgtttgttaagcatttatatgarcctagtccgtcttttaatgatcgaatgcaattatcgttcatgtggtacaaagaaaggtgaccagaatccctaaatcttgaagtttttctagtcatctatg

SEQ ID NO: 2722 - DNA, 201 bp, Homo sapiens
cagttagaaggaaggtgtcaagctgttagaccaagataggtttttcttcttaaacatgaattccaatcttgagatttgaggattatttagggagacaaaayatgatttacatttcagggagaagggaggatgatgaaggtcacatatgttaccaggacgtggccctagtaggcttctattttccgtcttgagttttaaatt

SEQ ID NO: 2723 - DNA, 201 bp, Homo sapiens
atatcttcattttatttcctttttcctttatcatgtgacataagatttattgacttcatatccatatcagtatttaagtattgttaactctatggaatagmatttggcttggggattggtgtgtttccagttgcatgaaggatagttgtattatgttaggcataattatgaccttattattgtctttatttgaagattaca

SEQ ID NO: 2724 - DNA, 201 bp, Homo sapiens
ttttatttttactgagggattcttcgtgtgcctcctcattttcaccaaaatgtatataaatctcctgaattttcatgacactgatgtggctaaaaattttwaatattttcagttctttgaaaatacaagaaaaaccttcagaaataagaattagccatggttcagaggttctgatttgttttaacaaaaacatcaattatt

SEQ ID NO: 2725 - DNA, 201 bp, Homo sapiens
ctagaaaatagtggatttcatttgatatggcaaagcaacttgttatgttttgtgctaccataaaatgcatcacaatttatagtaattacctgaatattcartttgtttctggtaccctcctctcagtcctacgtgtctgttagagaatcaaagggtactgcttgtctaagaaatatgctaaagagaggacaacacaatatc

SEQ ID NO: 2726 - DNA, 201 bp, Homo sapiens
tggatatggatgactttctcattttctcactatactggaaacacacacataaactatcaatgaaatctatacttcaaaaaatatattttcaaaccttagawacctcttctggtcctggtccatattgaattcctttctaaaatcagaaattaaagctttatcataatactctttttaaaactacgatgttcttaaattttt

SEQ ID NO: 2727 - DNA, 201 bp, Homo sapiens
gaaggtcttttaacttaatcttgtagataaaatggattacaggagctgagtgcccagactgtgaggcagatcagtaacagtttcaacagctatattcaaayggtgttaactagtgcatcagcatcaacctagttctaaatctcagaatcatagaattcttttctgggttccatttgtttcaccatgttactcaatgtcctg

SEQ ID NO: 2728 - DNA, 201 bp, Homo sapiens
caaggcagtgcagggcagggcatcacatggggaggaaactgagcatgcttactcaggtctctcttcctcttctgataaaaccaccagtcacttctgatgayaacccatttatctattaagccatgaatacattaatcagttaataaaggcaggttcctcactatccaatcacatcttaaaggccccacctctcaatagtga

SEQ ID NO: 2729 - DNA, 201 bp, Homo sapiens
tactcaggtctctcttcctcttctgataaaaccaccagtcacttctgatgacaacccatttatctattaagccatgaatacattaatcagttaataaaggyaggttcctcactatccaatcacatcttaaaggccccacctctcaatagtgacatactggggattaagtttcaacataagttttggaggggacatttaaat

SEQ ID NO: 2730 - DNA, 201 bp, Homo sapiens
tgtacatgcacaaacatgtttttaacaaagaaggaagaaatatgacaattacagtcctcatttctgcaactggtcacgtggtcatagctggtattgatgastaccttcttctactacccattctgtattccctttgcctttagcaagcacctcagcaggtcatggtttttttcctggagtgacccaaaccttcattcctga

SEQ ID NO: 2731 - DNA, 201 bp, Homo sapiens
catgaatacattaatcagttaataaaggcaggttcctcactatccaatcacatcttaaaggccccacctctcaatagtgacatactggggattaagtttcracataagttttggaggggacatttaaatcatagcagtaactgaagcagaactactaaaagattgttaaaatattctaatcaccttttcaaaaatatataa

SEQ ID NO: 2732 - DNA, 201 bp, Homo sapiens
aaaaagaccagcctgagactgtaaaggaccaagtgagactgtaaaggaccaagtgagactctagaccaggcatgggaataagtggctgtcaggaaagagaycatctcagtgggaggaattcggttagactcctttagcctgctcactgaccatcaataaaatgggaatgatgaaacccgcaaaggaggtgaggattcttct

SEQ ID NO: 2733 - DNA, 201 bp, Homo sapiens
acactcacattatctcagttattcacacactcgtaagttcacttgcccactcatcccatctcacacacactcaccctaacacacagttctacacacacacrtttacagacccccacactcatccacactctctcacacacacacaatctcacatccatactcacatattcatacccacacacactatctgacatatgtttg

SEQ ID NO: 2734 - DNA, 201 bp, Homo sapiens
catcaccgggtagcttcctcatttggcttccgcttaccgcactgggaattctccaaacgtcatacacagctattttcaaatgccagggcgaggcatacgtsccaatgctaaattgaagtgatgtttgtatttctcatcagtacctgatccactgttcccttctctctgcataaaacaggagttgactgtgagcagagctgc

SEQ ID NO: 2735 - DNA, 201 bp, Homo sapiens
ctcagtctaacaagcacttactgagcacctactgcatactgcatgctgtgttgcatactggggatagaaccgtgaacagacatgacccctgccttgtaaasctggggcaaaatgggaagtgtctagcaatcaagaggctctttagagagggaagcagccgcagaggtgatgtatgtgcacccctgggacgtgcagggatat

SEQ ID NO: 2736 - DNA, 201 bp, Homo sapiens
tgcagagagtgggttgatggacgacagagactcaatcagaagggtgagggggtgaaggatggctgatgacaaattacttaataggtacagtgtatcttatycaggtgatggataccctaacaggagtgacttgacaactacacaatctacgcatgcaacaaaactgcacatgtacctcccataaaatgatacaaatacata

SEQ ID NO: 2737 - DNA, 201 bp, Homo sapiens
aatgtccccatcactccagctctatacgctgactttgacaggcatcccaccctgtgaatcctctgtctgaacaactcttctaattcatgtatgccagaacmcagttactccagctccatccatcttcccaagggtcctttgtcactggtcggtcgtgtgctggggaaagtcatgattgagatgctttccttctctcctcca

SEQ ID NO: 2738 - DNA, 201 bp, Homo sapiens
ctgcctttgctgtcacatggcatctccttgtgtctcttctcctcttcttataaggacaacagtcatatcggattaaaggcttaccctcttccattataacyccatcttgactaattacatctgcaatgaccctatttccaactaaggtctctttctgaggtaccgagtgtcaagtcttcatcatgtctttttgtgaaacac

SEQ ID NO: 2739 - DNA, 201 bp, Homo sapiens
gcatcccaccctgtgaatcctctgtctgaacaactcttctaattcatgtatgccagaacccagttactccagctccatccatcttcccaagggtcctttgycactggtcggtcgtgtgctggggaaagtcatgattgagatgctttccttctctcctccactgagggaagagccaggtcagtgagcccagaaggacagagc

SEQ ID NO: 2740 - DNA, 201 bp, Homo sapiens
ggcagtgaggaagcttgaccttgtcaaagaaacaaataaacccctaggaaaaatcagtgggataaactcttaagaggctgattttgagagaacaaggatgmaggagagtcaatgacaaccatccacactggaagatacccatgaagaagtgggggataaaatccaccagcttctgcattgtgagcctcaccagctgggaca

SEQ ID NO: 2741 - DNA, 201 bp, Homo sapiens
cccttgggaagttttccttcctgctcagaagtggttgctggtggaagagactttccccatatcaggtctgaatctggaagggagataactccaaaacctgyccaaggacagagcaggatttagaaaggagaaagtttctttgccaagctccctcatagaaatccagcaagataaagcccttacccaaatagcaattgacta

SEQ ID NO: 2742 - DNA, 201 bp, Homo sapiens
attttcttctctgtcatgttttaatcttatttgttgtattttttccatgaagaaatttgttttatttgtacagccccattttctagtctttttttttttttcttaaggctactgggttttgtgtcaaactctaaaagatagttcccactctgagatgattaacaacaacaagagaaaattcccatttattcttttggtgtc

SEQ ID NO: 2743 - DNA, 201 bp, Homo sapiens
tttgtggctcaatgaggctatctcaggggcctgccttggcccttggctgggcagagtctgcaggtgagcacagttggcatatcccatgcccagatgtcacsaagtcagagcacagacatctctggggcaggtgccattggcccaaggacagaaagataagtttgagaacctctggcagtcacttggattctgacggaatca

SEQ ID NO: 2744 - DNA, 201 bp, Homo sapiens
atcctgattcataagtgggagctaaataacgtgtacacacggatgcagagagtgggttgatggacgacagagactcaatcagaagggtgagggggtgaaggatggctgatgacaaattacttaataggtacagtgtatcttattcaggtgatggataccctaacaggagtgacttgacaactacacaatctacgcatgcaa

SEQ ID NO: 2745 - DNA, 201 bp, Homo sapiens
acctctggcagtcacttggattctgacggaatcatctttgaatttttgtaggagttggtgctacgtctttagcccaacagggtactgaccatcactgctgyaccccaaggctgaatacttttccaggagggtttctgtcaaagactaataccactcaccctcctttccctccccctctctgttgtaggtggggggcacatt

SEQ ID NO: 2746 - DNA, 201 bp, Homo sapiens
aggcaaggggctctcatcttcaatcccaatcctaccaacccttaagttgagattgctatctaggtgggggaagctgtctttgtgctcagatgcaatcacaraggaacctattccagatgagaagcaggcagcaggagaaacattctcatgggctacatgtcctcttgggaaagaaagaacaaaagaagctgtttcaaagat

SEQ ID NO: 2747 - DNA, 201 bp, Homo sapiens
acagcaaagaaactggtatgtgtttacctcaaagtgcatatcattttggttccaaggcacactttttcaccttttataacatttttttcctcctactccaycctttagggaagaaaccaggcattatttaatcaatgatctatattacagtgaggctccagactatctgcctgcctacaaagactgtgctatttcgatatc

SEQ ID NO: 2748 - DNA, 201 bp, Homo sapiens
gggaagggagaaagagggggaagtgggtactgggagatgatttagaccactgtcagcactgagggaagccagtgacctcatccttttccagtcagaacatyaccgggtagcttcctcatttggcttccgcttaccgcactgggaattctccaaacgtcatacacagctattttcaaatgccagggcgaggcatacgtccca

SEQ ID NO: 2749 - DNA, 201 bp, Homo sapiens
atcctaccaacccttaagttgagattgctatctaggtgggggaagctgtctttgtgctcagatgcaatcacagaggaacctattccagatgagaagcaggyagcaggagaaacattctcatgggctacatgtcctcttgggaaagaaagaacaaaagaagctgtttcaaagatggtgctagagggtagagggggaagaaca

SEQ ID NO: 2750 - DNA, 201 bp, Homo sapiens
ttctcatgggctacatgtcctcttgggaaagaaagaacaaaagaagctgtttcaaagatggtgctagagggtagagggggaagaacacgcttctgaaaagygtgagtatctccaaaatacaaaacactcaaatgaatgcctcccacctgctctccaaatagacagattctgcccatccttcaaaacccagctcatgctcct

SEQ ID NO: 2751 - DNA, 201 bp, Homo sapiens
gctacacaagctaaagctggtaacccaaccctgaagaccctcacgagctgctgtgggggatcttggcaaccacccttccttgccagccaggtcctcactgytggagcaggtaagcttattcatcttagtttcctacatcttcacctccatcagctgcttcgctaccctggatgggccaagcacggggactggactacagtg

SEQ ID NO: 2752 - DNA, 201 bp, Homo sapiens
aaggttcttcacatcccttgttagctgtattcctaggcattttgttctctttgtagcaatcgtgaatgggagttcattcatgatttggctctctgtttgcytattgttggtgtaaaggaatgcttgtgattttttccacactgattttgtatcctgagactttgcggaagttgcttatcagttcaaggagattttgggctg

SEQ ID NO: 2753 - DNA, 201 bp, Homo sapiens
cagatcttgttgtctttttgccccccagtggaatccaggcgatcccctgcgatgattctcaagctctaatttgagcagctggacctcttgaactctggtakgtggaagtggagctgcttgccagcctttagagaagggtgcagcagagattcgccctccctcagttcacacccactttgttccagggtggggcgtccattg

SEQ ID NO: 2754 - DNA, 201 bp, Homo sapiens
agattcgccctccctcagttcacacccactttgttccagggtggggcgtccattgcaaacgacaaaaccaacaagacaaaatacaatcacgggcagtacamctcaactcgctcaaacaaccaggaattttacaatctcacagcatggaaaatccaaagacaggtggctctgttgacttcacgtcctcacaggatgaggctg

SEQ ID NO: 2755 - DNA, 201 bp, Homo sapiens
tacacaagctaaagctggtaacccaaccctgaagaccctcacgagctgctgtgggggatcttggcaaccacccttccttgccagccaggtcctcactgctrgagcaggtaagcttattcatcttagtttcctacatcttcacctccatcagctgcttcgctaccctggatgggccaagcacggggactggactacagtgca

SEQ ID NO: 2756 - DNA, 201 bp, Homo sapiens
tggataccctaacaggagtgacttgacaactacacaatctacgcatgcaacaaaactgcacatgtacctcccataaaatgatacaaatacatatataaagmaagctttcaaagttagactcggaccctacttccacccagatgtagtgcaaggtggcagagtaggctctactgccaccagccactcccaaccccccgcgtc

SEQ ID NO: 2757 - DNA, 201 bp, Homo sapiens
actaataactttacctccttctttccaatatttatgccacctagccctttctcctatttaattacattgtcaaggacctcaagcaattaacatttttatcytagtcctgacttcagtgtgaaggtttttaagtgttacaccattatgcataatcctggtttgcgtatacagatatgttctatcaaattaagtaaacatctg

SEQ ID NO: 2758 - DNA, 201 bp, Homo sapiens
agaaaggaggcctttgaagaaaaggcgagtgatcagaataaagagagggagcgggggtggggagggggcgggaggtgagtggggagcccaggctaggaggrcaggctttgatctccccacacaggcctgtgccttttgcgttttatttcactgttgggatgaggggagctttttgcaagggcgtgatgtaaatgcttaagg

SEQ ID NO: 2759 - DNA, 201 bp, Homo sapiens
ggctttgatctccccacacaggcctgtgccttttgcgttttatttcactgttgggatgaggggagctttttgcaagggcgtgatgtaaatgcttaaggaarggaggcagggtgcaagctctcaaaactacagatgcagacacaggtgccagggatgcctcctgtctgctcccatggggcatcacccagagcaggttagtaa

SEQ ID NO: 2760 - DNA, 201 bp, Homo sapiens
gatggactcaggctctgaccctccttgccccagaagctccaatggtgggaggaggaacacccctggagctgataaactgggtgactcctcagagccttgcwtcttgtgggctcatgacgtcaatcatgctgccccacccacagcccttcctccctccccacacctgacatgcgtacagacactcctcatgaccctcccttc

SEQ ID NO: 2761 - DNA, 201 bp, Homo sapiens
cgggagctctccaacccctgcagccctcatcggcccgggatgcttgacacacacaagttatgccttgccaaaacccatcgtctgcactcaggacagggtayggctgtgcagccctgaatgagataactaagtggagaatggtggatgtctaaactcagtgcaggctcagttaggaaaggagaaggctttcctgcccaggat

SEQ ID NO: 2762 - DNA, 201 bp, Homo sapiens
taaggagtctggattttctcccagagagcctgggatgccaccgaaagatatgatgtaagggtgtgacatgatcaggtttgtgctttagaaagaggactccsattgcaaggaggagagatggaattgtggttgggaagtcatccaagactgaggatgagagaagaatccatgcagacggttgttacagtaatgatgggtgcc

SEQ ID NO: 2763 - DNA, 201 bp, Homo sapiens
atgtatttccatatggccaaaaagaaccgtttctatggggaagaagtgagagatgatcaaagagaggagtgggaccttgcacatcatgctaaggagtctgsattttctcccagagagcctgggatgccaccgaaagatatgatgtaagggtgtgacatgatcaggtttgtgctttagaaagaggactcccattgcaaggag

SEQ ID NO: 2764 - DNA, 201 bp, Homo sapiens
aagtagagggaataaaatatacacaggttaggccacttaaaagacaaagtacatttctccaatcacatgtatttccatatggccaaaaagaaccgtttctwtggggaagaagtgagagatgatcaaagagaggagtgggaccttgcacatcatgctaaggagtctggattttctcccagagagcctgggatgccaccgaaa

SEQ ID NO: 2765 - DNA, 201 bp, Homo sapiens
gctcaggtgagggcctctaactctgggaggagcataccccacaccacttcaggtgcttgagacagttgctctgtgcccagatagatgggcaagcattcagsctaagtccccagtgggatggacaaacccaccagcacaggcctaggggagcaggccactttgaagctgtcgagatggggaggatcctgtatgtttgtgtga

SEQ ID NO: 2766 - DNA, 201 bp, Homo sapiens
gtacaccattatcataagtgaaatggctcagaaacaaagtcaaatactgcatgttctgacatataagtaggagctaaataacgtgtacacatggacacacraagtggaataagaaacagtggagacttggaagtgtgagagggtgggaggtggatgaaggataagaaattacttaatgggtacaatgcacactattggggt

SEQ ID NO: 2767 - DNA, 201 bp, Homo sapiens
acagcctttgagtcacatttactctttccttcccatccttaagaagactcagcccttgtcctcgggatgcctcagggtagaaaataaagcagagtggatayggactccagcttcaccccccaccacacttactagcccttggcaagttaatcgcctgccgccacgctcagttttatttactgtaaagtgagcgtgtaactc

SEQ ID NO: 2768 - DNA, 201 bp, Homo sapiens
tttgatgttctgaacagttttgagaaatactggtcagatattttcaagaatgttcttcaactgaaatttttctaatgttttcttcatgatcagagtgaggktatgagtttgggggtggaagatcacagctgaagagccattcttggcacaccctatcaagggtacacacaattgatgtgtgtaccttatccctctcagtgt

SEQ ID NO: 2769 - DNA, 201 bp, Homo sapiens
gcagtgctccagtgctgagaaatgaacacttccttttacctgacagcatccccgtgacccagacctgctctccagttcacctttgtatcctgcctagatcyctgtaccaagttcctgttctgatacactatcttttccttgtgtgtttcttaggattccagttagcctttgcatgccactcagtcctagccctgggggaga

SEQ ID NO: 2770 - DNA, 201 bp, Homo sapiens
acaaagtggaataagaaacagtggagacttggaagtgtgagagggtgggaggtggatgaaggataagaaattacttaatgggtacaatgcacactattggrgtgaaggctacactaaaagtccaaattttacaactatacaatatatccatttaacaaagctacacttgtacccttctaaacctataaaaatttaaaaaga

SEQ ID NO: 2771 - DNA, 201 bp, Homo sapiens
ttcttgactgtgacaatttctcagactttcctcgtttttgatgttctgaacagttttgagaaatactggtcagatattttcaagaatgttcttcaactgamatttttctaatgttttcttcatgatcagagtgagggtatgagtttgggggtggaagatcacagctgaagagccattcttggcacaccctatcaagggtac

SEQ ID NO: 2772 - DNA, 201 bp, Homo sapiens
gtgaaagaaggatcccaaccaccagacctaggagggatctcatccatgctcgctccaccagaagaggttgcaggttgtgcccagaagatctcttacctccmgagactccacacaacagaaagcattcccttgaccccctaacctttcagagaataagtatttgctaagatgctgcatgtactagggcagagccaggcatac

SEQ ID NO: 2773 - DNA, 201 bp, Homo sapiens
tttttgcattatttacatgcattaattttaatcgttaaaacaaccctcaagttaaatatcattatctcattttacagatggaatactgaagtacagactayttaagtgatgtggccaaaattacacagccagatatgtgggagagctaggattgaaacttctgtttaaccctggaaataattaaacaatataaaacaagat

SEQ ID NO: 2774 - DNA, 201 bp, Homo sapiens
tgacatccagtgttcttcctcattcctgcctcttggatcctcgagatttcaaaggtgagaaatcttctctgagctctctataagcaggcttctgattaaaytggagaagttaggcgatgaacaccaatacaaagattttcatattttttattataaatagcccaaatatttggtcccatttccagtttaaatgggtaaacc

SEQ ID NO: 2775 - DNA, 201 bp, Homo sapiens
tatgataatgatacaaatgcatgacaataaatgatgcagcatgaaaatgctcagtgagcccacaagatttgtgatggtttcaaactgtgtggtgggaggasgtgctcctgaaaattctcactttgcaaacatttgttccttgatgtaacccaccaccactatgaccattgtcattcaccaattcaccaaaaatctgatgag

SEQ ID NO: 2776 - DNA, 201 bp, Homo sapiens
ttcttgttctatgtaaaagacctggagtctgacccctttgtccccatgggtaagttttatctctgggaacgaagctttgtggccccaaacgtttctgggaycttagtgctcactgagaggtagagacgctatggaaaatgaatggatgcttgtaagtaggagagctgaccccttgccctctctcctgacacagcagttggg

SEQ ID NO: 2777 - DNA, 201 bp, Homo sapiens
cctggagtctgacccctttgtccccatgggtaagttttatctctgggaacgaagctttgtggccccaaacgtttctgggaccttagtgctcactgagaggyagagacgctatggaaaatgaatggatgcttgtaagtaggagagctgaccccttgccctctctcctgacacagcagttggggacctctggctctagacaca

SEQ ID NO: 2778 - DNA, 201 bp, Homo sapiens
agcgtgagtatctccaaaatacaaaacactcaaatgaatgcctcccacctgctctccaaatagacagattctgcccatccttcaaaacccagctcatgctsctcctctgttatgcctcgaaaatcacccaggcaccagggagcctcctcctcaggccccagttgttctcactttttagaccgtgggactttatggtttccc

SEQ ID NO: 2779 - DNA, 201 bp, Homo sapiens
tgttctcactttttagaccgtgggactttatggtttcccttgtaatttgccttatccagtcatctaataatttatccttgagtataccttttaacttctcyactaggagggcagggcagttttatggctacctttttgtaatagggtacatgtgggtgtatgtaaaatatatacatataataatatattatatgtaagtcc

SEQ ID NO: 2780 - DNA, 201 bp, Homo sapiens
ttagtgcccgcttgggaagcttttccttattgatttctgctaggcttcagccccttgccaatcaacggcttggagacagaagactggacccagagactggytaacattccttttcagatttttaagattctggggatacttttctagggatctcctattcatttaggcagagatgagttgttgtttttttaagcctcctgc

SEQ ID NO: 2781 - DNA, 201 bp, Homo sapiens
agacaggtggctctgttgacttcacgtcctcacaggatgaggctgttctttgttttgtttctgatgctctgccacattcagaatgttcaagatgagggtawcttctccaggtctctcccatcggggtcacaagacagctgccattcactgagaaagacatggagtcgttcattcttgccatctttttaaaaaacagaactt

SEQ ID NO: 2782 - DNA, 201 bp, Homo sapiens
catagattataatgcctgtgactccagcctcaactcttgtctttcacacatgacttctcatttaaaagaacaccttaatcagctgtaaaacaaaagccaargaggtgtgccaagagcttggagaaaaagaaaaagtctgacctagaatgttggaataattaaatccactgctgctcttccaaattacaaattggaatcacc

SEQ ID NO: 2783 - DNA, 201 bp, Homo sapiens
tatgcactaaggcctggcaaccttagcgacaatgagaataattttgtcaaccttaaaaatgatattatcaaccttaataataagagtggggagagggccargcatggtggctcacacctgtaatcccagcactttgggaggccgaggcagatgaatcacctgaggttgggagtttgagaccagtctgaccaacatggagaa

SEQ ID NO: 2784 - DNA, 201 bp, Homo sapiens
atacatatatgtttagctatcttagatccacagggaagctatgggaacagtaaaagagccagatgagggggatcttcatactcgtagctgggttggtttgmaggatcagaaaaagaccagcctgagactgtaaaggaccaagtgagactgtaaaggaccaagtgagactctagaccaggcatgggaataagtggctgtcag

SEQ ID NO: 2785 - DNA, 201 bp, Homo sapiens
cccacctccctctgtgcagcgggcatcaccatgccagctcccagggggtacacactgtggtgccgtggacccagctccactgccccattcccccagggggmggcttcagttctgctcaagctctgccatcccctctcacctcctgctgccaaatctctgctgctagatctctgctgctgaccccacctgtctagggtgggg

SEQ ID NO: 2786 - DNA, 201 bp, Homo sapiens
cagatattagaacacatacagttattttcaatgcactaagccacacagataaaaatcctggccctgtctctctctgggagcttacagaccaaattctgctmgaattcaggatagcattctgtgcattctccctcatagagtgagaagatgaatctgctagggaaggaaacacctccccactcagcaaatcaagagcaagaa

SEQ ID NO: 2787 - DNA, 201 bp, Homo sapiens
gccaagctaacacagaaagctgtggcttttgttttgactataacttcctctcgatatttcaagactctgagctttttctgtgtaccaaaatcttgttgagmgcagcaggcgatctggagagaaagaggtggaggaggaaaaagtaccatgtctccagagctggagggcccaagataaaaagcaatgcctttggcttcctta

SEQ ID NO: 2788 - DNA, 201 bp, Homo sapiens
caattgctaagatctcaaacatgctcaaggtatgattaatttcactaatccttgtggacttctgtcatccaggtaaaaaataacaataataattgtcctcyggtgtctatatgccagcaagcactgcaggccaaaatcaaccctgggtgattatgaaagtggctctggtgaactcctgcctgtgcctcctgcagccacgtg

SEQ ID NO: 2789 - DNA, 201 bp, Homo sapiens
tcctctcagacctacttaccaagctgtgcttcctggtccaggactgggtccacttggagaacagaaggcaccctctttatctacccccaaatgtcctatgsgctagcaatggcttttcctgttcccctggcccattccttgactgggaatatttttaaagcaagaggtactttactctttggggtactgtcacaggagatt

SEQ ID NO: 2790 - DNA, 201 bp, Homo sapiens
cagcctctatggtgacttaaaagtatcaagtgctcagtgaaagagaggatattgatgatttacttctcctgccttcattggtcagctcactcatctgatarcctttgggatctggtgtaaattcataccccatagggaactatagggccactcctgctgtgctgagcagagggctggctgggcagggccacctggcctttg

SEQ ID NO: 2791 - DNA, 201 bp, Homo sapiens
tcaaaaaaaaaaaaaaaaaaaaaaaaagaacttatttatgtaaccaaataccacctgttccccaaaaacctatggaaataaaaaataaaaatagtcttaarattaaaaaaaagaatgatgcatagcaatgtgtttaatagccatttatatccacaaataaattaatcaacagtgttcataagttcttgaatatgcaaagaa

SEQ ID NO: 2792 - DNA, 201 bp, Homo sapiens
tccggctatcacccacctccctctgtgcagcgggcatcaccatgccagctcccagggggtacacactgtggtgccgtggacccagctccactgccccattyccccagggggaggcttcagttctgctcaagctctgccatcccctctcacctcctgctgccaaatctctgctgctagatctctgctgctgaccccacctgt

SEQ ID NO: 2793 - DNA, 201 bp, Homo sapiens
caatcacgggcagtacacctcaactcgctcaaacaaccaggaattttacaatctcacagcatggaaaatccaaagacaggtggctctgttgacttcacgtyctcacaggatgaggctgttctttgttttgtttctgatgctctgccacattcagaatgttcaagatgagggtatcttctccaggtctctcccatcggggtc

SEQ ID NO: 2794 - DNA, 201 bp, Homo sapiens
gaagggaggcagggtgcaagctctcaaaactacagatgcagacacaggtgccagggatgcctcctgtctgctcccatggggcatcacccagagcaggttaktaaagggctgccctgggaggaacctcttcccgtgtccacccctccttcctcaaacatccatgctttcacattcctaccacattcactcacactatctcac

SEQ ID NO: 2795 - DNA, 201 bp, Homo sapiens
tctccccacacaggcctgtgccttttgcgttttatttcactgttgggatgaggggagctttttgcaagggcgtgatgtaaatgcttaaggaagggaggcakggtgcaagctctcaaaactacagatgcagacacaggtgccagggatgcctcctgtctgctcccatggggcatcacccagagcaggttagtaaagggctgc

SEQ ID NO: 2796 - DNA, 201 bp, Homo sapiens
ttaaaattttagagagaggcaaaagacccagaatagtacctgcactcctatgtttattatagtactatttgcaacagcaaagatgtggaatcaatgtaagygcccatcaatgaatgattagattttctaaaatacagtatgtgtgtatatatgtgtatgtgtgtgtgtatgtatgtatgcatgtatatatgatggaaaatt

SEQ ID NO: 2797 - DNA, 201 bp, Homo sapiens
tttggttttttatttattttttacagatgggatcttgctttgtacagtattgtgatcataactctctgcagttttgaactcctggcctcaagcgattgttytgcctcaacctcccaactagatgagactacaggcacacaccaccaggcccagcctaactgcactttgatgctaactgactctccatattcataccttcta

SEQ ID NO: 2798 - DNA, 201 bp, Homo sapiens
caaactgatatagaggatattaaagaatcatataatcttatccaattatatgtgtatagatgtgaaaacctgaaaaaaagggctcattttcttgaaaaacrtaaattactaaagtaaattacagaggagacacaccacttaaacccatcatttaccaaagaagaaatttgattattattattcttttttaagagatggggc

SEQ ID NO: 2799 - DNA, 201 bp, Homo sapiens
tttaagagatggggctcttgccagatgccgtggctcatgcctgtaatcccagcattttgggaggctgaggagggcagatcacttgaggtgaggagtttgasaacagcctgaccaacatggagaaaccctatctctactaaaaatacaaaaatcagccaagtgtggtggcacacacctgtagtcccagctactcaggaggct

SEQ ID NO: 2800 - DNA, 201 bp, Homo sapiens
ggaggctaaggcaggagaatggcttcaacctaggagggagaggttgcaatgagccaagatcacgccactgcactccaacctgggcaacagagtgagactcygtcttaaaaaaaaatagagagagatggcggtctcactatgttccctaggcttgagtgcagtggctattcacaggtctgatcataatgcactgcagccttg

SEQ ID NO: 2801 - DNA, 201 bp, Homo sapiens
taaaccatgtttacatctatcatattagccacaaataaaacacataataacactatttggcaagattaggacaaaccagctgttttcatgaattctaagtyattgtgcaagtttatgacattttgaagggcaattttatgatatttataaaagttaaaatgcatttatcttttgagccaatgattcattactaaacctact

SEQ ID NO: 2802 - DNA, 201 bp, Homo sapiens
gacattttgaagggcaattttatgatatttataaaagttaaaatgcatttatcttttgagccaatgattcattactaaacctactctgcagagtaacatgytcatgcaaaattaatgaatatgttggatgattaatcatagcatcttttgcaacaggcaaagattgaaaaaaaaatctaaacacccacaagaagggcactg

SEQ ID NO: 2803 - DNA, 201 bp, Homo sapiens
acacaagttatgccttgccaaaacccatcgtctgcactcaggacagggtacggctgtgcagccctgaatgagataactaagtggagaatggtggatgtctraactcagtgcaggctcagttaggaaaggagaaggctttcctgcccaggatctggtactcacaataaatgctcgatgaatggctgttggctctccttccct

SEQ ID NO: 2804 - DNA, 201 bp, Homo sapiens
tactatccaaagtaatctacagattcaatgcaatccttatcaaaataccaatgtcatttttcacaggaatagaaagaatataaaaaagtcatgtggaaccwaaaaaagagcctgagtagccaaagcaaccctaaacaaagaaacaaaataaagctggaggcataacactatctgacttcaaaatatattgcaaggctatag

SEQ ID NO: 2805 - DNA, 201 bp, Homo sapiens
ggagcttacagaccaaattctgctagaattcaggatagcattctgtgcattctccctcatagagtgagaagatgaatctgctagggaaggaaacacctccmcactcagcaaatcaagagcaagaaccatctgtgttttccagaaggtcccagcaaaatgtaagaacaagagaatcttttgacatttcacatttctcttccc

SEQ ID NO: 2806 - DNA, 201 bp, Homo sapiens
cacacagaaatgataaatacattgagtagatgaataccctaaacacatcaacttgaacattacacataccatgcatgtaacaaaatatcacatgtaccccrtaagtatgtaaacatattgtgtataaagaaaaataaaggtatacagattggtagtaagaaataaaactttctgatctcagatgacagggttcctatgtag

SEQ ID NO: 2807 - DNA, 201 bp, Homo sapiens
tgttcataagttcttgaatatgcaaagaattgctctgaaacatgcaagaagcataaagcaggttaccattagagagaactgagcagctgagagacagggtrcacgtgagactcaccatcttccacataccattttctactatttaagtgtcataccacatacaaaacactaaatgcccattgatctttgacaaagtggcaa

SEQ ID NO: 2808 - DNA, 201 bp, Homo sapiens
ccctcctcgtgtgactccagaggaagagtcccttgccctggcctggcctctggttcctcacctgaaaaggtgaaggggattgtaccgcagcatcccaactrtctccttcagcaccgagtggctgtctgactcctccggtcagaggtaccagaataggctaaatatccccagcggctgccatcccagcgggtgggatgagag

SEQ ID NO: 2809 - DNA, 201 bp, Homo sapiens
agcctcccaagtagctgggattacaggcacacaccaccacatctggttaattttgtattttttgtagagatggggtttctccatgttggtcaggctggtcwcaaactcccgacctcaggtgatctgcccaccttggcctcccaaagtgctcggattacaggtgtgagccaccatgtccagcctctatggtgacttaaaagt

SEQ ID NO: 2810 - DNA, 201 bp, Homo sapiens
gacttggtcttgttcattttaaaacttcaatctcaaactcagatcaaagctcccctcctgtggctatagcagcctggtgtgtgtgtgtgtgtgtgtgtgtstgtgtgtgtgtgtgtgtgtgtgtgtgtgtgtgtgtgtgttagggatgaagaggattgtgttgctagattttgcaaataaaaatatagggtgcctggtgaa

SEQ ID NO: 2811 - DNA, 201 bp, Homo sapiens
ttttttctctttcatccagccagccccgggacaaaatccaaatgttggtcaaagtcctttttctcccaggtagggagactgtgagcctgggctccagccasagaggatgtgctgctgtccagggcccacaggaaggctgcacggttcatgcatcctggtgtccccatgagaatgcatctcattgcccaggtgctcaaggct

SEQ ID NO: 2812 - DNA, 201 bp, Homo sapiens
attaacctgcttatagccaccagtgagggctgaagtgtgcacttccaagccacctatttatggctgttgacaaagaaagcaccctgccctcccagcaacarggccttagtatagccgctgctcccacccaggcattctctcaggggcctgtggatcaccctgctcctgcctactacagcacagccagtgtccacacatacc

SEQ ID NO: 2813 - DNA, 201 bp, Homo sapiens
aaaggagaaggctttcctgcccaggatctggtactcacaataaatgctcgatgaatggctgttggctctccttcccttgagaggtcttcagtgagggagaygaacatacgtggcttagaggcaggaaagggtgtgaattgcacagacaaatggcatcatgcgctaaagagggcccagcttccctaggcccggcggacttgg

SEQ ID NO: 2814 - DNA, 201 bp, Homo sapiens
tggatgtctaaactcagtgcaggctcagttaggaaaggagaaggctttcctgcccaggatctggtactcacaataaatgctcgatgaatggctgttggctytccttcccttgagaggtcttcagtgagggagatgaacatacgtggcttagaggcaggaaagggtgtgaattgcacagacaaatggcatcatgcgctaaag

SEQ ID NO: 2815 - DNA, 201 bp, Homo sapiens
acggctgtgcagccctgaatgagataactaagtggagaatggtggatgtctaaactcagtgcaggctcagttaggaaaggagaaggctttcctgcccaggrtctggtactcacaataaatgctcgatgaatggctgttggctctccttcccttgagaggtcttcagtgagggagatgaacatacgtggcttagaggcagga

SEQ ID NO: 2816 - DNA, 201 bp, Homo sapiens
  misc_feature (1)...(201): n = A,T,C or G, or insertion/deletion polymorphism (see Tables 1-2)
aagaaaaagatacttgcacacgcatgtttatagcagcacaatttacaattgcaaaaatatggaaccagccctaatgcccattaatcaacgagtggataaaraaattttggcgtatatataatcaaaatttctcaatactatgtgtnnnnnnnnnnnnnnnnnnnnacacacacacacacacatatacattatcatacacat

SEQ ID NO: 2817 - DNA, 201 bp, Homo sapiens
tgactttctggttcactctctggcctctcaattgctaagatctcaaacatgctcaaggtatgattaatttcactaatccttgtggacttctgtcatccagrtaaaaaataacaataataattgtcctccggtgtctatatgccagcaagcactgcaggccaaaatcaaccctgggtgattatgaaagtggctctggtgaac

SEQ ID NO: 2818 - DNA, 201 bp, Homo sapiens
tcacacatacacactcaccattaacctacacacactatctcacactcatacacactcaattcacacaccactgtatctcacagtcgtacacatattcgacrttcacactcacacacactgtcaaacacacactcagaattcatacttacacattatctcagtcatacacactaacacactcaacatttacaatctcacact

SEQ ID NO: 2819 - DNA, 201 bp, Homo sapiens
atcacacgcagttatcatgcaccctcagaattcagccacacactagctcacacataatctcacagtcgtacatacattcagaattcacactcacacacactaacaggcacacactcagaattcacacacactaactcacagtcatacacagtcagaattcactcacagtctcacacatacacactcaccattaacctacac

SEQ ID NO: 2820 - DNA, 201 bp, Homo sapiens
tatcacacgcagttatcatgcaccctcagaattcagccacacactagctcacacataatctcacagtcgtacatacattcagaattcacactcacacacactaacaggcacacactcagaattcacacacactaactcacagtcatacacagtcagaattcactcacagtctcacacatacacactcaccattaacctaca

SEQ ID NO: 2821 - DNA, 201 bp, Homo sapiens
ttatcacacgcagttatcatgcaccctcagaattcagccacacactagctcacacataatctcacagtcgtacatacattcagaattcacactcacacacactaacaggcacacactcagaattcacacacactaactcacagtcatacacagtcagaattcactcacagtctcacacatacacactcaccattaacctac

SEQ ID NO: 2822 - DNA, 201 bp, Homo sapiens
gtctccagagctggagggcccaagataaaaagcaatgcctttggcttccttaatatggcctctttgctccctgaagtgagcaatagctttgctcatcttcrcccctctgccctttcttttctgcactgagggtactacatctgctcatgcacagtcactaacaaagattcctgagtgatctgacatcctctcagacctact

SEQ ID NO: 2823 - DNA, 201 bp, Homo sapiens
ccctgcccagcctgcccatttcctgtaggccctaagcctccattcaggtcaagtttcctcactgcccctgctctggagcttctccccacctccccttacaygcctgcccacagctggctacaataataccctaagccgaggcagtaacagctaataacagcttcacaagcagaagatcttggtgagatcttaactcaaagt

SEQ ID NO: 2824 - DNA, 201 bp, Homo sapiens
ctttaatttgattttttcttctgatgctgtgagaatcagcatattttaatattgaggaatcatttgtatttccttttatgtgagctcttcatagctcttcytcatgttcaacttggacgactaaggtttgtttgtcttattggtgtttaggtacacattatgtgtgtgatatgtcacaagtattttcttctctgtcatgtt

SEQ ID NO: 2825 - DNA, 201 bp, Homo sapiens
aatatatggggaatgtgctaggctcagctaattacactttggttttttatttattttttacagatgggatcttgctttgtacagtattgtgatcataactmtctgcagttttgaactcctggcctcaagcgattgttctgcctcaacctcccaactagatgagactacaggcacacaccaccaggcccagcctaactgcac

SEQ ID NO: 2826 - DNA, 201 bp, Homo sapiens
gcccgtggctcacctcttgctgtgcggcccagttcctaacaggccacagacctgcacccacctcctgctgtgcagcccagttcctaacaggccacagacckgcacccacctcctgctgtggagcccagttcctaacaggccacagactggcaccactctgtggcctgaggattggggacccctgctcttaaatattctttg

SEQ ID NO: 2827 - DNA, 201 bp, Homo sapiens
tgcccgtggctcacctcttgctgtgcggcccagttcctaacaggccacagacctgcacccacctcctgctgtgcagcccagttcctaacaggccacagacytgcacccacctcctgctgtggagcccagttcctaacaggccacagactggcaccactctgtggcctgaggattggggacccctgctcttaaatattcttt

SEQ ID NO: 2828 - DNA, 201 bp, Homo sapiens
gtaaatacagatgaagcttcactcacatgcccgtggctcacctcttgctgtgcggcccagttcctaacaggccacagacctgcacccacctcctgctgtgsagcccagttcctaacaggccacagacctgcacccacctcctgctgtggagcccagttcctaacaggccacagactggcaccactctgtggcctgaggatt

SEQ ID NO: 2829 - DNA, 201 bp, Homo sapiens
gaggcggagctcaggcggtaatgccagcgatagggagcaactgtaaatacagatgaagcttcactcacatgcccgtggctcacctcttgctgtgcggcccwgttcctaacaggccacagacctgcacccacctcctgctgtgcagcccagttcctaacaggccacagacctgcacccacctcctgctgtggagcccagttc

SEQ ID NO: 2830 - DNA, 201 bp, Homo sapiens
agcctgattaaggattccaggcaactgactggtgttcccagacaagcaaaagtaaactccctcatctgcaagccaattcacataacagattccctaataargcatgaggaaaagctgccctggcacatctgttttgtcatgcatctccagcaaatcctgggacaacaggagaggcagaggcaatgctggtcccaaatatac

SEQ ID NO: 2831 - DNA, 201 bp, Homo sapiens
cccagaacacatgcacgtgtcatgctgctcagcatgctgttctcatgagctccctggtacacccgctgttcttaaatgtccccatcactccagctctataygctgactttgacaggcatcccaccctgtgaatcctctgtctgaacaactcttctaattcatgtatgccagaacccagttactccagctccatccatcttc

SEQ ID NO: 2832 - DNA, 201 bp, Homo sapiens
gatagtactgctgccccaccatatgcactggagttgtttttctgcagcaggtgcgatgcttttcacggctctatccatcctctcctccccagataccctgsaaccacccatggcctgcatctgtagaatgagagccagcgagctatgctccctctgacactatgaaggagtttggtttgatgataaaagcctacaagaaaa

SEQ ID NO: 2833 - DNA, 201 bp, Homo sapiens
accatcccttccatcaatttgtacccatgggatagtactgctgccccaccatatgcactggagttgtttttctgcagcaggtgcgatgcttttcacggctstatccatcctctcctccccagataccctggaaccacccatggcctgcatctgtagaatgagagccagcgagctatgctccctctgacactatgaaggagt

SEQ ID NO: 2834 - DNA, 201 bp, Homo sapiens
gccactcctgctgtgctgagcagagggctggctgggcagggccacctggcctttgagactgcctggtagtctgactctcattgcccgggcccatctcatcygtgctcgcttgccaggaatcccgagggtcctagaatcccagactctacatcctacaagagttggaaattactctttctgctgaatttactctgcaaccta

SEQ ID NO: 2835 - DNA, 201 bp, Homo sapiens
cctggtttagtcttggtagggtgtatgtgtccaggaatttatccaagtttttctagattttctagtttatttgcatagaggtgtttattgtattctctgayggtagtttgtatttctgtggggtcagtggtaatatcccctttataattttttattgtacctatttgattcttctctgttttcttattagtctagctagtg

SEQ ID NO: 2836 - DNA, 201 bp, Homo sapiens
ttttggatggcgccatatggatggtggctaccatcttcctctgtataatttaaatttctcctaaacaatgctttgaatatttttattgatttgttttttgraactgcccacagtatctagcataagcaaggcacataatccatgttcattaaaaatttcattgattttttttttctaaaatgtcccagggattgttcgctg

SEQ ID NO: 2837 - DNA, 201 bp, Homo sapiens
cggtaaaactccgtgtctctactaaaaatacaaaaattagctgggcatggtggcaggcgcctgtagtcccagctactcgggaggctgaggcaggagaatcrcttgagcctgggaggcagaagttgcagtgagccgagatcgagccactgcactccagcctgggtgacagagtgagactctgtcaaaaaaaaaaaaaaaaaa

SEQ ID NO: 2838 - DNA, 201 bp, Homo sapiens
caaatgttggtcaaagtcctttttctcccaggtagggagactgtgagcctgggctccagccagagaggatgtgctgctgtccagggcccacaggaaggctscacggttcatgcatcctggtgtccccatgagaatgcatctcattgcccaggtgctcaaggctgccaggctggaggagtgcacatgatggtgaagacgacc

SEQ ID NO: 2839 - DNA, 201 bp, Homo sapiens
acagtaagcctttgttgaatgaattgttgaaggaatgcatgaatgtgtagggggtgaatgagtgatattgattaaatactccctaggtatcaggcattgtkaaagtgctttccaggtattaaccccttctatcttcaccctgactgagaggcaggcgtttttgtgatccccatgacataagagcaggagcctgtcatgact

SEQ ID NO: 2840 - DNA, 201 bp, Homo sapiens
ttttctcccaggtagggagactgtgagcctgggctccagccagagaggatgtgctgctgtccagggcccacaggaaggctgcacggttcatgcatcctggkgtccccatgagaatgcatctcattgcccaggtgctcaaggctgccaggctggaggagtgcacatgatggtgaagacgaccttggtcactggagctttcca

SEQ ID NO: 2841 - DNA, 201 bp, Homo sapiens
aagcctttgttgaatgaattgttgaaggaatgcatgaatgtgtagggggtgaatgagtgatattgattaaatactccctaggtatcaggcattgtgaaagkgctttccaggtattaaccccttctatcttcaccctgactgagaggcaggcgtttttgtgatccccatgacataagagcaggagcctgtcatgacttgctg

SEQ ID NO: 2842 - DNA, 201 bp, Homo sapiens
gtgccacaggcctgttgatatcctgtctcaggtttcaaaacacagatgaaggggccaggcatggtggcttacgtctataatcccagcattctgggaggccraggtgggtggatcacttgaggtcaggagttcaagaccagcctggcaaacatggtgaagccccatctctactaaaaatacagaaattagccaggtatggtg

SEQ ID NO: 2843 - DNA, 201 bp, Homo sapiens
tagctgtgtgactttgggcaagtaactgagtatctccactacctcaatttccttataaatatatataatgtgtgtatatatatatgtgtgtgtatgtgtgwataatttatgtaactatgtatataatagtagcaacctcataggagcatgtaagaattatctgggttcctacatgtaaaactgtcagcacagagtaagttc

SEQ ID NO: 2844 - DNA, 201 bp, Homo sapiens
gcctttgttgaatgaattgttgaaggaatgcatgaatgtgtagggggtgaatgagtgatattgattaaatactccctaggtatcaggcattgtgaaagtgytttccaggtattaaccccttctatcttcaccctgactgagaggcaggcgtttttgtgatccccatgacataagagcaggagcctgtcatgacttgctggg

SEQ ID NO: 2845 - DNA, 201 bp, Homo sapiens
gttatcacacgcagttatcatgcaccctcagaattcagccacacactagctcacacataatctcacagtcgtacatacattcagaattcacactcacacacactaacaggcacacactcagaattcacacacactaactcacagtcatacacagtcagaattcactcacagtctcacacatacacactcaccattaaccta

SEQ ID NO: 2846 - DNA, 201 bp, Homo sapiens
cttcctaagatatttgtttttccttccaggctcagttcaaacatttcgtccttctcctcgaaaccctgctggggtgtgcctagaacacagtaaaccacaamgcatttcggtgaagggatgaatgattcaatcaatcaatgaataaagcgattaataaaagatggatttcttgtctggtctttgaggtattcacttacattc

SEQ ID NO: 2847 - DNA, 201 bp, Homo sapiens
cacacacacagaattcacactcacatgttatcacacgcagttatcatgcaccctcagaattcagccacacactagctcacacataatctcacagtcgtacwtacattcagaattcacactcacacacactaacaggcacacactcagaattcacacacactaactcacagtcatacacagtcagaattcactcacagtctc

SEQ ID NO: 2848 - DNA, 201 bp, Homo sapiens
tccttctcctcgaaaccctgctggggtgtgcctagaacacagtaaaccacaacgcatttcggtgaagggatgaatgattcaatcaatcaatgaataaagcrattaataaaagatggatttcttgtctggtctttgaggtattcacttacattccaagccatttcttcttgcctgggctgagcttccccagagcctgcctgt

SEQ ID NO: 2849 - DNA, 201 bp, Homo sapiens
tttcccacaccacaaggcttgcaggagctgctgaggccagtgtggagtgcagggccacagaagggccctctgcctgcctctgtgtgtgtgtgtgtgtgtgtatgtgtgtgtgtgtaacaagcagcctttagcaggaagatgctgcccagatagaggccttcctggattcaaatacaatgaagggcctgaccctgcttgtgt

SEQ ID NO: 2850 - DNA, 201 bp, Homo sapiens
aactctaaaagatagttcccactctgagatgattaacaacaacaagagaaaattcccatttattcttttggtgtcttttttggtacacctctttgatacaytggaatttattttggagtaagaggtaattcacaaatcagacttaattgtcttctggataactacatagatattccaacattattaactgaagcatttatt

SEQ ID NO: 2851 - DNA, 201 bp, Homo sapiens
taaaggaccaagtgagactctagaccaggcatgggaataagtggctgtcaggaaagagatcatctcagtgggaggaattcggttagactcctttagcctgstcactgaccatcaataaaatgggaatgatgaaacccgcaaaggaggtgaggattcttctcaactggcaaaacaaaccactatctatccttgacctttgat

SEQ ID NO: 2852 - DNA, 201 bp, Homo sapiens
ctttcccacaccacaaggcttgcaggagctgctgaggccagtgtggagtgcagggccacagaagggccctctgcctgcctctgtgtgtgtgtgtgtgtgtgtatgtgtgtgtgtgtaacaagcagcctttagcaggaagatgctgcccagatagaggccttcctggattcaaatacaatgaagggcctgaccctgcttgtg

SEQ ID NO: 2853 - DNA, 201 bp, Homo sapiens
ccacagcagcaggcaaaggatccccagacatgtgcaagcagggagaccctgggcaggggaccaggtggctcattgcatgggaacaggggtcaaaaaaagasaatgggtttctttattgagaaagctgaactcaaaagggggaggttggtcatacattgagcatcagtctttctcctaatctctctatccaggggaacagta

SEQ ID NO: 2854 - DNA, 201 bp, Homo sapiens
gagcaaaagcttcactccgggctgaagcaggaagtacttgggaacaatagggtgaagccagcctaagagtttaggctccacagtgctggtaatgggatgcrtaggagattggagcagagcagtgacaggtaattgaatttgctgaatctcgtggagttgacttgttcttgtctccattccctcaagtaaagtcagccagtt

SEQ ID NO: 2855 - DNA, 201 bp, Homo sapiens
atcagtgggagccctgagcttgttttcctgcaactagacagtcccatcttggggtggggagacagtgacagatcatcaggcattcgattctcataaggaaygtgcagcctagatccctcacacgcacagttcgtaatagggttcgtgctcttatgagaatctaatgctgctgctgacctcacaggaggcggagctcaggcg

SEQ ID NO: 2856 - DNA, 201 bp, Homo sapiens
tgcttgaacctgggaggtggaggttgcagtaagctgagatcaagccattgcactctggcttgggcaacaagagtgaaactccatttcaaaaaaaaaaaaaagagagtggggagaaggggaagggagaaagagggggaagtgggtactgggagatgatttagaccactgtcagcactgagggaagccagtgacctcatcctt

SEQ ID NO: 2857 - DNA, 201 bp, Homo sapiens
gtctcgatctcctgacctcgtgatccgcccgcctcagcctcccaaagtgctgggattacaggtgtgagccaccgcgcctggcccagtaactttcattcttygctggtgagaatgccaaatgggacagccactttggaagacaggttggcagtttctcataaagataaacatacttttaccatatgatcagcaatcgcactc

SEQ ID NO: 2858 - DNA, 201 bp, Homo sapiens
actggacccagagactggctaacattccttttcagatttttaagattctggggatacttttctagggatctcctattcatttaggcagagatgagttgttktttttttaagcctcctgcctctccctagcctctacccacagaaagtaatgcccatgcttgccgtcccatcttgaaagctttcttccaaagtttagttact

SEQ ID NO: 2859 - DNA, 201 bp, Homo sapiens
aaggagattttgggctgagataatgggattttctaaatataaaataatgtcatctgcaaacagagacaatttggcttgctctcttcccatttgaaaactawttctttctcttgcctgattgccctggccagaacttccaatactatgatgctgtactatggtgagagagagcatccttgccttgtacttgttttcaaaggg

SEQ ID NO: 2860 - DNA, 201 bp, Homo sapiens
gactggcatttaagaaggcacagggtgctagcagtggagagaaagacaaaagtttagctcaaagggagattaagcagggtagcaaggaaggacaaagagargcagaacaggattctctacctattcatcaaacataaatgcgatatttgctacaagttggaaactctgctaggcagtgagaacttagatccaatccttaaa

SEQ ID NO: 2861 - DNA, 201 bp, Homo sapiens
tggcccattccttgactgggaatatttttaaagcaagaggtactttactctttggggtactgtcacaggagattctccctcaggcctggctcatggtcccygatccttattgaataccccaaactgtatcctagctagtgataagtctggttgttctctttcctatctccgtgtgtctgcatgagcggctgtcacttcatt

SEQ ID NO: 2862 - DNA, 201 bp, Homo sapiens
gaagaaatcagctctcccctttcccccaaccttttcctggcagcttggagcttctaatggtcgacggaaggctccatcatcaccaaacagtgcagcgtacwgacacagccacctattctgaagccactggctctctagggctccaggcttgcctctccaaatgcctgatttggagcttcccttgaacgtctcataggattt

SEQ ID NO: 2863 - DNA, 201 bp, Homo sapiens
ggagaaaaaggaactcttacataccactggtgggaatgtaaattagtatagcaactatggaaaacagtatggcaatttctccaaaaactaaaaataaaackaccatgtaatccagtaatcccaatagtggttatttatccaaagaaaaggaaatcagcctgttcagaaagataactacaccctcatgtttattgcaggact

SEQ ID NO: 2864 - DNA, 201 bp, Homo sapiens
gagcggctgtcacttcatttctggactttctgcctctaggacatggactgattttatcattcgctggcttctctttaacttccttcctttctccccagggrcaagggggtgcatctgttttcatgatctcccatcttgaatggtaatcagtgttccaccagacgtggcttcccatatccttgactttatcttaataaatga

SEQ ID NO: 2865 - DNA, 201 bp, Homo sapiens
cacactcatcattcacactcagtctcacacacaggcatacacatacccaacattcacatttagtctcacagtcatatatgcacaccattcacacacactaycttgatagacatacacactcagaattcacattcatacacattatgtcagtaatacacacacatgttcacatcccttgcacactattacctcatactcagt

SEQ ID NO: 2866 - DNA, 201 bp, Homo sapiens
agtacaaggttctcagtaagctctcaataaatgctgacaattgctactatgatcaacatcatccaagtcatccacacccctgtactgagcccttccctcawggccatcactgttctgggcatgaggggttgacgctggggttggttggagaagaagcaaggcctacttgaaaagggcccccaaatcagctcaggtgagggc

SEQ ID NO: 2867 - DNA, 201 bp, Homo sapiens
gcctgtgcctcctgcagccacgtggaactattcaaaatgataatctggcatgtggtagtaactcagactggatgggtccatcactcacagagcagtgggcrcagcctccagagttcttatgtcttttgccagggccagcatttctactccaagctctcattcatcctctgcacaatttatttctgcagagtgcccttcata

SEQ ID NO: 2868 - DNA, 201 bp, Homo sapiens
cagaggaagagtcccttgccctggcctggcctctggttcctcacctgaaaaggtgaaggggattgtaccgcagcatcccaactatctccttcagcaccgastggctgtctgactcctccggtcagaggtaccagaataggctaaatatccccagcggctgccatcccagcgggtgggatgagagcgagcctgagctctgct

SEQ ID NO: 2869 - DNA, 201 bp, Homo sapiens
ccgggaggccgtggactgtggaaggaggatgaagttgggcctggggaagagagatcagagaactgaactattccagcccctccccactgcaccaaacagcygtttgcccttggcactgagtttctagaggctttaattcaagttctgtcacccaggagtgggaactacttaataccactcctaggaattctgaatagaagg

SEQ ID NO: 2870 - DNA, 201 bp, Homo sapiens
ctatctccttcagcaccgagtggctgtctgactcctccggtcagaggtaccagaataggctaaatatccccagcggctgccatcccagcgggtgggatgasagcgagcctgagctctgctcccttgatctcctctgcgtctctgctggatggcaggggtgagctggagcttccctggaggctgccacatgctggactcccc

SEQ ID NO: 2871 - DNA, 201 bp, Homo sapiens
tccagggtacagagataaacttcacagcctggaagcatataattggacaacaatcagtgaaattagcacttttaatgctctgatagtggaaagcacagagracaccaagctctgttcggagagtggggcaggaagggccagtttctgccagtcttgggggagaaggatagtggcgacagtaccacaccctgctcagagcca

SEQ ID NO: 2872 - DNA, 201 bp, Homo sapiens
aacccatccaaacccaaaacaccggaaaacatattcttctttattaggtagcccatgtcttccattttcaggtttgctgagaaggaaacagtatccaaagkctgggaactgtcctcttatgttcacactataaagtcgtctccactagcatctaccattcccatgccattttaaggatctgctctccaatgatagagcctc

SEQ ID NO: 2873 - DNA, 201 bp, Homo sapiens
gcaatgaaggatacaatggggggccagtgaccttgctgagggactggctcagttggaggcaggaccatgaaactgggctttcctgctccactttctttctyccttgattcctgccttctgccaatcctcttaaaacagcaaaaaccctattctttcttctctttttctctaataaatgtgttcttagacacaataaatggg

SEQ ID NO: 2874 - DNA, 201 bp, Homo sapiens
agattggagcagagcagtgacaggtaattgaatttgctgaatctcgtggagttgacttgttcttgtctccattccctcaagtaaagtcagccagttcttgkggtttaacaaccatctgtctctctcccacacagaggtaacaggatactggaagagacttttcctggtaccccagaattgacaaccagaacccctatctgg

SEQ ID NO: 2875 - DNA, 201 bp, Homo sapiens
ggctaggacaggggagaaggtgaaactaagggcgggtttggaaggaggagtcaaaccacaaagaaaatcctacaggctttcttctgggaatgttctctgtrgtctgggagtacaggcagttctagagtcttcccaagagaaaacatacttgttatccccctttcaagaaagcaaagacatgcaccttcagaattcacagat

SEQ ID NO: 2876 - DNA, 201 bp, Homo sapiens
atgcagtttccccatagagcaggaaagagcctaagtggatgacgttcttctagtagagcttcatagcccttttattacatacggctttcttcatctgtccyatggataaaaggccagccagagagggcagggcaacattcaacccacactcaataaagaggattatttgtaacaagcatttaatgtcttttcaaagcttaa

SEQ ID NO: 2877 - DNA, 201 bp, Homo sapiens
attggccacatgcggtggctcacacttataatctcagcactttgagaggccgaggcaggcatatcacttgaggtcaggagttcaagaccagcctggccaaygtggagaaatcccatctctactaaaaataaaaaatgagccaggcttagtggcaggcacctataatcccagctacttaggaggctgaggcacgagaaccac

SEQ ID NO: 2878 - DNA, 201 bp, Homo sapiens
ggattttcatcatgcttttaatttgcatttttctaatgattaatattgttcaggagcttttcagttgctttattttcctgctgtctatatatttctttggyaaagtgtctcttaaaatctcttgccaatttctaaaaatctgtttgttttcttattaagtttggggagtactttatatattctaagtcctttattagacat

SEQ ID NO: 2879 - DNA, 201 bp, Homo sapiens
ccctctgacactatgaaggagtttggtttgatgataaaagcctacaagaaaatgcaagccttgttccagcagcacaatgtggtcagattttttttttttttggccttctaggaccctcagactcacttaaatgagaaggggaccctagttttaccatgcatgttaaagttaggatattatgccaaacttctaactgccctg

SEQ ID NO: 2880 - DNA, 201 bp, Homo sapiens
tgggtcaatgtttctttttttttcttttttttttagacagagtcttgctcttgtcacccaggctggagtgaggtgatgcgatctcggctcactgcaacctmtgcctccggggttcaagcgattctcctgcctcagcctcctgagtagctgggattacaggtgtgcaccaccatcctaattttgtgtatttttagtagagat

SEQ ID NO: 2881 - DNA, 201 bp, Homo sapiens
gctatgctccctctgacactatgaaggagtttggtttgatgataaaagcctacaagaaaatgcaagccttgttccagcagcacaatgtggtcagatttttwttttttttggccttctaggaccctcagactcacttaaatgagaaggggaccctagttttaccatgcatgttaaagttaggatattatgccaaacttctaa

SEQ ID NO: 2882 - DNA, 201 bp, Homo sapiens
atgtttctttttttttcttttttttttagacagagtcttgctcttgtcacccaggctggagtgaggtgatgcgatctcggctcactgcaacctctgcctcyggggttcaagcgattctcctgcctcagcctcctgagtagctgggattacaggtgtgcaccaccatcctaattttgtgtatttttagtagagatggggttt

SEQ ID NO: 2883 - DNA, 201 bp, Homo sapiens
gtcagatgataaagtttattccttttttaaagatttaggtttattgtcccacttaatctttggcccacagttttttggcccatgacaagcactaaataaakgtcattttttttgcattatttacatgcattaattttaatcgttaaaacaaccctcaagttaaatatcattatctcattttacagatggaatactgaagta

SEQ ID NO: 2884 - DNA, 201 bp, Homo sapiens
gatccgcccgcctcggcctcccaaagtgctgggattacaggtgtgagtgactgtgcccagctccagtgtttattttcttgcatagagatatccaaatgttytagcactatttgttgacaaggctgaataacgtgtgactatgttatctcatttggactttacaacaaaatgttttaattcctatgctacgtaagaggctga

SEQ ID NO: 2885 - DNA, 201 bp, Homo sapiens
tatcataagtgaaatggctcagaaacaaagtcaaatactgcatgttctgacataaaagtaggagctaaataacgtgtacaccattatcataagtgaaatgkctcagaaacaaagtcaaatactgcatgttctgacatataagtaggagctaaataacgtgtacaccattatcataagtgaaatggctcagaaacaaagtca

SEQ ID NO: 2886 - DNA, 201 bp, Homo sapiens
tcttaaagacaatgagtgaaaaagaaaaactgtctgcctcagtaagatcagacaattcaataaacagattacacagatttttgttcatggcattccattasaaatactgaacaaattgggattagggagtgcctaaatggttgtttcaaaagacatagtttctatgaaaacaaggataacatgcagtcatttgctggcaaa

SEQ ID NO: 2887 - DNA, 201 bp, Homo sapiens
gctgaatctcgtggagttgacttgttcttgtctccattccctcaagtaaagtcagccagttcttggggtttaacaaccatctgtctctctcccacacagakgtaacaggatactggaagagacttttcctggtaccccagaattgacaaccagaacccctatctggcaacaaaaaggcactgagaatgccatgttctaaag

SEQ ID NO: 2888 - DNA, 201 bp, Homo sapiens
acaaacaccttccctaggttttctgtagaagtttaacagttttagggcttacatttaggtttatgatccattttcacttaactttttaatacagtgagagrtatgggtcaatgtttctttttttttcttttttttttagacagagtcttgctcttgtcacccaggctggagtgaggtgatgcgatctcggctcactgcaac

SEQ ID NO: 2889 - DNA, 201 bp, Homo sapiens
ggtatgccccctgtctgctgctccagtgtctgctgctcagagatcccagcccagtggtcaggtggagactgagtgtgcctggtgggttggggtaacccagmtccctcatctccctctgcttacatcctcccttttcagatgcacccacactccagcaagagcaaacccatcctccgtgcctctgtttccctccctccatgc

SEQ ID NO: 2890 - DNA, 201 bp, Homo sapiens
agtcgtggtggcagttacctctaatcccagcaacttaggaggctgaagcaggagaatcgcttgaacccgggaggcagaggctgcagtgagtcaagatcacrtcactgcactccagcctgggtaagaaaagtgaaagtcagtctgaaaaaaaaaaaaagtggtagccaccatagcctgactataaaaaggtaaagctccctg

SEQ ID NO: 2891 - DNA, 201 bp, Homo sapiens
gagcctgggaggcagaagttgcagtgagccgagatcgagccactgcactccagcctgggtgacagagtgagactctgtcaaaaaaaaaaaaaaaaaaaaaaggaagaagaaaagaaagggaagggaagggaagggagaaagaaagagacagagaaagagaaagagagagagaaagagaaagagaaaaagagagagaaagag

SEQ ID NO: 2892 - DNA, 201 bp, Homo sapiens
cctgcagacagtattgctatgcaatagcataatatatcttctattcaatcttttatacattatgttttgtcctgcattccagtggatatatttatggatcygaagctttgccatgaagaggcaccatgcacctcctcattcccatctctcaacatttccatggcctctggagatagtcctctcttgttcttgttctatgta

SEQ ID NO: 2893 - DNA, 201 bp, Homo sapiens
aaagtgtttagaccccttagtctgctccatcaagccctctgaattctcactctatccacatgtttggccccacctctcactccttctcctcactttccctrtttaataactaacacatcacttcatctacttccttagcctttatgatggtgttcctttagccagtatgcccattctattactcttctgtatcacttccta

SEQ ID NO: 2894 - DNA, 201 bp, Homo sapiens
aagtaactgagtatctccactacctcaatttccttataaatatatataatgtgtgtatatatatatgtgtgtgtatgtgtgtataatttatgtaactatgyatataatagtagcaacctcataggagcatgtaagaattatctgggttcctacatgtaaaactgtcagcacagagtaagttctcaagaaatgggagctcgt

SEQ ID NO: 2895 - DNA, 201 bp, Homo sapiens
acagggctctgtgcccccatccagttagcactaccggactgctcttaggacagtgccttgtctttggcctgccaagttctaggtcaccctctctcccctgstctcatcctgcatagacagcctttgagtcacatttactctttccttcccatccttaagaagactcagcccttgtcctcgggatgcctcagggtagaaaat

SEQ ID NO: 2896 - DNA, 201 bp, Homo sapiens
tggaaaaaatggggagggggcacccataataccacacgggagccccagaggagaggacggctcctggggtgcatgagagcaacctgctcacaaggacaagwacccggaacagggaaccagcctggcaggtgaagaggctatgagcggtgatggttctggcccgacaacagtggtggtagcagtgagaaggtagggagagca

SEQ ID NO: 2897 - DNA, 201 bp, Homo sapiens
tactagcccttggcaagttaatcgcctgccgccacgctcagttttatttactgtaaagtgagcgtgtaactctcaaatttagaactccagcacataccttycccttgaatggtagaaggctatatccagtgctacttgacatctctgcttgaatatcaagtaggagtctcaaacttagcaggttgaagctcaacttctgat

SEQ ID NO: 2898 - DNA, 201 bp, Homo sapiens
gctgttgcttggcttgtctgcactccacactgtcaggaggcgacattcatagacagtgatgactaaccatcctaacaaatggtacagagagtaagtgctaraagcgttcaaaaatagcccagaaagccctgggcacacaccaaaagggcagaatgacactctgagtatttcaaagagggagacacaaggaatgccagtgct

SEQ ID NO: 2899 - DNA, 201 bp, Homo sapiens
tgcttgctcaagccacagttctcagatttgtccttcctgcccaataacccagtctcccaggattatcttcaaaatgtatcaaggaaactactacttcccamctaaatctccaccaccttgctccaagctaccaactcctctactgcatcagctcctggcttatctctaagcttccctagctcccagtgtacagctgcagga

SEQ ID NO: 2900 - DNA, 201 bp, Homo sapiens
caggccgggcgcggtggctcacgcctgtaatcccagcactttgggaggccgaggcgggcggatcacgaggtcaggagatcgagaccatcctggctaacacrgtgaaaccccgtctctactaaaaatacaaaaaattagccaggcgtggtggtgggcgcctgtaatcccagctactcgggaggctgaagcaggagaatggca

SEQ ID NO: 2901 - DNA, 201 bp, Homo sapiens
aaggggattgtaccgcagcatcccaactatctccttcagcaccgagtggctgtctgactcctccggtcagaggtaccagaataggctaaatatccccagcrgctgccatcccagcgggtgggatgagagcgagcctgagctctgctcccttgatctcctctgcgtctctgctggatggcaggggtgagctggagcttccct

SEQ ID NO: 2902 - DNA, 201 bp, Homo sapiens
tgaaagaacggagaaactgattaatggaaaagaatagagaacccagaaatagacatacataaccatagtcaaccgatttttgacaaagcagcaaaggcaayacaatgaagaaaaatgtcttttcaacaaatggtgctggaacaactgaacatccacatgcaaataattgaatctaggcacggatcttatatccttcacaaa

SEQ ID NO: 2903 - DNA, 201 bp, Homo sapiens
agaacccctatctggcaacaaaaaggcactgagaatgccatgttctaaagagagcctccacagaaagacaaataccgcacatcctgattcataagtgggarctaaataacgtgtacacacggatgcagagagtgggttgatggacgacagagactcaatcagaagggtgagggggtgaaggatggctgatgacaaattact

SEQ ID NO: 2904 - DNA, 201 bp, Homo sapiens
cacagacaaatggcatcatgcgctaaagagggcccagcttccctaggcccggcggacttggcttctcacctggctctccaactaactggtgctcatctgcktggctctccaccaaccaattgccttttttctctttcatccagccagccccgggacaaaatccaaatgttggtcaaagtcctttttctcccaggtagggag

SEQ ID NO: 2905 - DNA, 201 bp, Homo sapiens
ctgtggcttttgttttgactataacttcctctcgatatttcaagactctgagctttttctgtgtaccaaaatcttgttgagagcagcaggcgatctggagrgaaagaggtggaggaggaaaaagtaccatgtctccagagctggagggcccaagataaaaagcaatgcctttggcttccttaatatggcctctttgctccc

SEQ ID NO: 2906 - DNA, 201 bp, Homo sapiens
caaatggcatcatgcgctaaagagggcccagcttccctaggcccggcggacttggcttctcacctggctctccaactaactggtgctcatctgcgtggctytccaccaaccaattgccttttttctctttcatccagccagccccgggacaaaatccaaatgttggtcaaagtcctttttctcccaggtagggagactgtg

SEQ ID NO: 2907 - DNA, 201 bp, Homo sapiens
tatggcctctttgctccctgaagtgagcaatagctttgctcatcttcgcccctctgccctttcttttctgcactgagggtactacatctgctcatgcacastcactaacaaagattcctgagtgatctgacatcctctcagacctacttaccaagctgtgcttcctggtccaggactgggtccacttggagaacagaaggc

SEQ ID NO: 2908 - DNA, 201 bp, Homo sapiens
cggcggacttggcttctcacctggctctccaactaactggtgctcatctgcgtggctctccaccaaccaattgccttttttctctttcatccagccagccycgggacaaaatccaaatgttggtcaaagtcctttttctcccaggtagggagactgtgagcctgggctccagccagagaggatgtgctgctgtccagggcc

SEQ ID NO: 2909 - DNA, 201 bp, Homo sapiens
tcaaatgagcatgcactggggtccctgagaccacgtttggatattcactggaagcactactgagactcagcatataattgtcctcacacctaatattcatkacaatgatgtggtgaggatgcttagctaaatcataaggggaaaagggacaggcagagtctggtggaatccacgtgcaagatacctcacgctctgtccaac

SEQ ID NO: 2910 - DNA, 201 bp, Homo sapiens
attcatgacaatgatgtggtgaggatgcttagctaaatcataaggggaaaagggacaggcagagtctggtggaatccacgtgcaagatacctcacgctctstccaaccctcagcaacaaaaatgcagcaacatgtgtgtggtatttctgcccagggcagcccagtaaggactcagtgccaaggattttattgggggtgact

SEQ ID NO: 2911 - DNA, 201 bp, Homo sapiens
cgctctgtccaaccctcagcaacaaaaatgcagcaacatgtgtgtggtatttctgcccagggcagcccagtaaggactcagtgccaaggattttattgggrgtgactgcattggcacaatctgcctagcatgtaccaaaactccagcttcccagaatggaagcaggtgttcagcataaacaccacgtagacactgtgagcc

SEQ ID NO: 2912 - DNA, 201 bp, Homo sapiens
gttctgttttgctgctaaatgagattcagatcagcagggcaggttcacattcaattatgtagctgcttatattgttgaatgtccatcaaatatgcaactayagcaggtccttgaataacattgtttcattcaatctcatttcgttataatgttgatgaaaaagaatccatttgcagccagggccactgtctgtgtagagtt

SEQ ID NO: 2913 - DNA, 201 bp, Homo sapiens
tatatccatttaacaaagctacacttgtacccttctaaacctataaaaatttaaaaagaaaaaaatattgaaggtgaacaaagttgaaggattgacactarcagactttgagacttaactataaaactacaggaatgaagacagtgtagtagtggtgaaagaacggagaaactgattaatggaaaagaatagagaacccag

SEQ ID NO: 2914 - DNA, 201 bp, Homo sapiens
tggagctgataaactgggtgactcctcagagccttgcatcttgtgggctcatgacgtcaatcatgctgccccacccacagcccttcctccctccccacacstgacatgcgtacagacactcctcatgaccctcccttctgccctttgcacccttccattgctctaccctctcacgaggctgactgtcggtagctgcgctgg

SEQ ID NO: 2915 - DNA, 201 bp, Homo sapiens
ctgggataggctgtggttactcatgaccctgaactggaataagcagtttggaaaatgaattattggaaaatgaaagcttgtaaagtatatgataatgatayaaatgcatgacaataaatgatgcagcatgaaaatgctcagtgagcccacaagatttgtgatggtttcaaactgtgtggtgggaggaggtgctcctgaaaa

SEQ ID NO: 2916 - DNA, 201 bp, Homo sapiens
tccttttattaatctttctaaagtgtatgtttggcccacatttatttcagtgtttaatattagaggtgttcgggtcttcatttagaagtttagtgatgttytcatgacaagaaatacactgtaggaccttaactcttgtttataccaatgagcctaagggaaaattggttttgttgtctcttgcttcacctaaaggtgcag

SEQ ID NO: 2917 - DNA, 201 bp, Homo sapiens
gcttgcctggcgtcttcttcaacaagtatatgatcaaatgaacgaaatgtttcttggctagcaagtggttggactggggaattaacagagaacactagacyttctcttctgcctgtcttgggacacagagcattcaaatccctccagcagggggaggaagaagaaatacctggcagatgtgacacagcaaggagacctggg

SEQ ID NO: 2918 - DNA, 201 bp, Homo sapiens
taacatgacatatctatgtacaacatggctgggacagttgaagaaactatacaatggtgttcaagagagcaagattctgtaatcctcttgctgcttctttyatccagcaggaagcttgtggttgatgtcagaggcccaggcagcaggagttggcacactgctgtcaagtggccacagctgtagctgttaggagatagagta

SEQ ID NO: 2919 - DNA, 201 bp, Homo sapiens
tgagactccaactcaaaaaaaaaaaaaaaaaaaaaaaaagaacttatttatgtaaccaaataccacctgttccccaaaaacctatggaaataaaaaataamaatagtcttaagattaaaaaaaagaatgatgcatagcaatgtgtttaatagccatttatatccacaaataaattaatcaacagtgttcataagttcttga

SEQ ID NO: 2920 - DNA, 201 bp, Homo sapiens
tatttgagtgtggccgcgagggtgtttctggaagacattaacatttgaattggtgggctaagtaaagcaggtggccctcctcatacaggtgggcatcaacyaacccactgagggcccacataaaacaaaaaggtgggaggagggcattttgctctctgtttgagctgggacatctatcctcctgctctcaagacttgagtt

SEQ ID NO: 2921 - DNA, 201 bp, Homo sapiens
aatatccccagcggctgccatcccagcgggtgggatgagagcgagcctgagctctgctcccttgatctcctctgcgtctctgctggatggcaggggtgagytggagcttccctggaggctgccacatgctggactcccccaaagtgctgactcctgagcctctctgctcgttttctatgcattgaacttcaaacaccagag

SEQ ID NO: 2922 - DNA, 201 bp, Homo sapiens
ctgggtttcatccctcctggaagtgtgttcctaagcttcatccttttgcgagaatgccttgatgcagtctgcacactggcttgccggtgaggttgaaaccstgttcccaccaacagaatccaggggccagtggccaggcttttttctgtctgccccaattgtaattaatctgtcccacctctgccctggctccaatacttg

SEQ ID NO: 2923 - DNA, 201 bp, Homo sapiens
atacttacacattatctcagtcatacacactaacacactcaacatttacaatctcacactctgaattcacactccaaattcacactcagccatacacactyatcattcacactcagtctcacacacaggcatacacatacccaacattcacatttagtctcacagtcatatatgcacaccattcacacacactatcttgat

SEQ ID NO: 2924 - DNA, 201 bp, Homo sapiens
tatgttttgtcctgcattccagtggatatatttatggatctgaagctttgccatgaagaggcaccatgcacctcctcattcccatctctcaacatttccayggcctctggagatagtcctctcttgttcttgttctatgtaaaagacctggagtctgacccctttgtccccatgggtaagttttatctctgggaacgaagc

SEQ ID NO: 2925 - DNA, 201 bp, Homo sapiens
cattatctcagtcatacacactaacacactcaacatttacaatctcacactctgaattcacactccaaattcacactcagccatacacactcatcattcayactcagtctcacacacaggcatacacatacccaacattcacatttagtctcacagtcatatatgcacaccattcacacacactatcttgatagacataca

SEQ ID NO: 2926 - DNA, 201 bp, Homo sapiens
cagaggtctgtgccctcacccaatattccccatgggtttacagacatgttcacacgtgggtgcaagctgatctccattgtcagtacacagatgcccatgawtaatgccgtggatatacacatgtgtgttgcacaagctacacaagctaaagctggtaacccaaccctgaagaccctcacgagctgctgtgggggatcttgg

SEQ ID NO: 2927 - DNA, 201 bp, Homo sapiens
ccaaggatcacctttctttaggagaggagggtcaacagtaaaatggttggcctagatgacctcatgaagttactcagtttgtccatgtgtttgaataatgracaccacttggtaaaagaaatgttctagacactttaattcacaccaccatcctgccacggtagtatgcattgagctttgagagatattgactcctgcctt

SEQ ID NO: 2928 - DNA, 201 bp, Homo sapiens
ttcccacaccacaaggcttgcaggagctgctgaggccagtgtggagtgcagggccacagaagggccctctgcctgcctctgtgtgtgtgtgtgtgtgtgtrtgtgtgtgtgtgtaacaagcagcctttagcaggaagatgctgcccagatagaggccttcctggattcaaatacaatgaagggcctgaccctgcttgtgtc

SEQ ID NO: 2929 - DNA, 201 bp, Homo sapiens
catatgatcagcaatcgcactccttggtatccacccaaaggaggtgaagtcttacatccacaaaaaaacctgcacacagatgttaatagcagcttttttcrtaactgccaaacttggaagcaagcaagatttctttaggtaggtgaacagataaactgtgatacattcacacaatagaattcagtgctaaaaagaaatggc

SEQ ID NO: 2930 - DNA, 201 bp, Homo sapiens
tggcagaaattgattttttttttaatgtcaagaagctcttgcaagaaaaaaaataatgccaaagtgtttcacaaaataattgtctaccatgtaactaacaygtatctccagtactattttaaattgctcaatatgtttagaacaaaagatcacttccaaattacttttataaagttagaatagcattaatagtaaaacctg

SEQ ID NO: 2931 - DNA, 201 bp, Homo sapiens
aaattacagaggagacacaccacttaaacccatcatttaccaaagaagaaatttgattattattattcttttttaagagatggggctcttgccagatgccrtggctcatgcctgtaatcccagcattttgggaggctgaggagggcagatcacttgaggtgaggagtttgagaacagcctgaccaacatggagaaacccta

SEQ ID NO: 2932 - DNA, 201 bp, Homo sapiens
tttttttgaggattttcacatcgatgttcatcagggatattggcctgaagttttctttttgttgttgtgtctcctcccagttttggtatcataattatgcyggcttcataaagtgagttgggggggggggtctctccttttcaattgtttggaatagtttcagaagaagggataccagctcctctttgtatttctgctaga

SEQ ID NO: 2933 - DNA, 201 bp, Homo sapiens
ctggctttccctccctctgggcaatcccacattttctctcccagacacctccccttgctctccgtggggcctcttctccctagtgaagctcctgtcagccstgctatctgggttcactccagcccagcccagcctagctcaggcctactggacccagcccccactgccctcttcaactccccaccctggggtcttccctct

SEQ ID NO: 2934 - DNA, 201 bp, Homo sapiens
catcgcatagcccattgactgccaccaaacgctcagtggaaggagtgattgataagaggcgctgcacagggaggtgagggcaacaaggctcagctctgagyccagaggccccctcccctctgcaggatgtgaacggagccaggcagagagcagacgcgcggacatgcgcataggcattgcggcaaggaggctggaaaaaat

SEQ ID NO: 2935 - DNA, 201 bp, Homo sapiens
ctggaaaaaatggggagggggcacccataataccacacgggagccccagaggagaggacggctcctggggtgcatgagagcaacctgctcacaaggacaartacccggaacagggaaccagcctggcaggtgaagaggctatgagcggtgatggttctggcccgacaacagtggtggtagcagtgagaaggtagggagagc

SEQ ID NO: 2936 - DNA, 201 bp, Homo sapiens
caccttctgactgcttccgcacatgatagaagaggtcaacaggatccctgagttctcttttataagggctctaatcccattcctgagggttccaccttcaytacttgttacctcctaaagtctctacctctcaataacatcccattaaaaattaggtttcattataagaatattggaaagacataaacattcagggcatag

SEQ ID NO: 2937 - DNA, 201 bp, Homo sapiens
gaattcatacttacacattatctcagtcatacacactaacacactcaacatttacaatctcacactctgaattcacactccaaattcacactcagccatasacactcatcattcacactcagtctcacacacaggcatacacatacccaacattcacatttagtctcacagtcatatatgcacaccattcacacacactat

SEQ ID NO: 2938 - DNA, 201 bp, Homo sapiens
ctcgaaccaccaagaaaagaggctggaatagggctttgggagcagatctctttagcaggagagagaatggtgccagcagcccttcccaccaacatccggcyaagctgtctgcattgaaacacagagctcagcaactgcagcagcttaaaatgcattctattctatctctgctcccagcatctgcagaagctaagatgatgt

SEQ ID NO: 2939 - DNA, 201 bp, Homo sapiens
gtcagagtctgtcctttgtcctcctttgcaggaaaggagataggcccagagcgacgggataggtgttagccatgaaggagctgggagtcaccctaagtctsttcacacccggacacattttcccacctgcttgtcattttccaaaatgctgctattactttagcttttccagtgcaatttttgggtcacactgggctctct

SEQ ID NO: 2940 - DNA, 201 bp, Homo sapiens
cagcatagattaagtgtccaataatgtaggagaatcagaggactgagaaaagtccagggcgtggattttgctgtcaaggaacacccagctgtaatgattcraaactagatgtgccttgcagaagtgagaaaaggcttggttttacaatcatacagacctgagctcacatctcagccttgccactcaccacctgagctcaga

SEQ ID NO: 2941 - DNA, 201 bp, Homo sapiens
acgcatacaggctttaaatgaacttgctcacagaagcatgtttcttgctccatcagaaggacgtccctgggtaagctcgctggtcccagaaagaggagacrcatggggctgagccagctcccttcccgctagacatggacccaggatccaaacaggcagattagatgcccacggtcaagagcctggatcacgtacttcctc

SEQ ID NO: 2942 - DNA, 201 bp, Homo sapiens
ttagagtcaaagagctagtcagaggctaatcctggatttcaaacctgtcttctgacctccagctgggcgatcttagtaccacaccaccatgcctctgaacktggctcttcagaagcaagcctctctgtaagtctggcaaatatcctacaaacctagcatacaactggctttttacaatgggtacaaagtatgggaatgtaa

SEQ ID NO: 2943 - DNA, 201 bp, Homo sapiens
agcatctcacatagcagatgtgtcatcatcattagctgggttgcagtttcttttcttttttttcttatatgaatttatttcatttgataggatttttatcycatctatgatgacaaatatttttcaacagccttttactgtatcttttaattaattttagagacagggtcttgctctgttgcccaggctggagtgcagtgg

SEQ ID NO: 2944 - DNA, 201 bp, Homo sapiens
aaattaaagctttgaggacagagagggagcaagagaggggaggcataaataaaaagagggcaagcagggtgagagggctgcagagatgaacacagatgacyggcaggagtgaaggtctgctccgtggacagagacaagctgctctgacatctgagcttggcactggatagaccttggctagaggcacagctcagccctgga

SEQ ID NO: 2945 - DNA, 201 bp, Homo sapiens
atcattagctgggttgcagtttcttttcttttttttcttatatgaatttatttcatttgataggatttttatcccatctatgatgacaaatatttttcaayagccttttactgtatcttttaattaattttagagacagggtcttgctctgttgcccaggctggagtgcagtggtgtgatcatggctcactgcagcctcga

SEQ ID NO: 2946 - DNA, 201 bp, Homo sapiens
tgaaacttctgtttaaccctggaaataattaaacaatataaaacaagatgcaggacaagtgcatattcagattttggacacacagtaaatgctgaaaatamcataaaagagtaaacctatattgatacggagcagggttttgacaacttgacactcctgacattctggaatggataattctttgtcatacaaggaccagcc

SEQ ID NO: 2947 - DNA, 201 bp, Homo sapiens
ccacaacaattgaattcttctgtaccccaaaatcaattgtcaaagtgcacataaaattacaacagtgctaagctttccataatgaggtgattgtgctaagygagcatctgatttaagaagtggctcagcagtacagggcttcgtggcatcatctaatcaggctgcagcaggaaacatgctagcttccaagtgagcagaccg

SEQ ID NO: 2948 - DNA, 201 bp, Homo sapiens
attaaaatcttatagtccattaatcataactagtgaaccaatattgatacattattactaaccaaagtccaccattaattcagatttcattagtttttacstaatgtcctggtttttctggtattaccccatccaggacaccacattacacttaatcatcacatcttcttaggcctttcttgactgtgacaatttctcaga

SEQ ID NO: 2949 - DNA, 201 bp, Homo sapiens
cctcccctgcaagtggtgaccaccaaaagctgtctcctgacattgtcaaatgtttcctgagacccaatgttctggaagtatcaaggaaggcttcaagcagracgcaggctttgagaggtcctggtaagagcttacatagtagttcccatccttaaatttcaagaaccatttaaaaatcttaaaaataaattaagggagaac

SEQ ID NO: 2950 - DNA, 201 bp, Homo sapiens
cttcataaaaggtaaatgatatgagtagttgttattttgtggttttggttcctattatatttattgttgtgttgttatttttattccttttttccaaataktttttatctgtggctagtttggtatggtttatgaatgcacagatatgcagggccgactgtattagtttcccagggctgccatagtgaagtgggtggctta

SEQ ID NO: 2951 - DNA, 201 bp, Homo sapiens
tactctttttcctcctttgtcgttagccacatttcccccatttgcagaagacaggacttacccagatgaaacaaacagccaatagtgtaagataatacatktggaagtctaaagcaagcaataggaagccactaaattcaaggaggaaaagctggacagagttaatgggctctgacaaagccccactggggaaagatgcct

SEQ ID NO: 2952 - DNA, 201 bp, Homo sapiens
tcccatccttaaatttcaagaaccatttaaaaatcttaaaaataaattaagggagaacatttttttacttctcttaaaaaaaaaaccgagatacatgtgcrgaacatgcaggtttattacctaggtatacacgtgccatggaggtttgctgcacctattgacccatcctcttaattccctcccctcaaccctcacccgcta

SEQ ID NO: 2953 - DNA, 201 bp, Homo sapiens
ctaggtatacacgtgccatggaggtttgctgcacctattgacccatcctcttaattccctcccctcaaccctcacccgctaacaggccctggtgtgtgctrttccctccctgtgtccgtatcatctcaatgttcagctcccacttatgagaacatgcagtgtttggttttctgttccggtgttagtttgctgacgatgatg

SEQ ID NO: 2954 - DNA, 201 bp, Homo sapiens
ctattactttagcttttccagtgcaatttttgggtcacactgggctctctccctctgtttcctcctttatagagcaaatatgccctagaggagtaactctycataccttggtagcactagcatgtgggagaagaggggtagacatcctggaggtaaacatgcatcctcaggcatggatgtattatctacatctcaagggcc

SEQ ID NO: 2955 - DNA, 201 bp, Homo sapiens
catatcctttgcccactttttgatggagttgtttatttgtctagtaaatatgtttaagttccttgtaaattctggatattagacctttgttagattgttarattgcaaaaattttctcccattctgtaggttgcctttcatgctgatgataggttcttttgctgtacagaagctctttagtttcattagatctaatttgtc

SEQ ID NO: 2956 - DNA, 201 bp, Homo sapiens
ttttggcttttgttgcaattgcttttggcgtttttgtcatgaagtctttgcccatggctatgtcctgaatggtattgcctaggttttcttctagggttttkatggttttgggtttcacatttaagtctttaatccatcttgagttaatttttgcataaggtctaaggaagcggtccagtttcagttttctgcatatggcta

SEQ ID NO: 2957 - DNA, 201 bp, Homo sapiens
ttggttactgtagccttgtagtatagtttgaagttaggtagtgtgatgcctccagctttgttcttttttgtttaggattgtcttggctatacgggatcttytttaattccatatgaaatttaaaatagttttctctaattctgtgaagaatgtcaatggtagtttgatggcaatagcattgaatctataaattactttggg

SEQ ID NO: 2958 - DNA, 201 bp, Homo sapiens
accatctgtctctctcccacacagaggtaacaggatactggaagagacttttcctggtaccccagaattgacaaccagaacccctatctggcaacaaaaargcactgagaatgccatgttctaaagagagcctccacagaaagacaaataccgcacatcctgattcataagtgggagctaaataacgtgtacacacggatg

SEQ ID NO: 2959 - DNA, 201 bp, Homo sapiens
ttttaagctacccagcccatggtattccattacagcagcctgagcagacaaacacacatggatggtaattttgagcacagcctggcacatagtaagggcamtgtaaatgtttgctttgatctattagtactcaattccaggatggatgtttatttctgcaaagaacttgttaaactgctgcatcccctcctgagcagaaga

SEQ ID NO: 2960 - DNA, 201 bp, Homo sapiens
ttcccttctctctgcataaaacaggagttgactgtgagcagagctgcacaaccagcttcactgttcccaggtagaccccgagtgattacagactggatgamaaggacgaatgaatgaagcttttctcctctggtacagtgtgactggtatgaacacctaccttgtagggttgttgtgaggattaattgagataatccatgt

SEQ ID NO: 2961 - DNA, 201 bp, Homo sapiens
caggatggatgtttatttctgcaaagaacttgttaaactgctgcatcccctcctgagcagaagatacgatacttgcatggaagagaggagagccggaggasattggtagtggggcagctgacactccaacacagggcatgtcaagtaggtggcagctactatagacccaggagtgccctgagacacactgcattgccattg

SEQ ID NO: 2962 - DNA, 201 bp, Homo sapiens
acgtaaggtgagaaaggagaggagagtgagatggcctactctactgggatctgctgggagcctagagaggctccccagtgcagaaaaggaggaaatgaatracctccagtactctacatttccaccatggactcctgcagtccgagccacaggggaggctcattacatgagggccctaagactaacataggcagttgcctg

SEQ ID NO: 2963 - DNA, 201 bp, Homo sapiens
gaaccagccttgcatcccagggatgaatgaagccaacttgatcatggtgggtaagtttttcaatctgctgctggattcggtttgccagtatttttttgagsattttcacatcgatgttcatcagggatattggcctgaagttttctttttgttgttgtgtctcctcccagttttggtatcataattatgccggcttcataa

SEQ ID NO: 2964 - DNA, 201 bp, Homo sapiens
gaattttatcaaagatcttttttgcatctatggagataatcatgtggtttttgtctttggttctgtttatgtgatgggttacatttattgattgctgtatkttgaaccagccttgcatcccagggatgaatgaagccaacttgatcatggtgggtaagtttttcaatctgctgctggattcggtttgccagtatttttttg

SEQ ID NO: 2965 - DNA, 201 bp, Homo sapiens
gagttcattcatgatttggctctctgtttgcctattgttggtgtaaaggaatgcttgtgattttttccacactgattttgtatcctgagactttgcggaarttgcttatcagttcaaggagattttgggctgagataatgggattttctaaatataaaataatgtcatctgcaaacagagacaatttggcttgctctcttc

SEQ ID NO: 2966 - DNA, 201 bp, Homo sapiens
ttcttggctagcaagtggttggactggggaattaacagagaacactagaccttctcttctgcctgtcttgggacacagagcattcaaatccctccagcagkgggaggaagaagaaatacctggcagatgtgacacagcaaggagacctgggcagccagtggacagaaggacagtgggcccggaggacacccaccagcatac

SEQ ID NO: 2967 - DNA, 201 bp, Homo sapiens
aagctggtaacccaaccctgaagaccctcacgagctgctgtgggggatcttggcaaccacccttccttgccagccaggtcctcactgctggagcaggtaakcttattcatcttagtttcctacatcttcacctccatcagctgcttcgctaccctggatgggccaagcacggggactggactacagtgcaagctttttcga

SEQ ID NO: 2968 - DNA, 201 bp, Homo sapiens
agcttgggcatcttaagtaatcactctcagcctgggagtctttcatacatggtaggcggtacagaagaatggttaagagcatcaatgctggagttacctgyctgggtttgattacaagctctgcctctttctcaactggttgtctggagaaagttgcacacctttcctgtgcttcatttttgtcatctggaaaatgcctcg

SEQ ID NO: 2969 - DNA, 201 bp, Homo sapiens
ccccatctggattcttcccccgtttggattttattgtctgtctcccatcaatggcaaagtaaatttcctgacgccagaggtcttacctagcttgcctggcrtcttcttcaacaagtatatgatcaaatgaacgaaatgtttcttggctagcaagtggttggactggggaattaacagagaacactagaccttctcttctgc

SEQ ID NO: 2970 - DNA, 201 bp, Homo sapiens
gacttggacctgggaccagaatggagtctcttgttagttcttcctatccaataaaactatgtcttccctgaagactcttggccagtctcttagggccccasagcagcaggcaaaggatccccagacatgtgcaagcagggagaccctgggcaggggaccaggtggctcattgcatgggaacaggggtcaaaaaaagagaat

SEQ ID NO: 2971 - DNA, 201 bp, Homo sapiens
tttattttctgcctttgacttgttttgtttttctctgggtcctctaacaaaattctttctccaaaacctcaaactcttgtgagatgaaccaaaataaggakaacttgcgaatgcccagacagggaatgagaagtgaaccatggtgctgaccagagccaaatgctacaggtgccaggaaggaccagaaagggtcaagaaaac

SEQ ID NO: 2972 - DNA, 201 bp, Homo sapiens
ggcaaaggatccccagacatgtgcaagcagggagaccctgggcaggggaccaggtggctcattgcatgggaacaggggtcaaaaaaagagaatgggtttcwttattgagaaagctgaactcaaaagggggaggttggtcatacattgagcatcagtctttctcctaatctctctatccaggggaacagtaagtgtagacag

SEQ ID NO: 2973 - DNA, 201 bp, Homo sapiens
cgtctgcactcaggacagggtacggctgtgcagccctgaatgagataactaagtggagaatggtggatgtctaaactcagtgcaggctcagttaggaaagkagaaggctttcctgcccaggatctggtactcacaataaatgctcgatgaatggctgttggctctccttcccttgagaggtcttcagtgagggagatgaac

SEQ ID NO: 2974 - DNA, 201 bp, Homo sapiens
gatgggtgcctgtaagcccagctactccagaggctgaggcaggacagtaagaattgcttgaacctgggaggcggaagttgcagtgagctgagactgtgccmctgtattccagcctgggagagagagcgagacgctgtctaaaaaaaaaaaaaaaaaaaaaagacaaatgttgggattggagagactcaactaatactatct

SEQ ID NO: 2975 - DNA, 201 bp, Homo sapiens
atactgattggttgatgtattctctgccactgctttaaggctataatggcagagttgagtagttgcagctatggtacacaaggcctaaaatatttgaatayctagccatctacataaatcattcatcaatccttgatataaaataacctagtaagaaattgtcagtaaaatgagaattcatggataagatgataaaacagc

SEQ ID NO: 2976 - DNA, 201 bp, Homo sapiens
aggcttgctctggcatgcatgggtgcatgcaaacacacgtgcctgcacactccaaagcatgaactcatgtaataatgcttgtatgcctaagcaaatcccawgagcctgcacatgcacattcgtgtgtaggacatatctcttcatgcacatgtaaacatatacacccattttcaaaatgttgcaaataatatgaaggcatgt

SEQ ID NO: 2977 - DNA, 201 bp, Homo sapiens
accagccccacccctcagaactggatgggaccaaaatgcggcagacagcacagtcagagggaagagcagctaactcaagccagagtcttggagacagcttratccaggtctgcctttgctacttcccagctgtgtgacatgggcgttatccaaaacctcagttctcttattcacaacaaggataacagtacttctagtggt

SEQ ID NO: 2978 - DNA, 201 bp, Homo sapiens
ttggttggagaagaagcaaggcctacttgaaaagggcccccaaatcagctcaggtgagggcctctaactctgggaggagcataccccacaccacttcaggygcttgagacagttgctctgtgcccagatagatgggcaagcattcaggctaagtccccagtgggatggacaaacccaccagcacaggcctaggggagcagg

SEQ ID NO: 2979 - DNA, 201 bp, Homo sapiens
ttctatttggttcttatttatggtttccactgctttgtcaaacttttaatttgttcatgaattgttttccatatttcatttaactttttatatgcatttgyttgtaatttcttgaacttaagaggatacttctgaggtcttttttggtcatttcatagatctcctagtttgtacttgtaagcataaaggaaaatgagtatt

SEQ ID NO: 2980 - DNA, 201 bp, Homo sapiens
tttcatagatctcctagtttgtacttgtaagcataaaggaaaatgagtatttaatatagaacatgtagaattaagtatttatcatcttgagaaaaatattytattattatttgtaattgtaattggcataataaatataataaaaagtaccttatttaatttcccaaatatcttattatatttttaagatattaccttata

SEQ ID NO: 2981 - DNA, 201 bp, Homo sapiens
atcttgaacatttgagaacttgaaaaatgacatggttgtttttggattaacctttttcattcactcattaatcttttgttgactgaataaagatatccaartgtcgttattatagtaattttctttcctaaatttcatgatttggagagcttggtggtaagattttttgctcattacaagtattgatctgggacagatctg

SEQ ID NO: 2982 - DNA, 201 bp, Homo sapiens
tcctaaatttcatgatttggagagcttggtggtaagattttttgctcattacaagtattgatctgggacagatctggtgctgcttaaggaaagactaatamcatgtcccaagttctcctggttatttttatttaaatactgctggggaaaaggtggtggaaaattattttattccatttgtgtatataaatcactatgcat

SEQ ID NO: 2983 - DNA, 201 bp, Homo sapiens
aggccaatatattttagcatgtgtaatttgtaaaaatacatgtttgtatttgtagtaaaacttatacacaagatcaaatatgtaaatattaaaggagaagragttgtatatgtatgtaaattgtttcttatttgaatgacatttagatactgtcatctaggtttagctatattttacagtacaaatttaattaaaatatat

SEQ ID NO: 2984 - DNA, 201 bp, Homo sapiens
ctttccaataaggaaaatttgtcagagcatataacacaccatttattcttcacttcattattttatctaccttttcctatgtgtcttttaattcttaatakttactaaaatttctatatcaaggaataatacacagagcttttaccttcaagttatttagtattggaatagtgcacaaaattataaacattgagataatgc

SEQ ID NO: 2985 - DNA, 201 bp, Homo sapiens
aattatgtgaggtgatggatatgtaaattcattttgtttgataacttcacagtttatacctatataaaagcatcacattgcatactataaatatatgtatrtgtgtgtgtgtgtgtgtgtgtgtgggtgtaaactataccttaaggctgggggaataagctaaagtggtcaacataacctattatatgataaagatatatc

SEQ ID NO: 2986 - DNA, 201 bp, Homo sapiens
agacagttgtactgagaaggtaaagttttgaacgtctcttcatttatatagagggtttccccttgatagggaactgaggataaatatttgaagaaatatgrtggaggtttccagcaatactcataataattgaaacatctaattaaaatagggctaacatcattcatcagcctcacaatatcagctgttttccaagaactt

SEQ ID NO: 2987 - DNA, 201 bp, Homo sapiens
ggccacatagcggtcataggccatggtggtgaagagaaccatctcagctcccagagaccatgtgaacaagaagagctgggacatgcagcctgcatatgaamtggtattttctgatgttagcatggtccccagcatcttcggtatgatgcttgttgtgcagatgatgtccacaacagccagtgtcagaaggaaaacatacat

SEQ ID NO: 2988 - DNA, 201 bp, Homo sapiens
aaatggccacatagcggtcataggccatggtggtgaagagaaccatctcagctcccagagaccatgtgaacaagaagagctgggacatgcagcctgcatawgaaatggtattttctgatgttagcatggtccccagcatcttcggtatgatgcttgttgtgcagatgatgtccacaacagccagtgtcagaaggaaaacat

SEQ ID NO: 2989 - DNA, 201 bp, Homo sapiens
gttcctccattgatgactcaaactgaagccagtggttgagaagaaaaatattttcaaaatgccttcaaatattttgatatcattttcacttaaaacttgtytaaatacacacacacatatatatatatacacacacatatgtatatattctggatatgcatatatatccaatggagctgtaatacaaattattacatacct

SEQ ID NO: 2990 - DNA, 201 bp, Homo sapiens
ttacaaaaaaatgaatgcaagttgatctcaaaaagatgtcataaagaataaataaaatgagaacacaatatcaacaaattatatgaacctaacaaaatagyctaaaaaataaaccaatagtattctattttcagaaatatcaaatatgtaaataccttaataaacttgaaaatgcatgcattaaactaatactgtatacta

SEQ ID NO: 2991 - DNA, 201 bp, Homo sapiens
ataattatgtgaggtgatggatatgtaaattcattttgtttgataacttcacagtttatacctatataaaagcatcacattgcatactataaatatatgtrtatgtgtgtgtgtgtgtgtgtgtgtgggtgtaaactataccttaaggctgggggaataagctaaagtggtcaacataacctattatatgataaagatata

SEQ ID NO: 2992 - DNA, 201 bp, Homo sapiens
caaatatgtaagatttaaatgacagtattttcattatattatttgtaacctgtgtaaatggaataaaatacccatttatggctatctggtgaaactgttgrgaagtaaagcctgtgcattgatcacccttctatgtttgttgttattgatacttctcctttttgttgacataacatgctatgacttcttctgtagttttac

SEQ ID NO: 2993 - DNA, 201 bp, Homo sapiens
ggttcaaccccagagtagatacctcattatcacaatgctgtaagtgaatgaacccagcctattaagcaagggaaaatttatcacacacactacttctctcyagctcacattcacataccaacaaataaatggcacaaaatacacaaaatgttttgtgatatttgcatgtatgatgtgcacatgcacatataggtaaatatt

SEQ ID NO: 2994 - DNA, 201 bp, Homo sapiens
acactacttctctccagctcacattcacataccaacaaataaatggcacaaaatacacaaaatgttttgtgatatttgcatgtatgatgtgcacatgcacrtataggtaaatatttgtgtatatgcatatataagtattcgaagttatgtacatatttttggaaaatgttggaatatatattatgacatatatttatgtga

SEQ ID NO: 2995 - DNA, 201 bp, Homo sapiens
ttcacataaagagtacagaattttggagacaatgagactgctaggaagaaggcaggaataagagggaagggaaaattggagtggaggtaagtatgaaaaaycagtaaaatctgagatgctctagaagatggttctggagtacagaagtgatgttgcatgttgaaactactagtgtttcagaaatgcaaacaccttcctaat

SEQ ID NO: 2996 - DNA, 201 bp, Homo sapiens
atataggtgtagattacaggagaatagtaaagggtcaccactgtgagatgagatgagcatgttgagaaggccttcctcttgccttctactgtgcggatacrgagaatagcaacaatgataaaaccataggagatgcaggtaagaataaagtcccctatggccagggtaatatcagcaacatacaccatcacctcattgatt

SEQ ID NO: 2997 - DNA, 201 bp, Homo sapiens
aaagtcaacctcatgataagagctgtgtgcacccaggaattggtgactgcaatagccatgaccatgctgagcaaggctacacacatatggtggttcataayagtactgtaatgaagagggaaacaaatggccacatagcggtcataggccatggtggtgaagagaaccatctcagctcccagagaccatgtgaacaagaag

SEQ ID NO: 2998 - DNA, 201 bp, Homo sapiens
cagagcgagactctgtctcaaaaaaaaaaaaaaaaaaaagattattcctaatagatacggtcttactttttgttttcctttgtgtttgtgcgttttctctrgtagcatatttttattccttgctttttattttagtgtgtctattttaagattttgccttgtggtcaccatgaagcttacagaaaatatcttgtagctaga

SEQ ID NO: 2999 - DNA, 201 bp, Homo sapiens
tgaccatgctgagcaaggctacacacatatggtggttcataacagtactgtaatgaagagggaaacaaatggccacatagcggtcataggccatggtggtraagagaaccatctcagctcccagagaccatgtgaacaagaagagctgggacatgcagcctgcatatgaaatggtattttctgatgttagcatggtcccca

SEQ ID NO: 3000 - DNA, 201 bp, Homo sapiens
actatctagttttataacattgtggtcccaaaagatattcgatagaatttcagtcttcttaaatttgcctagattatttctggggcctaatgtatagtctstcctgaaatatgtttcatttgctgttgagaagaaagtatattttgcagcttttggatgaaatgttattttaatgtctgttaagtcatttggtctagaatg

SEQ ID NO: 3001 - DNA, 201 bp, Homo sapiens
cagcatcttcggtatgatgcttgttgtgcagatgatgtccacaacagccagtgtcagaaggaaaacatacatgggcgtatgcaaggtgttgttatagattwtggcaatgatgatgagcatgttgccgagaaaagccacaagatagacaatgagaaaaaagaggaagataattccctggagttcaggctttttggtgaggcc

SEQ ID NO: 3002 - DNA, 201 bp, Homo sapiens
atggaaagaatccctgtgttgttaggagataacatgaggagtgtgtgtacttagggacttaattcttgattggacacaactttgcagcaggaattcccatwtgatggagttctgtattccaggcaatatactctgttttccagactaatcccattctctgatgtatgttcctccattgatgactcaaactgaagccagtgg

SEQ ID NO: 3003 - DNA, 201 bp, Homo sapiens
taggcaagtgttagtttgcttgatggtatcctataattcccataggccttttccatttttgtttattcttttctttttacttctctgaattgataatttcrtatgtcatattttccagctaactggtttttctgcttgatcaaattagttgttgaagcattgtatttaattgttcaattaaattattttattctttatttt

SEQ ID NO: 3004 - DNA, 201 bp, Homo sapiens
ggatatgcatatatatccaatggagctgtaatacaaattattacatacctcaataatttagttaattgcatggtacatttaggtgtccttgagatatacaygagcaaagatacttgaaataatacaagctgacagggctaattatagtgaggatatttcagatgaaaaatgcccaacctagtattttgaggctgtatattc

SEQ ID NO: 3005 - DNA, 201 bp, Homo sapiens
ggatacggagaatagcaacaatgataaaaccataggagatgcaggtaagaataaagtcccctatggccagggtaatatcagcaacatacaccatcacctcrttgattcttacagggctacaggacaaagccagcaatgggggtatctcacagaagaagtggtcaatggtgtttggcccacagaaagtcaacctcatgataa

SEQ ID NO: 3006 - DNA, 201 bp, Homo sapiens
ttctgaaggatagatttgctggatacattattcttggttggcagatttttttctttctctagcactttgaatgtatcatcccactatctcctgccctgaakaatttctgctgagaaattttctgcatgctgtattggagctcccttgaatgtgatatgttttttatctcttatttctttgagtatttttctttgtttttca

SEQ ID NO: 3007 - DNA, 201 bp, Homo sapiens
ggtttagtcatgaagtctttgcccatgcctatgtcctgaatggtattggctagcttttcatctagggttttttatggttttaggttttacgtttacgtctktaatccatctcgagttattttttgtataaggtgtaaggaaggggcccagtttcagttttctgcatatgactagccagttttcccaacactattaaataga

SEQ ID NO: 3008 - DNA, 201 bp, Homo sapiens
atataatgaaacattgcatatatacatatatataacagtttatgatatatataacatatatgtataacagttctatatccaaggttatataacatatatcyaaggttatatatataacagtttatgatatatataacaacatgacattacatatacatatacagtaaagttatatataatatgttatatataacataagtg

SEQ ID NO: 3009 - DNA, 201 bp, Homo sapiens
aattcattttgtttgataacttcacagtttatacctatataaaagcatcacattgcatactataaatatatgtatatgtgtgtgtgtgtgtgtgtgtgtgkgtgtaaactataccttaaggctgggggaataagctaaagtggtcaacataacctattatatgataaagatatatctatgttggaaatttttctgatattg

SEQ ID NO: 3010 - DNA, 201 bp, Homo sapiens
cctatttgtcaattttggcttttgttgcaattgcttttggtggtttagtcatgaagtctttgcccatgcctatgtcctgaatggtattggctagcttttcwtctagggttttttatggttttaggttttacgtttacgtctttaatccatctcgagttattttttgtataaggtgtaaggaaggggcccagtttcagtttt

SEQ ID NO: 3011 - DNA, 201 bp, Homo sapiens
atagcaacaatgataaaaccataggagatgcaggtaagaataaagtcccctatggccagggtaatatcagcaacatacaccatcacctcattgattcttasagggctacaggacaaagccagcaatgggggtatctcacagaagaagtggtcaatggtgtttggcccacagaaagtcaacctcatgataagagctgtgtgc

SEQ ID NO: 3012 - DNA, 201 bp, Homo sapiens
atgtatagctggaagcagggcggatataggtgtagattacaggagaatagtaaagggtcaccactgtgagatgagatgagcatgttgagaaggccttcctmttgccttctactgtgcggatacggagaatagcaacaatgataaaaccataggagatgcaggtaagaataaagtcccctatggccagggtaatatcagcaa

SEQ ID NO: 3013 - DNA, 201 bp, Homo sapiens
actatctcctgccctgaataatttctgctgagaaattttctgcatgctgtattggagctcccttgaatgtgatatgttttttatctcttatttctttgagyatttttctttgtttttcatttttgataatctgattatgatgtgctttataaactcctcttttgttgttccattggcagcctctgagcttccagtacctat

SEQ ID NO: 3014 - DNA, 201 bp, Homo sapiens
tttaatttgttttgtgtttgtttcttctgtcttttatttctctgcttttcatttattgattttctgatgttttctttaagatttttaaggattctaacttrtgtatagcatttttattacatcacaatgtatagtttttttataccaactaatgttgttataatttttctttcaaccataaaatataatttaaggaactca

SEQ ID NO: 3015 - DNA, 201 bp, Homo sapiens
acaactgctccagatgtatttgtaagacaaaattccaacatgttttcataattgtggaaatatattgtaaaaatatgctttactaatcacagcaaatgatrtatttcttccaacttgttataagatgtgttgtatattgtatatttttattatgtagcctcagttttggcattctcactctctcaacctaactttatttca

SEQ ID NO: 3016 - DNA, 201 bp, Homo sapiens
ctcaaactgaagccagtggttgagaagaaaaatattttcaaaatgccttcaaatattttgatatcattttcacttaaaacttgtctaaatacacacacacatatatatatatacacacacatatgtatatattctggatatgcatatatatccaatggagctgtaatacaaattattacatacctcaataatttagttaat

SEQ ID NO: 3017 - DNA, 201 bp, Homo sapiens; identical to SEQ ID NO: 358

SEQ ID NO: 3018 - DNA, 201 bp, Homo sapiens
gaacatgtttatagaaaccataatttaaaatataatagaatgactcaatgttccacttttaattcatagaaaaagtaattttctattgatatatagaatgyatacctacataggcgtataaatttatagaaaatacatatacatataacttcagttatatctatttatatgtatatgtatatttctatttgtgtacattgg

SEQ ID NO: 3019 - DNA, 201 bp, Homo sapiens
tcaaactgaagccagtggttgagaagaaaaatattttcaaaatgccttcaaatattttgatatcattttcacttaaaacttgtctaaatacacacacacatatatatatatacacacacatatgtatatattctggatatgcatatatatccaatggagctgtaatacaaattattacatacctcaataatttagttaatt

SEQ ID NO: 3020 - DNA, 201 bp, Homo sapiens
tgtttttgatgtgtcccataggttttggtataatgtgtttccatttttgtttgtttcaaaaatttttaaacttttagttaatttcttcactggccctttgkctattcaagagcatgttgtttgtttaattctcatgtctctgtaaattctgcaaattttcttctggaattgactatctagttttataacattgtggtccca

SEQ ID NO: 3021 - DNA, 201 bp, Homo sapiens
cagttatatctatttatatgtatatgtatatttctatttgtgtacattgggaacttaacatttatcagccaaagtagactttttttttttttttaagttcyggggtacatgtacaggatgtgcaggtttgttatgtaggtaaacatgtgccatggtggtttgctgcacctatcaacccatcacctaggtattaagaccagc

SEQ ID NO: 3022 - DNA, 201 bp, Homo sapiens
aagtagactttttttttttttttaagttctggggtacatgtacaggatgtgcaggtttgttatgtaggtaaacatgtgccatggtggtttgctgcacctaycaacccatcacctaggtattaagaccagcatgccttagctttttttcctgatactctccctctctacgccaccctccacccaacaggtcctagtgtgtgt

SEQ ID NO: 3023 - DNA, 201 bp, Homo sapiens
tcatcggtttgagaagcacattgccaaaattcactggaccagctatttgttttgctgttatataatggcaagataattggatttaaaaatataaaatgtarggttgtgtcttcatttcatcatagctatagattggccatttaagctctgtaagatttggatttattatttctaaacattgaataaattgaaataaatatc

SEQ ID NO: 3024 - DNA, 201 bp, Homo sapiens
gtagactttttcagaataaatcaggaactgttagtagtaattacactggtataagatgtttaaaataggcctgtcttaggctgggcgcggtgcctcacacytgtaatctcagcactttgggaggcagaggcaggtggattacctgaggacaggagtttgagaccagcctggctaacatagcgaaaccctgcctctactaaa

SEQ ID NO: 3025 - DNA, 201 bp, Homo sapiens
ctgggcgcggtgcctcacacctgtaatctcagcactttgggaggcagaggcaggtggattacctgaggacaggagtttgagaccagcctggctaacatagygaaaccctgcctctactaaaaatacaagaaattagccagatgtggtggttggtgcatgtagtcccagctacttgggaggctgaggcaggagaatcacttg

SEQ ID NO: 3026 - DNA, 201 bp, Homo sapiens
taatgttgttataatttttctttcaaccataaaatataatttaaggaactcatgagagaaatatagtatattgtaattatttctctttgtacaaaatttgytttttcctgtatgacattgtggctttcctatctctgtagaaaaccatatatactgtactcttaaaaatactaagagagtgggtatacagtgtttccacca

SEQ ID NO: 3027 - DNA, 201 bp, Homo sapiens
cagtcttcttaaatttgcctagattatttctggggcctaatgtatagtctgtcctgaaatatgtttcatttgctgttgagaagaaagtatattttgcagcytttggatgaaatgttattttaatgtctgttaagtcatttggtctagaatggactttagatcctttgttgcttttttatccagatgatctattaattgatg

SEQ ID NO: 3028 - DNA, 201 bp, Homo sapiens
agagtgggtatacagtgtttccaccatgaaaatgataattatgtgaggtaatgcatatcatatgttaattaactaaatgtagtcactccacaatgcatctrtacttcaaaatgttaggctgtaaacaataatacataaattttatgtcaattatttttgaattacaaaaaaatgaatgcaagttgatctcaaaaagatgtc

SEQ ID NO: 3029 - DNA, 201 bp, Homo sapiens
gtcccataggttttggtataatgtgtttccatttttgtttgtttcaaaaatttttaaacttttagttaatttcttcactggccctttggctattcaagagmatgttgtttgtttaattctcatgtctctgtaaattctgcaaattttcttctggaattgactatctagttttataacattgtggtcccaaaagatattcga

SEQ ID NO: 3030 - DNA, 201 bp, Homo sapiens
aacaaaatgttataattataaaacaaaatgttatacgtgtaaaacatgaaatgttttatcattttctttatcaatttatctgatgatggacacaactgctycagatgtatttgtaagacaaaattccaacatgttttcataattgtggaaatatattgtaaaaatatgctttactaatcacagcaaatgatatatttcttc

SEQ ID NO: 3031 - DNA, 201 bp, Homo sapiens
tcttctaggatattcagtttgttgtcatataattgcttataatagtctcttatgatcctttgtgtttctgtggtatcatttgtaatgtctcctttttcatrttttatctatttgaatattgtctcttttttcttagtttgtctacctaaagatttgtgtgtttatctttaaaaaaaacccaactctttgtttcattgacct

SEQ ID NO: 3032 - DNA, 201 bp, Homo sapiens
atttgcatttctctaatgaccagtgatgacgagctttctttcatgtttgttggtcgcataaatgtcttcttttgagaagtatctgttcatatcctttgccyacttttttatgaggttgtttgactttttcttgtaaatttgtttaagttccttgtagattgtggaattagccctttgtcagatggatagattgcaaaaatt

SEQ ID NO: 3033 - DNA, 201 bp, Homo sapiens
ttgctgagtcaaatggtatttctagttctatatctcagaggaatcgccacactgtcttacacaatggttgaactaattttcactcccacagtgtaaaaatsttcctatttctccacatcctctccagcatctgttctttactgactttttaatgatcgctattctaaacgggtgtgagatggtatctcattgtggttttga

SEQ ID NO: 3034 - DNA, 201 bp, Homo sapiens
gcattatctcaatgtttataattttgtgcactattccaatactaaataacttgaaggtaaaagctctgtgtattattccttgatatagaaattttagtaamtattaagaattaaaagacacataggaaaaggtagataaaataatgaagtgaagaataaatggtgtgttatatgctctgacaaattttccttattggaaag

SEQ ID NO: 3035 - DNA, 201 bp, Homo sapiens
gatatatctttatcatataataggttatgttgaccactttagcttattcccccagccttaaggtatagtttacacccacacacacacacacacacacacayatacatatatttatagtatgcaatgtgatgcttttatataggtataaactgtgaagttatcaaacaaaatgaatttacatatccatcacctcacataatt

SEQ ID NO: 3036 - DNA, 201 bp, Homo sapiens
aagttcttggaaaacagctgatattgtgaggctgatgaatgatgttagccctattttaattagatgtttcaattattatgagtattgctggaaacctccaycatatttcttcaaatatttatcctcagttccctatcaaggggaaaccctctatataaatgaagagacgttcaaaactttaccttctcagtacaactgtct

SEQ ID NO: 3037 - DNA, 201 bp, Homo sapiens; identical to SEQ ID NO: 366

SEQ ID NO: 3038 - DNA, 201 bp, Homo sapiens; identical to SEQ ID NO: 359

SEQ ID NO: 3039 - DNA, 201 bp, Homo sapiens
tatatctttatcatataataggttatgttgaccactttagcttattcccccagccttaaggtatagtttacacccacacacacacacacacacacacatayacatatatttatagtatgcaatgtgatgcttttatataggtataaactgtgaagttatcaaacaaaatgaatttacatatccatcacctcacataattat

SEQ ID NO: 3040 - DNA, 201 bp, Homo sapiens
catctcctgtgaactttaagaattttttgaaacttgcccttgtgtacttgggactgggatctccttcttcataccctgctttaggaaaattgatcagtaayagttacgtggataaataacattgataaataacagtacttacattaataagtgacagttctccaagaaaaaaaaaaacaaagcttttttcttcaacaatga

SEQ ID NO: 3041 - DNA, 201 bp, Homo sapiens
tcgcactcctcaaaacctgcttacttttggagacaataacacattcctgtggactaaaagcagagttattcatgagaataaaaattgtcccatataagggwagatatgcaggagaaagaagaacagtataaatggtaaatataaaggaatattgactaagcaataaaaatcacgggtgctagggtttcagatatcacactc

SEQ ID NO: 3042 - DNA, 201 bp, Homo sapiens; identical to SEQ ID NO: 363

SEQ ID NO: 3043 - DNA, 201 bp, Homo sapiens
gtgaaccacacaccaggccagttttattggaatttatcttctctttcctcttccctttccactcgcactcctcaaaacctgcttacttttggagacaatamcacattcctgtggactaaaagcagagttattcatgagaataaaaattgtcccatataagggaagatatgcaggagaaagaagaacagtataaatggtaaa

SEQ ID NO: 3044 - DNA, 201 bp, Homo sapiens
ctgcccaccccagcctgccaaagtgctgggactacaggtgtgaaccacacaccaggccagttttattggaatttatcttctctttcctcttccctttccamtcgcactcctcaaaacctgcttacttttggagacaataacacattcctgtggactaaaagcagagttattcatgagaataaaaattgtcccatataaggg

SEQ ID NO: 3045 - DNA, 201 bp, Homo sapiens
catactacttcctctctcagaaatctaaaatttctcccttatcgactacttaataacaaaataattccttaccttagaatataataatctcaagtagtccyatcttttcttatttttatttttatttcattatgacagggtctggctctgtcgcccaggctgcagtgcagtggcacaatctcggctcactgcaacctccgc

SEQ ID NO: 3046 - DNA, 201 bp, Homo sapiens
cctctatgatgccttcagggctggctttctaaaactggggtatgtcacatactacttcctctctcagaaatctaaaatttctcccttatcgactacttaayaacaaaataattccttaccttagaatataataatctcaagtagtcccatcttttcttatttttatttttatttcattatgacagggtctggctctgtcgc

SEQ ID NO: 3047 - DNA, 201 bp, Homo sapiens
aaactcccaacctcaggtgatgcgcccgtcttggcctcccaaagtgctgggattacaggcgtgagccaccgcacccggccctattaattcttaaacttatyctcatgattcagcaaaatagcatggtgaatggcacataaatcaagcatcattgtgtattattagtaaatgtttggtgttctaaagtaagtaaacagaatg

SEQ ID NO: 3048 - DNA, 201 bp, Homo sapiens; identical to SEQ ID NO: 367

SEQ ID NO: 3049 - DNA, 201 bp, Homo sapiens
cacttatgttatatataacatattatatataactttactgtatatgtatatgtaatgtcatgttgttatatatatcataaactgttatatatataaccttrgatatatgttatataaccttggatatagaactgttatacatatatgttatatatatcataaactgttatatatatgtatatatgcaatgtttcattatat

SEQ ID NO: 3050 - DNA, 201 bp, Homo sapiens
gatcaccaaaaagctgaaaggggtctgttatcttataaatttatctcaagaagctttgacgtcagatttatgattaagatgaaatgaccagaccagaaccrcttactatttgaaaacatattcaacacatagtattttttaaattagttaatatcacttcagttcagatctttcaaagattctaatatttgaattaaattt

SEQ ID NO: 3051 - DNA, 201 bp, Homo sapiens
tgagttccttaaattatattttatggttgaaagaaaaattataacaacattagttggtataaaaaaactatacattgtgatgtaataaaaatgctatacayaagttagaatccttaaaaatcttaaagaaaacatcagaaaatcaataaatgaaaagcagagaaataaaagacagaagaaacaaacacaaaacaaattaaa

SEQ ID NO: 3052 - DNA, 201 bp, Homo sapiens
ttatgattaagatgaaatgaccagaccagaaccgcttactatttgaaaacatattcaacacatagtattttttaaattagttaatatcacttcagttcagrtctttcaaagattctaatatttgaattaaattttaagaatcaactatcttgtctatattttcctcttccaaatcatctcgtattcaaaataaaaatccat

SEQ ID NO: 3053 - DNA, 201 bp, Homo sapiens
tgaaataaagttaggttgagagagtgagaatgccaaaactgaggctacataataaaaatatacaatatacaacacatcttataacaagttggaagaaatayatcatttgctgtgattagtaaagcatatttttacaatatatttccacaattatgaaaacatgttggaattttgtcttacaaatacatctggagcagttgt

SEQ ID NO: 3054 - DNA, 201 bp, Homo sapiens
attaactaaattattgaggtatgtaataatttgtattacagctccattggatatatatgcatatccagaatatatacatatgtgtgtgtatatatatatatgtgtgtgtgtatttagacaagttttaagtgaaaatgatatcaaaatatttgaaggcattttgaaaatatttttcttctcaaccactggcttcagtttgag

SEQ ID NO: 3055 - DNA, 201 bp, Homo sapiens
agttaaaggcagccagaaaagcactgatccccaagataactgattccactaaaacaagcatgtttgccaggtgcatggactggcacaacagggcccccatyggtgagatatcacagtaatactggttaactcgatcaggcttgcagaaagacaggcagagggtagacactacgtggaggaggaggaaatttagaaacccag

SEQ ID NO: 3056 - DNA, 201 bp, Homo sapiens
ccaatgtacacaaatagaaatatacatatacatataaatagatataactgaagttatatgtatatgtattttctataaatttatacgcctatgtaggtatrcattctatatatcaatagaaaattactttttctatgaattaaaagtggaacattgagtcattctattatattttaaattatggtttctataaacatgttc

SEQ ID NO: 3057 - DNA, 201 bp, Homo sapiens
aattaactaaattattgaggtatgtaataatttgtattacagctccattggatatatatgcatatccagaatatatacatatgtgtgtgtatatatatatatgtgtgtgtgtatttagacaagttttaagtgaaaatgatatcaaaatatttgaaggcattttgaaaatatttttcttctcaaccactggcttcagtttga

SEQ ID NO: 3058 - DNA, 201 bp, Homo sapiens
gctggtcttaatacctaggtgatgggttgataggtgcagcaaaccaccatggcacatgtttacctacataacaaacctgcacatcctgtacatgtaccccrgaacttaaaaaaaaaaaaaaagtctactttggctgataaatgttaagttcccaatgtacacaaatagaaatatacatatacatataaatagatataactg

SEQ ID NO: 3059 - DNA, 201 bp, Homo sapiens
tattttgtgttttgcttgaaagtatatagtagagaggtgaatagcaaattttttggagtcagatgatctaggtgttaatcctggcacttatgagacacacaatctacctactattatttttactcccatgcattgtttgcttatcaactacataaagataaaaatattaaagactcaatgtgcttgtgaggacaaaattgt

SEQ ID NO: 3060 - DNA, 201 bp, Homo sapiens
aaaataaaaatccatattctttcagatctgtcttatatttcttagtttttgtgtacacttgccatattattttgtgttttgcttgaaagtatatagtagaraggtgaatagcaaattttttggagtcagatgatctaggtgttaatcctggcacttatgagacacacaatctacctactattatttttactcccatgcatt

SEQ ID NO: 3061 - DNA, 201 bp, Homo sapiens
acacacactaggacctgttgggtggagggtggcgtagagagggagagtatcaggaaaaaaagctaaggcatgctggtcttaatacctaggtgatgggttgrtaggtgcagcaaaccaccatggcacatgtttacctacataacaaacctgcacatcctgtacatgtaccccagaacttaaaaaaaaaaaaaaagtctactt

SEQ ID NO: 3062 - DNA, 201 bp, Homo sapiens
ttattttgtgttttgcttgaaagtatatagtagagaggtgaatagcaaattttttggagtcagatgatctaggtgttaatcctggcacttatgagacacacaatctacctactattatttttactcccatgcattgtttgcttatcaactacataaagataaaaatattaaagactcaatgtgcttgtgaggacaaaattg

SEQ ID NO: 3063 - DNA, 201 bp, Homo sapiens
tgtgaggacaaaattgtatcatctctgcagaggacctaacatagagcctgtcacatgtcaaagacccaaataatggtggctgtaacattccttcagtatgrgtaaattaatactaaagctagagattctgaaatggattatggattagacaaaagctctatttttttcttccagtttaaagagttaaagatgaatttatca

SEQ ID NO: 3064 - DNA, 201 bp, Homo sapiens
tttagtagaggcagggtttcgctatgttagccaggctggtctcaaactcctgtcctcaggtaatccacctgcctctgcctcccaaagtgctgagattacargtgtgaggcaccgcgcccagcctaagacaggcctattttaaacatcttataccagtgtaattactactaacagttcctgatttattctgaaaaagtctac

SEQ ID NO: 3065 - DNA, 201 bp, Homo sapiens
agctctatttttttcttccagtttaaagagttaaagatgaatttatcagtagctaaaatttggttaacaaattattgaggctacaaggcatgagagagcaraacagactagatttgtggacgcacactcaaaaacactttttatttatgtctctgtttagataccagaggtacaatatgatctctgaaaacttaaagaaca

SEQ ID NO: 3066 - DNA, 201 bp, Homo sapiens
caagtgattctcctgcctcagcctcccaagtagctgggactacatgcaccaaccaccacatctggctaatttcttgtatttttagtagaggcagggtttcrctatgttagccaggctggtctcaaactcctgtcctcaggtaatccacctgcctctgcctcccaaagtgctgagattacaggtgtgaggcaccgcgcccag

SEQ ID NO: 3067 - DNA, 201 bp, Homo sapiens
tggtggaaacactgtatacccactctcttagtatttttaagagtacagtatatatggttttctacagagataggaaagccacaatgtcatacaggaaaaarcaaattttgtacaaagagaaataattacaatatactatatttctctcatgagttccttaaattatattttatggttgaaagaaaaattataacaacatta

SEQ ID NO: 3068 - DNA, 201 bp, Homo sapiens
gacatctttttgagatcaacttgcattcatttttttgtaattcaaaaataattgacataaaatttatgtattattgtttacagcctaacattttgaagtayagatgcattgtggagtgactacatttagttaattaacatatgatatgcattacctcacataattatcattttcatggtggaaacactgtatacccactct

SEQ ID NO: 3069 - DNA, 201 bp, Homo sapiens
gatttgtatgcaggtattgactctccttaatctccgccaccttttctctttttacaatttattatactgccttcacactgatcttcctttcctacctctcygatcacttcgaaacctagaaaattaagaagtagctactttcacttcttttctagtacttcaacagtgaagctaagctgaagagaatgtaacattctcctt

SEQ ID NO: 3070 - DNA, 201 bp, Homo sapiens
gaagaaatatatcatttgctgtgattagtaaagcatatttttacaatatatttccacaattatgaaaacatgttggaattttgtcttacaaatacatctgragcagttgtgtccatcatcagataaattgataaagaaaatgataaaacatttcatgttttacacgtataacattttgttttataattataacattttgtt

SEQ ID NO: 3071 - DNA, 201 bp, Homo sapiens
gtggcaaaacttggacaatccctggctaaccaagtggttgattatcctttgtagggtagggccatgatttgtatgcaggtattgactctccttaatctccrccaccttttctctttttacaatttattatactgccttcacactgatcttcctttcctacctctctgatcacttcgaaacctagaaaattaagaagtagct

SEQ ID NO: 3072 - DNA, 201 bp, Homo sapiens
gaccaactttcccaggttgcctgagactgacaggtctcctaggatgtgggtctttcagtggcaaaacttggacaatccctggctaaccaagtggttgattrtcctttgtagggtagggccatgatttgtatgcaggtattgactctccttaatctccgccaccttttctctttttacaatttattatactgccttcacact

SEQ ID NO: 3073 - DNA, 201 bp, Homo sapiens
tttcagacaggaattgcattggcttcagatgtcctagggtgaccaactttcccaggttgcctgagactgacaggtctcctaggatgtgggtctttcagtgrcaaaacttggacaatccctggctaaccaagtggttgattatcctttgtagggtagggccatgatttgtatgcaggtattgactctccttaatctccgcca

SEQ ID NO: 3074 - DNA, 201 bp, Homo sapiens
agaataaaatgctttcagacaggaattgcattggcttcagatgtcctagggtgaccaactttcccaggttgcctgagactgacaggtctcctaggatgtgrgtctttcagtggcaaaacttggacaatccctggctaaccaagtggttgattatcctttgtagggtagggccatgatttgtatgcaggtattgactctcct

SEQ ID NO: 3075 - DNA, 201 bp, Homo sapiens
gctgaaataactgagaatgtatattacattttctacatcgtcataatctaatagcataatgattagcataaactgtggcctttaaatatttaatgaataaagtcacctttattataattattatagaattaattgaattatcttttattgccctaacccaatctggttattcttaaattattataatatttattcaatctt

SEQ ID NO: 3076 - DNA, 201 bp, Homo sapiens
tgctgaaataactgagaatgtatattacattttctacatcgtcataatctaatagcataatgattagcataaactgtggcctttaaatatttaatgaataaagtcacctttattataattattatagaattaattgaattatcttttattgccctaacccaatctggttattcttaaattattataatatttattcaatct

SEQ ID NO: 3077 - DNA, 201 bp, Homo sapiens
ataacaaaataattccttaccttagaatataataatctcaagtagtcccatcttttcttatttttatttttatttcattatgacagggtctggctctgtcrcccaggctgcagtgcagtggcacaatctcggctcactgcaacctccgcctcccaggctccagcgattctcctgcctcagcgtcccaagtagctgggatta

SEQ ID NO: 3078 - DNA, 201 bp, Homo sapiens
atgttagtcaggctggtctcaaactcccaacctcaggtgatgcgcccgtcttggcctcccaaagtgctgggattacaggcgtgagccaccgcacccggccstattaattcttaaacttatcctcatgattcagcaaaatagcatggtgaatggcacataaatcaagcatcattgtgtattattagtaaatgtttggtgttc

SEQ ID NO: 3079 - DNA, 201 bp, Homo sapiens
aggtatgtaataatttgtattacagctccattggatatatatgcatatccagaatatatacatatgtgtgtgtatatatatatatgtgtgtgtgtatttaracaagttttaagtgaaaatgatatcaaaatatttgaaggcattttgaaaatatttttcttctcaaccactggcttcagtttgagtcatcaatggaggaac

SEQ ID NO: 3080 - DNA, 201 bp, Homo sapiens
tgtgccaccatgcccagctaattttgtatttttattagagatggggtttctccatgttagtcaggctggtctcaaactcccaacctcaggtgatgcgcccrtcttggcctcccaaagtgctgggattacaggcgtgagccaccgcacccggccctattaattcttaaacttatcctcatgattcagcaaaatagcatggtg

SEQ ID NO: 3081 - DNA, 201 bp, Homo sapiens
tagtatacagtattagtttaatgcatgcattttcaagtttattaaggtatttacatatttgatatttctgaaaatagaatactattggtttattttttagrctattttgttaggttcatataatttgttgatattgtgttctcattttatttattctttatgacatctttttgagatcaacttgcattcatttttttgtaa

SEQ ID NO: 3082 - DNA, 201 bp, Homo sapiens
agtagctggattacaggcatgtgccaccatgcccagctaattttgtatttttattagagatggggtttctccatgttagtcaggctggtctcaaactcccracctcaggtgatgcgcccgtcttggcctcccaaagtgctgggattacaggcgtgagccaccgcacccggccctattaattcttaaacttatcctcatgat

SEQ ID NO: 3083 - DNA, 201 bp, Homo sapiens
gtaaaactacagaagaagtcatagcatgttatgtcaacaaaaaggagaagtatcaataacaacaaacatagaagggtgatcaatgcacaggctttacttcycaacagtttcaccagatagccataaatgggtattttattccatttacacaggttacaaataatataatgaaaatactgtcatttaaatcttacatatttg

SEQ ID NO: 3084 - DNA, 201 bp, Homo sapiens
cagagtttcgctcttgttgcccaggtcggagtgcaatggcgcgatctcggctcactgaaacctccgcctcccaggttcaagcaattctcctgcctcagccycttgagtagctggattacaggcatgtgccaccatgcccagctaattttgtatttttattagagatggggtttctccatgttagtcaggctggtctcaaac

SEQ ID NO: 3085 - DNA, 201 bp, Homo sapiens
aatatttacctatatgtgcatgtgcacatcatacatgcaaatatcacaaaacattttgtgtattttgtgccatttatttgttggtatgtgaatgtgagctrgagagaagtagtgtgtgtgataaattttcccttgcttaataggctgggttcattcacttacagcattgtgataatgaggtatctactctggggttgaacc

SEQ ID NO: 3086 - DNA, 201 bp, Homo sapiens
tcacataaatatatgtcataatatatattccaacattttccaaaaatatgtacataacttcgaatacttatatatgcatatacacaaatatttacctataygtgcatgtgcacatcatacatgcaaatatcacaaaacattttgtgtattttgtgccatttatttgttggtatgtgaatgtgagctggagagaagtagtgt

SEQ ID NO: 3087 - DNA, 201 bp, Homo sapiens
attaggaaggtgtttgcatttctgaaacactagtagtttcaacatgcaacatcacttctgtactccagaaccatcttctagagcatctcagattttactgrtttttcatacttacctccactccaattttcccttccctcttattcctgccttcttcctagcagtctcattgtctccaaaattctgtactctttatgtgaa

SEQ ID NO: 3088 - DNA, 201 bp, Homo sapiens; identical to SEQ ID NO: 362

SEQ ID NO: 3089 - DNA, 201 bp, Homo sapiens; identical to SEQ ID NO: 364

SEQ ID NO: 3090 - DNA, 201 bp, Homo sapiens; identical to SEQ ID NO: 365

SEQ ID NO: 3091 - DNA, 201 bp, Homo sapiens
ccactggcttcagtttgagtcatcaatggaggaacatacatcagagaatgggattagtctggaaaacagagtatattgcctggaatacagaactccatcawatgggaattcctgctgcaaagttgtgtccaatcaagaattaagtccctaagtacacacactcctcatgttatctcctaacaacacagggattctttccat

SEQ ID NO: 3092 - DNA, 201 bp, Homo sapiens
gaatatacagcctcaaaatactaggttgggcatttttcatctgaaatatcctcactataattagccctgtcagcttgtattatttcaagtatctttgctcrtgtatatctcaaggacacctaaatgtaccatgcaattaactaaattattgaggtatgtaataatttgtattacagctccattggatatatatgcatatcc

SEQ ID NO: 3093 - DNA, 201 bp, Homo sapiens
agctactttcacttcttttctagtacttcaacagtgaagctaagctgaagagaatgtaacattctccttaaacgatgcttgaactagaatcacctctgacktagccctacctaatagaaagtggcctagaatgaaactgtctgacagaagtcattcaggaatatgagagtacgaggaaatttgtatcactctgtccccata

SEQ ID NO: 3094 - DNA, 201 bp, Homo sapiens
caatatcagaaaaatttccaacatagatatatctttatcatataataggttatgttgaccactttagcttattcccccagccttaaggtatagtttacacmcacacacacacacacacacacacatatacatatatttatagtatgcaatgtgatgcttttatataggtataaactgtgaagttatcaaacaaaatgaatt

SEQ ID NO: 3095 - DNA, 201 bp, Homo sapiens; identical to SEQ ID NO: 360

SEQ ID NO: 3096 - DNA, 201 bp, Homo sapiens
atggtctaagttttttctgtatgtagttttatatcactttcattttattctggcaattctatatcactttcattttattctggcaattcattattataaawaaatcctattgttaaacttaaattgataatgttctacaaaccaggtggtgcctgtaaacacagtctccatttaagatggacaaatactgtctccctgtga

SEQ ID NO: 3097 - DNA, 201 bp, Homo sapiens
aaaaaaatcctattgttaaacttaaattgataatgttctacaaaccaggtggtgcctgtaaacacagtctccatttaagatggacaaatactgtctccctstgaattcatcctctatgatgccttcagggctggctttctaaaactggggtatgtcacatactacttcctctctcagaaatctaaaatttctcccttatcg

SEQ ID NO: 3098 - DNA, 201 bp, Homo sapiens; identical to SEQ ID NO: 361

SEQ ID NO: 3099 - DNA, 201 bp, Homo sapiens
gatatttatttcaatttattcaatgtttagaaataataaatccaaatcttacagagcttaaatggccaatctatagctatgatgaaatgaagacacaaccytacattttatatttttaaatccaattatcttgccattatataacagcaaaacaaatagctggtccagtgaattttggcaatgtgcttctcaaaccgatga

SEQ ID NO: 3100 - DNA, 201 bp, Homo sapiens
ttagaaatcatggctctgtctctctaacatctgatatttatttcaatttattcaatgtttagaaataataaatccaaatcttacagagcttaaatggccartctatagctatgatgaaatgaagacacaaccctacattttatatttttaaatccaattatcttgccattatataacagcaaaacaaatagctggtccagt

SEQ ID NO: 3101 - DNA, 201 bp, Homo sapiens
acataaagataaaaatattaaagactcaatgtgcttgtgaggacaaaattgtatcatctctgcagaggacctaacatagagcctgtcacatgtcaaagacycaaataatggtggctgtaacattccttcagtatgggtaaattaatactaaagctagagattctgaaatggattatggattagacaaaagctctatttttt

SEQ ID NO: 3102 - DNA, 201 bp, Homo sapiens
atcctggcacttatgagacacacaatctacctactattatttttactcccatgcattgtttgcttatcaactacataaagataaaaatattaaagactcartgtgcttgtgaggacaaaattgtatcatctctgcagaggacctaacatagagcctgtcacatgtcaaagacccaaataatggtggctgtaacattccttc

SEQ ID NO: 3103 - DNA, 201 bp, Homo sapiens
gacagttctccaagaaaaaaaaaaacaaagcttttttcttcaacaatgaaagctcagtttatatttgagtgcctgtttttggtgattaagatcaccaaaargctgaaaggggtctgttatcttataaatttatctcaagaagctttgacgtcagatttatgattaagatgaaatgaccagaccagaaccgcttactatttg

SEQ ID NO: 3104 - DNA, 201 bp, Homo sapiens
tttaagaattttttgaaacttgcccttgtgtacttgggactgggatctccttcttcataccctgctttaggaaaattgatcagtaacagttacgtggatamataacattgataaataacagtacttacattaataagtgacagttctccaagaaaaaaaaaaacaaagcttttttcttcaacaatgaaagctcagtttata

SEQ ID NO: 3105 - DNA, 201 bp, Homo sapiens
tttcagatatcacactcatgtttttggttagtattttcattattttatccaagaccaaattaagtgttctatgttactatataaaattgttttataactcyaatgattttctcatggtcccaaagaatattagtttattgttcattgttttatcactgatgctgaaataactgagaatgtatattacattttctacatcgt

SEQ ID NO: 3106 - DNA, 201 bp, Homo sapiens
ttgactaagcaataaaaatcacgggtgctagggtttcagatatcacactcatgtttttggttagtattttcattattttatccaagaccaaattaagtgtkctatgttactatataaaattgttttataactctaatgattttctcatggtcccaaagaatattagtttattgttcattgttttatcactgatgctgaaat

SEQ ID NO: 3107 - DNA, 201 bp, Homo sapiens
gggtcattaaaggaaactgaacattgaaaaaaaaaaaaaaaaaaaaaagactggatccaattgctgaaaggacttgaaaagaattatagatgcattttttwaaaagtatcatatatgtttagattttactcatccttgttgctttcttaccatttattctagatagtttaatattatatgctttagtgaaagctaacttat

SEQ ID NO: 3108 - DNA, 201 bp, Homo sapiens
ttactatttatggagaataagttggtattctaattactagtttcattaaaacagttcccctaaggacccctacctgataacacttttaagactggatccakcctttctttgcggaatcaccatggcggctgggaccctgtacacgtatcctgaaaactggagggccttcaaggctctcatcgctgctcagtacagcggggc

SEQ ID NO: 3109 - DNA, 201 bp, Homo sapiens
ctttctttgaggaataagaatttcctcacatttcctaagaatactcaggatcaagtataagtttaggaatcttggactttcttatttgatcctgaactcaratttatagcccagaaattttggtggctaagtgggtcaaaagattcctaggcaaaccttaaagaagacccttggactagccaaagcatttgtttagaatat

SEQ ID NO: 3110 - DNA, 201 bp, Homo sapiens
ttttttttttttttgtgagatggagtcttactctgtcgcccaggccggagtgcagtgatgtgatcttggctcactgcaacctccgcctcccgagttcaagygattctcctgcctcagcctcctgagtagctgggattgcaggtgtgcaccaccatgtctggctaatttttgtatttgtagtagagacagggtttcaccatg

SEQ ID NO: 3111 - DNA, 201 bp, Homo sapiens
ctgtgtggtgctcgatatatttgtggtaatcattacatgattcatatcaaatcatcacatagttcaccttgaatatatatgattctatttgtcaattataycttaataaagctggaaaaaccaaactgcttaatctcttttctgttgcttataacagaatacgtaaaactgggtaatttataaggaaaagaaatttgttac

SEQ ID NO: 3112 - DNA, 201 bp, Homo sapiens
ctaaggtaattactttttcagttgtgaccttggacttgacccaaaagttgtgattttttttttttttccttttctggaaataggtagggcattagaaagayagctgtgctttggctcctttatggaccaaaagtgatgtcaaccagctggtcacttggacatgtctttttcagtggccatgggagtgttcctgtccctttc

SEQ ID NO: 3113 - DNA, 201 bp, Homo sapiens; identical to SEQ ID NO: 370

SEQ ID NO: 3114 - DNA, 201 bp, Homo sapiens
ttgaagaattactagagtaggaaaggtaatttagtcattgatgtgcaatctataaattccttgttatttgaaatttgagtgttatttatatagggatttgrgtaaagtaggtttatgggaactaaaatgtaatctaatgaggtaatggtatttatcagaaggtgatataattctcacaacaatcttattacctggatactt

SEQ ID NO: 3115 - DNA, 201 bp, Homo sapiens
caggtacatatatttattttgttctcttggaagatcttcatggtttctctttagtgtgtttaaactagcacatgaaaataatagactttacaaaattggcsatgacctatatcagcaaatggtgaaaccagaaagaaaaatacattaaaggaaaaatcccaaaggaactgatatttctctaagaagcaaggtataactttt

SEQ ID NO: 3116 - DNA, 201 bp, Homo sapiens; identical to SEQ ID NO: 371

SEQ ID NO: 3117 - DNA, 201 bp, Homo sapiens
tcaactatctcaatcctgggagaatcagagtctttatctgaaatctgctgcttatattatgcaggtacatatatttattttgttctcttggaagatcttcrtggtttctctttagtgtgtttaaactagcacatgaaaataatagactttacaaaattggccatgacctatatcagcaaatggtgaaaccagaaagaaaaa

SEQ ID NO: 3118 - DNA, 201 bp, Homo sapiens; identical to SEQ ID NO: 373

SEQ ID NO: 3119 - DNA, 201 bp, Homo sapiens
aatggaaaagagcttgggtggtttctgtacttcatttagtttggagagttaacactgtattatagttttatctccagtgaacaaaatataatcatttttgwaacaaaaaaattaagctatgtatcagaaagcaatatccaaaggtaattattattttttaatttaaattatagatcttattttcctggaggctgtgtgaga

SEQ ID NO: 3120 - DNA, 201 bp, Homo sapiens
ccctagtagctgagactacaggtgtgcaccaccacgcctggctaatttttgtacttttagtagaggtgtggtttcaccatgttggccaggccggtctcgawctcctgacctcaggtgatccgcctgcctcagcctccgaaagtgctgggattacaggtgtgagccactgtgctgggctatatgtatgtatttctttgtgat

SEQ ID NO: 3121 - DNA, 201 bp, Homo sapiens; identical to SEQ ID NO: 375

SEQ ID NO: 3122 - DNA, 201 bp, Homo sapiens
aaatggaaaagagcttgggtggtttctgtacttcatttagtttggagagttaacactgtattatagttttatctccagtgaacaaaatataatcatttttraaacaaaaaaattaagctatgtatcagaaagcaatatccaaaggtaattattattttttaatttaaattatagatcttattttcctggaggctgtgtgag

SEQ ID NO: 3123 - DNA, 201 bp, Homo sapiens
tttgagggaagctgtggtgtttagtggcacggggagggatcttcatggctagcagtgcctgggggtagtttcccatctccaagaattgtcctgtgccctcyaacttctgaatgtcccatcagagattcatggagctgaaaacctatttacctggctgagaacttagttgttttatatataaacagaaagtatgttttgcat

SEQ ID NO: 3124 - DNA, 201 bp, Homo sapiens
gcctccctagtagctgagactacaggtgtgcaccaccacgcctggctaatttttgtacttttagtagaggtgtggtttcaccatgttggccaggccggtckcgaactcctgacctcaggtgatccgcctgcctcagcctccgaaagtgctgggattacaggtgtgagccactgtgctgggctatatgtatgtatttctttg

SEQ ID NO: 3125 - DNA, 201 bp, Homo sapiens; identical to SEQ ID NO: 377

SEQ ID NO: 3126 - DNA, 201 bp, Homo sapiens
gcatcacgtggtgaggggctcagtatgctagtccagctctctcttctttttcttttcttttctttttttttttttttgtgagatggagtcttactctgtcrcccaggccggagtgcagtgatgtgatcttggctcactgcaacctccgcctcccgagttcaagcgattctcctgcctcagcctcctgagtagctgggattg

SEQ ID NO: 3127 - DNA, 201 bp, Homo sapiens
gtcgccaggctggagtgcagtggcgtgttctcggctcactgcgacctctgcttcccgggtttgagcaattctcctgcctcagcctccctagtagctgagastacaggtgtgcaccaccacgcctggctaatttttgtacttttagtagaggtgtggtttcaccatgttggccaggccggtctcgaactcctgacctcaggt

SEQ ID NO: 3128 - DNA, 201 bp, Homo sapiens; identical to SEQ ID NO: 378

SEQ ID NO: 3129 - DNA, 201 bp, Homo sapiens
tgagacagtctctcgctctgtcgccaggctggagtgcagtggcgtgttctcggctcactgcgacctctgcttcccgggtttgagcaattctcctgcctcascctccctagtagctgagactacaggtgtgcaccaccacgcctggctaatttttgtacttttagtagaggtgtggtttcaccatgttggccaggccggtct

SEQ ID NO: 3130 - DNA, 201 bp, Homo sapiens
ttttttctgagacagtctctcgctctgtcgccaggctggagtgcagtggcgtgttctcggctcactgcgacctctgcttcccgggtttgagcaattctccwgcctcagcctccctagtagctgagactacaggtgtgcaccaccacgcctggctaatttttgtacttttagtagaggtgtggtttcaccatgttggccagg

SEQ ID NO: 3131 - DNA, 201 bp, Homo sapiens; identical to SEQ ID NO: 368

SEQ ID NO: 3132 - DNA, 201 bp, Homo sapiens
ttcttttctttttttttttttttgtgagatggagtcttactctgtcgcccaggccggagtgcagtgatgtgatcttggctcactgcaacctccgcctcccragttcaagcgattctcctgcctcagcctcctgagtagctgggattgcaggtgtgcaccaccatgtctggctaatttttgtatttgtagtagagacagggt

SEQ ID NO: 3133 - DNA, 201 bp, Homo sapiens
aaatttcataagagaacaaattttaagtgtccccaatgttccccaccccaatggtaactgtgtggtgctcgatatatttgtggtaatcattacatgattcrtatcaaatcatcacatagttcaccttgaatatatatgattctatttgtcaattataccttaataaagctggaaaaaccaaactgcttaatctcttttctg

SEQ ID NO: 3134 - DNA, 201 bp, Homo sapiens
taattttgatgggaaatgtgtcagcttgaaataaatcgatgtttgggaaattgttctcttaaagacggtaatctgaaaatgtgaatgctaaataatgaaaacatttgtacagtttgggggtagatgagttttaatctgtttctggcatctgtacattcttgtgatatctcacagagacctggagtgtttaggttgcaattt

SEQ ID NO: 3135 - DNA, 201 bp, Homo sapiens; identical to SEQ ID NO: 379

SEQ ID NO: 3136 - DNA, 201 bp, Homo sapiens; identical to SEQ ID NO: 380

SEQ ID NO: 3137 - DNA, 201 bp, Homo sapiens
ggtctctatttcatagccaaagtggacaatttatagagtgattttctagaacaccccaatatgtagtgacattttgtggcagtgatgccacatgtaggaartggatctctatagaactttgctattaatgttgcggggtatttgttgcatgatgtagaaaatgctatccgggttacctttcattccttatatctgacttag

SEQ ID NO: 3138 - DNA, 201 bp, Homo sapiens
aattttctaggggagttactgagatatatagaggggtgtataaaactagtggaagataagggttacttcattaagtatatttattcaggtctgttgcagcmccagttctcaatgtctggtggtaagggctgttttctcaccccagtactggaagggtacccctcccagaggaatcttgatggcttactgcatgcgggaaga

SEQ ID NO: 3139 - DNA, 201 bp, Homo sapiens
agacagatgccatttgttttgaaggcactcttaagatacattctccttataggatggtgaaggtaactgtcagctgaatatacctatattctctgtgtgcmtggtttaaatcaggtttatttgtctgccaactaaatggtgccacaaatggataataaacatgtttatttctaactcttgagatttatcctagtcatcttt

SEQ ID NO: 3140 - DNA, 201 bp, Homo sapiens
caccccaatggtaactgtgtggtgctcgatatatttgtggtaatcattacatgattcatatcaaatcatcacatagttcaccttgaatatatatgattctrtttgtcaattataccttaataaagctggaaaaaccaaactgcttaatctcttttctgttgcttataacagaatacgtaaaactgggtaatttataaggaa

SEQ ID NO: 3141 - DNA, 201 bp, Homo sapiens
aaaggtgttttttaaaaactgaaattatgcctcattatgcattgtttaaaaataacttttaaatgattatgaaagtaaaaatgtgttcttggtaaacactrcaacgaagtataaagagagaaaggaaaatgatccatttctcccaaatataaaggtaatcattagtatcattttggcatatgtatttatgtatgtatgtat

SEQ ID NO: 3142 - DNA, 201 bp, Homo sapiens; identical to SEQ ID NO: 369

SEQ ID NO: 3143 - DNA, 201 bp, Homo sapiens
agatatgtggggtcgaatataggttccactgttctaatggagaccctaagttacatggctcaaaaagttaaaattttatttttctctcatgtaacattttrgataatttgatgattccctaatgttgggacccagtcttttctgtcttaggctcacaactatccttgagcctgtgtcatgggggatgactctgaagctgcg

SEQ ID NO: 3144 - DNA, 201 bp, Homo sapiens; identical to SEQ ID NO: 372

SEQ ID NO: 3145 - DNA, 201 bp, Homo sapiens
caagctttcagttataagatggtgactttagttaataatattttttacttgaaatttcataagagaacaaattttaagtgtccccaatgttccccaccccratggtaactgtgtggtgctcgatatatttgtggtaatcattacatgattcatatcaaatcatcacatagttcaccttgaatatatatgattctatttgtc

SEQ ID NO: 3146 - DNA, 201 bp, Homo sapiens; identical to SEQ ID NO: 376

SEQ ID NO: 3147 - DNA, 201 bp, Homo sapiens
attttccttggcttcccagatgacagtggaaaaaggcatagtcaagacttcaagtgcggaaaatgttggcaactctgacatgcaagttcttttccatatasagctgagttatgctggagtattttggttacaaagacttcattttctcacctgtctgaattcctgtttggattttagttactcttgatttatcagcatgga

SEQ ID NO: 3148 - DNA, 201 bp, Homo sapiens
ggttacaagatgtcagcggacagctcaattctactaaaaagccccccaagaaaggtgagtatatactttcatgccactacagattgactccatcctgcctycttgactgtcttttattgacaaatgaagattcagacttgaacgtctttaactttcgaatttgttctgcagcgaatgagaaaacagagtcatcctctgcac

SEQ ID NO: 3149 - DNA, 201 bp, Homo sapiens
cggttacaagatgtcagcggacagctcaattctactaaaaagccccccaagaaaggtgagtatatactttcatgccactacagattgactccatcctgccktcttgactgtcttttattgacaaatgaagattcagacttgaacgtctttaactttcgaatttgttctgcagcgaatgagaaaacagagtcatcctctgca

SEQ ID NO: 3150 - DNA, 201 bp, Homo sapiens
ccagttaggaggttcttggtgacatctgccagaaaagttttggtggtagcagcctgacagaggtagcttgaagagtggggatggggaaagagaatgtgacmaagaattgagatagtaaggataatttcaatttcaggtcttggctgtgcaaggaagccgagagacatgagtctctaagagggcacgatattgagagggttg

SEQ ID NO: 3151 - DNA, 201 bp, Homo sapiens
tgggaaagacaaaggaggaactggctttggagaaaaagcgggaattagaaaagcggttacaagatgtcagcggacagctcaattctactaaaaagcccccyaagaaaggtgagtatatactttcatgccactacagattgactccatcctgccttcttgactgtcttttattgacaaatgaagattcagacttgaacgtct

SEQ ID NO: 3152 - DNA, 201 bp, Homo sapiens
ccagaggtaatgtcacaggatgggaagtttccagagtgggtgggaggtgggtggttagagaaaggcagcaggggcctccctgtggatgtcaagaatctttyttatttatttatttattttgtcccacagtttaattggggccgcagtttaagtaactgttcctttgatgcatagggggtgtgtgtgtgtgtgtgtgtgtgt

SEQ ID NO: 3153 - DNA, 201 bp, Homo sapiens
tggatcttaaactccctgctgtgcctagtaaacagaataatatgccacccagagtcagctgggttcaaatcccagttctgctacttactaaaggtgtgacmttaggtaaatattacctgctatggtttgaatctctcctccaaaactcttgttgaaaataattgccattttgacagttttaagaagtgggacctttaagag

SEQ ID NO: 3154 - DNA, 201 bp, Homo sapiens
gatatacctatgataaagtttaatttataaatttgcacaggaagagattaacaacaaaataggacaattatattgtaataaaagttatgtgaatatggtcyttctgtctcatacacaaagtatcttattgtacttattttcagaccaggttgaccttgggtaactgaaatcacagaaattgaaactgcagttaagggggga

SEQ ID NO: 3155 - DNA, 201 bp, Homo sapiens
ccagcactttgggaggccgaggcgggcagatcacgaggtcaggagatcgagaccatggtgaaaccctgtctactaaaaaaaaattagctgggcgaggtggygggtacctgtagtcccagctactcgggaggctgaggcagcagaatggcgtgaactcgggaggcggggttcagtgagccgagatcgcgccactgcactcca

SEQ ID NO: 3156 - DNA, 201 bp, Homo sapiens
ttttagacgcagtaaccgaggttggagttgaagggctactgcagaggagggagggtggcgtggttgcagctcaaggacctaggcccttacgagcccttccsgggcgagggggaatcttaccgtatatttgttcacctacgttgattatttttcccagatacgtacacaagtttgttttctccctggtagcgaagaaagggg

SEQ ID NO: 3157 - DNA, 201 bp, Homo sapiens
cttcagatcaccaggcattagattctcaaaaggagtttgcaaccttccctcgcatgctcagttcacaatagggtttgcagtcctgtgagaatctaatgccrctgctgatctgacaagaggcagagcttgctcgctgctcacctcctgctgtgcaccccagttcctaccaggccacggactggtagtgttcagtggcccaga

SEQ ID NO: 3158 - DNA, 201 bp, Homo sapiens; identical to SEQ ID NO: 394

SEQ ID NO: 3159 - DNA, 201 bp, Homo sapiens; identical to SEQ ID NO: 401

SEQ ID NO: 3160 - DNA, 201 bp, Homo sapiens
agatttgaatggagctccctccagcatggcttgccgaaggggcaggggttctgaggctcttgtagactgccactgaaggtatttggcgccacctgttgggygtgttacccacgattgcctcctgaatctattgtcatttttgtgtcctgcccccgaggttaggtggttcttcccttcttactttcctaaacttcaactctt

SEQ ID NO: 3161 - DNA, 201 bp, Homo sapiens
gaaaggcagcaatgtagatgaagaaatgtagatagatttgagagctatgtaggagttaaaatagatgggacttattctcaaaaggttcttgtctccacacrttaaaggaacagcagagcacacgtgcacttgcagacatacagctctcagagtccctagcacagagctttccaatagtggaagcttgatattttgttgact

SEQ ID NO: 3162 - DNA, 201 bp, Homo sapiens
agtacttaatagagacgcgttgggcaataggtgatgagatacaaattaaagttctgaaaatcggagtaaatagatttaagctaagtgcatgtctatgtcarggattacatctcatttcagagggaattgaaggatttagttggattagttttgggacaaaatatagaatattttgtctgactgcagccccttctgctcatg

SEQ ID NO: 3163 - DNA, 201 bp, Homo sapiens; identical to SEQ ID NO: 438

SEQ ID NO: 3164 - DNA, 201 bp, Homo sapiens
aaaattagccaggcttggtggcgggcacctgtagtcctagctacttgggaggctgaggcaggagaatggtgtgaacccgggaggaggagcttgcagtgagycaagattgcactactgcactccagtctgggcgacagagcgagactccgcctcaaaacaaacaaacaaacaaagggtacattctggcctctattctctctc

SEQ ID NO: 3165 - DNA, 201 bp, Homo sapiens
ttgaaacagtagggtggggtttctttgtcttgagaaaaatactgtctataattaagtactaatgtggcagtgttgggttaaggaagttatagggtggaaaracaggcataggccacctctctgtcacttagaaatgatttctttttctagacataaatatttcttcaacccacccaaattcctttgacttcaaacttgaac

SEQ ID NO: 3166 - DNA, 201 bp, Homo sapiens
agcggtccagggactcacaggtctcactaaagaaaagtctagcgtaggttcacggcacggagagattttaaggctgcctaagactaaagccaaatacgaabtccacatctgcggtccgcaccttatctctccgcgcggcaggcgcgacgagggcgagaaactccctctccagtggtcgcaccacacgacaccagggaaggg

SEQ ID NO: 3167 - DNA, 201 bp, Homo sapiens
tgcatagggggtgtgtgtgtgtgtgtgtgtgtgtgtgagagtcggggatcggtagtctccctataagcatttatttttctgtggttctgacctaacatttytttatttaggattatcacaaaattataaaacagcctatggacatgggtactattaagaggagacttgaaaacaattattattgggctgcttcagagtgta

SEQ ID NO: 3168 - DNA, 201 bp, Homo sapiens
tctaccggtgagtagagacattggagccggggaggtgtgggatgagcaagaatgcgtgtgaatgggggtggtctgcctagtgtagatgctgcggcccctarggagttcccatttctcccctgtagggcagttagctaccagatttctgggtatcttggtcctttgtgattgatccgaccgcttgctgtaactatcttggca

SEQ ID NO: 3169 - DNA, 201 bp, Homo sapiens
ttatttagaacacttcatacttgggggtggtggtcctgtttcttagaaatcaccagagacctgagtagaccagggatctgttttcttgtcagctctcaagttttttcttctttcgaattttgggagacagttaggagaaagtggaaattagtagtggcctggagtaggaaattttctttaagatttgatgacaagatgact

SEQ ID NO: 3170 - DNA, 201 bp, Homo sapiens
tatttagaacacttcatacttgggggtggtggtcctgtttcttagaaatcaccagagacctgagtagaccagggatctgttttcttgtcagctctcaagttttttcttctttcgaattttgggagacagttaggagaaagtggaaattagtagtggcctggagtaggaaattttctttaagatttgatgacaagatgactg

SEQ ID NO: 3171 - DNA, 201 bp, Homo sapiens
cggtggagaaaagcagatttgggaggttgggccgctagggggaggggaaaaggcctctgcaaagttgctgtgtcattgccctccatgctgcagccacccaracggggccgcttgtacttttgggggccagggcctgatccctggctgggggaaggggactctgctctcctgacgctcattttcccccgccctcccggggtt

SEQ ID NO: 3172 - DNA, 201 bp, Homo sapiens
cagaaaagttttggtggtagcagcctgacagaggtagcttgaagagtggggatggggaaagagaatgtgacaaagaattgagatagtaaggataatttcartttcaggtcttggctgtgcaaggaagccgagagacatgagtctctaagagggcacgatattgagagggttgttatctttctgtcagcggggaaaccaaga

SEQ ID NO: 3173 - DNA, 201 bp, Homo sapiens
gttgggccgctagggggaggggaaaaggcctctgcaaagttgctgtgtcattgccctccatgctgcagccacccaaacggggccgcttgtacttttggggkccagggcctgatccctggctgggggaaggggactctgctctcctgacgctcattttcccccgccctcccggggtttgccctactcggggggtcagaagac

SEQ ID NO: 3174 - DNA, 201 bp, Homo sapiens
agaacacttcatacttgggggtggtggtcctgtttcttagaaatcaccagagacctgagtagaccagggatctgttttcttgtcagctctcaagttttttcttctttcgaattttgggagacagttaggagaaagtggaaattagtagtggcctggagtaggaaattttctttaagatttgatgacaagatgactggtggg

SEQ ID NO: 3175 - DNA, 201 bp, Homo sapiens
ctgctttcgtgccggccaggcagggggtttgtcgcctggaggcccaagaggaacggcctccccccaacttagcgggttatgctggaccgggcggtgagggraaccgaggccacccggactttccgcggctgagggcagcgccggttccttgcggtcaagatgctgcaaaacgtgactccccacaataagtacgtttccgcg

SEQ ID NO: 3176 - DNA, 201 bp, Homo sapiens
gtggcgggtacctgtagtcccagctactcgggaggctgaggcagcagaatggcgtgaactcgggaggcggggttcagtgagccgagatcgcgccactgcaytccagcctgggtggtagacactccgtctcaaaaaaaaaagtaattgggcctactacattgttaaacattgttaaattttgctgccatggtcacacacaaa

SEQ ID NO: 3177 - DNA, 201 bp, Homo sapiens
tttcgtgccggccaggcagggggtttgtcgcctggaggcccaagaggaacggcctccccccaacttagcgggttatgctggaccgggcggtgaggggaacygaggccacccggactttccgcggctgagggcagcgccggttccttgcggtcaagatgctgcaaaacgtgactccccacaataagtacgtttccgcgagcc

SEQ ID NO: 3178 - DNA, 201 bp, Homo sapiens
aggctgaggcagcagaatggcgtgaactcgggaggcggggttcagtgagccgagatcgcgccactgcactccagcctgggtggtagacactccgtctcaawaaaaaaagtaattgggcctactacattgttaaacattgttaaattttgctgccatggtcacacacaaatttacagatagtttattagtagaatactaaag

SEQ ID NO: 3179 - DNA, 201 bp, Homo sapiens
gctcagactcagaggaagaaagggctcatcgcttagcagaactacaggaacaggtattttgtcactcttgaaagtttttattgggtaagaggttcatgccytttgtcctcattttttcttcttgttattttatctttatttactttttccacttcatgttttttttcctttagcttcgggcagtacatgaacaactggctg

SEQ ID NO: 3180 - DNA, 201 bp, Homo sapiens
gatgaggaggacgaggaggaagaagagagtgaaagctcagactcagaggaagaaagggctcatcgcttagcagaactacaggaacaggtattttgtcactyttgaaagtttttattgggtaagaggttcatgccctttgtcctcattttttcttcttgttattttatctttatttactttttccacttcatgttttttttc

SEQ ID NO: 3181 - DNA, 201 bp, Homo sapiens
tactgccatgccccctggcttggccaaatcgtcttcagagtcctccagtgaggaaagtagcagtgagagctcctctgaggaagaggaggaggaagatgagkaggacgaggaggaagaagagagtgaaagctcagactcagaggaagaaagggctcatcgcttagcagaactacaggaacaggtattttgtcactcttgaaa

SEQ ID NO: 3182 - DNA, 201 bp, Homo sapiens
ggttggagttgaagggctactgcagaggagggagggtggcgtggttgcagctcaaggacctaggcccttacgagcccttcccgggcgagggggaatcttaycgtatatttgttcacctacgttgattatttttcccagatacgtacacaagtttgttttctccctggtagcgaagaaaggggaaacgggggaggggacgcc

SEQ ID NO: 3183 - DNA, 201 bp, Homo sapiens
tgctaacttgtgtgcaccagtgaaagctcttgagctccctttgagctctggttcccttttgagaataacagatgttgaggattcgtaagtacttaatagasacgcgttgggcaataggtgatgagatacaaattaaagttctgaaaatcggagtaaatagatttaagctaagtgcatgtctatgtcaaggattacatctca

SEQ ID NO: 3184 - DNA, 201 bp, Homo sapiens; identical to SEQ ID NO: 428

SEQ ID NO: 3185 - DNA, 201 bp, Homo sapiens
tatgttaccagttccaaaattttggggggaattcactcaagcttgggagaggagagatcataactttaagagtataagaggtttaaacggtccactacgarataaatagagaaggaaaagttatcagctggtaaatatcgtagaaggtagagcggtccagggactcacaggtctcactaaagaaaagtctagcgtaggttc

SEQ ID NO: 3186 - DNA, 201 bp, Homo sapiens
agtttgcctgttgctctaaatcaatgagtctagacttgtttttcatggcgtagtagtttttggttttttggtgtggttttgtgttttgtttttttttgttwgtttgttttttgtttttttttttttaaagactccaggctggagtgcagtggcgtgatctcggcttactgcaacctccacttctcgggttcaagcgattct

SEQ ID NO: 3187 - DNA, 201 bp, Homo sapiens
tatagtttgcctgttgctctaaatcaatgagtctagacttgtttttcatggcgtagtagtttttggttttttggtgtggttttgtgttttgtttttttttkttagtttgttttttgtttttttttttttaaagactccaggctggagtgcagtggcgtgatctcggcttactgcaacctccacttctcgggttcaagcgat

SEQ ID NO: 3188 - DNA, 201 bp, Homo sapiens
acttgacaccacttgttcctagctctcatacttttcagacagccatttcttagtctgcttctttaaagtctctgcctctgcctcccataatatattgtccsttatgacacctttctttgtcctctttttatttgcacagtatttttaagcaagtttacccattcctctggaggcacctcccacccataaaatctgtgtctc

SEQ ID NO: 3189 - DNA, 201 bp, Homo sapiens; identical to SEQ ID NO: 402

SEQ ID NO: 3190 - DNA, 201 bp, Homo sapiens
tgattctaacttgtaaataaagaaaatattattcaagttttgagttaccttaatatttgcttttgtagtgtttcaaaaggaacatcataagaattgtcttrataattttgagggaaatattactgcagtgagaaaaggcaatagctaacctataattggattgtcttaatttttaaaccagtaggcttttgctgtgttttt

SEQ ID NO: 3191 - DNA, 201 bp, Homo sapiens
cttgcaatgacacaaatgttcaataatctgtgctttcccatatgacagccactagtcacatgtggctattgagaacttaaaatgtggctagtgtattgagrcactaaatttaaaattgtattaatttaaatccaaatagccatgtgtctagcaaataatttaggagactgttggtatagctcaggtgatagaattaggaca

SEQ ID NO: 3192 - DNA, 201 bp, Homo sapiens
ggcagagaggaaagtctaaagcagcactgtccaacagaacttcttgtaatgaggccgcgcgcagtggctcacgcctgtaatcccagcactttgggaggctraggcgggcggatcacgaggtcaggaattcgagactaatttggccaacatggtgaaaccccgtgtctactaaaaatacagacactagccgggtgtggtggc

SEQ ID NO: 3193 - DNA, 201 bp, Homo sapiens
aggcagagaggaaagtctaaagcagcactgtccaacagaacttcttgtaatgaggccgcgcgcagtggctcacgcctgtaatcccagcactttgggaggcygaggcgggcggatcacgaggtcaggaattcgagactaatttggccaacatggtgaaaccccgtgtctactaaaaatacagacactagccgggtgtggtgg

SEQ ID NO: 3194 - DNA, 201 bp, Homo sapiens
cttgtttgggctttcttgctaacttgtgtgcaccagtgaaagctcttgagctccctttgagctctggttcccttttgagaataacagatgttgaggattcktaagtacttaatagagacgcgttgggcaataggtgatgagatacaaattaaagttctgaaaatcggagtaaatagatttaagctaagtgcatgtctatgt

SEQ ID NO: 3195 - DNA, 201 bp, Homo sapiens
acaggtattttgtcactcttgaaagtttttattgggtaagaggttcatgccctttgtcctcattttttcttcttgttattttatctttatttactttttcyacttcatgttttttttcctttagcttcgggcagtacatgaacaactggctgctctgtcccagggtccaatatccaagcccaagaggaaaagagagaaaaa

SEQ ID NO: 3196 - DNA, 201 bp, Homo sapiens
agggattgtaattgtttcaggagtttggttgagttccatcttggttgccaaaggactttattccaaaatagcagtctccagcacaactcaaaggactagtkgagtcctgtgggcattatttccccctatgctcctctcagctcttggaatcatgggttctattgctgctgctttttccctctcccctcatgctgccattta

SEQ ID NO: 3197 - DNA, 201 bp, Homo sapiens
tctgggccatatagtttgcctgttgctctaaatcaatgagtctagacttgtttttcatggcgtagtagtttttggttttttggtgtggttttgtgttttgtttttttttgttagtttgttttttgtttttttttttttaaagactccaggctggagtgcagtggcgtgatctcggcttactgcaacctccacttctcgggt

SEQ ID NO: 3198 - DNA, 201 bp, Homo sapiens
gccatatagtttgcctgttgctctaaatcaatgagtctagacttgtttttcatggcgtagtagtttttggttttttggtgtggttttgtgttttgtttttktttgttagtttgttttttgtttttttttttttaaagactccaggctggagtgcagtggcgtgatctcggcttactgcaacctccacttctcgggttcaag

SEQ ID NO: 3199 - DNA, 201 bp, Homo sapiens
ggactggtagtgttcagtggcccagaggttgggggacccctgctataaggaacaagcacttatatagagtttactatgtaccagacacttatgagcacttytgcaatttagtcttcataataatcctaagaggtaggtactcatcaccattttatacatgaggaaacagacatttagtaacagttctatagctgcctagtt

SEQ ID NO: 3200 - DNA, 201 bp, Homo sapiens
agccccttgccaaggtatgatctgtggatttcctctgggcagcagggaggcaagggtcttaagtaaagtgggcttggagtgacaggttccctatcttgttyctttctgcagaaaaaaggcgtaaagcggaaagcagatactaccacccctacacctacagccatcttggctcctggttctccagctagccctcctgggagt

SEQ ID NO: 3201 - DNA, 201 bp, Homo sapiens
atatagtttgcctgttgctctaaatcaatgagtctagacttgtttttcatggcgtagtagtttttggttttttggtgtggttttgtgttttgttttttttkgttagtttgttttttgtttttttttttttaaagactccaggctggagtgcagtggcgtgatctcggcttactgcaacctccacttctcgggttcaagcga

SEQ ID NO: 3202 - DNA, 201 bp, Homo sapiens
agaatcaaactacacttttttccttttttctagcgctccagggcagtgttaccagtgcccatcaggtgcctgccgtctcttctgtgtcacacacagccctstatactcctccacctgagatacctaccactgtcctcaacattccccacccatcagtcatttcctctccacttctcaagtccttgcactctgctggacccc

SEQ ID NO: 3203 - DNA, 201 bp, Homo sapiens
aaatcaatgagtctagacttgtttttcatggcgtagtagtttttggttttttggtgtggttttgtgttttgtttttttttgttagtttgttttttgttttkttttttttaaagactccaggctggagtgcagtggcgtgatctcggcttactgcaacctccacttctcgggttcaagcgattctcctgcctcagcctccca

SEQ ID NO: 3204 - DNA, 201 bp, Homo sapiens
gactccgtatcagggaaagaaaaaaacaacttcttgcaatgacacaaatgttcaataatctgtgctttcccatatgacagccactagtcacatgtggctaytgagaacttaaaatgtggctagtgtattgaggcactaaatttaaaattgtattaatttaaatccaaatagccatgtgtctagcaaataatttaggagact

SEQ ID NO: 3205 - DNA, 201 bp, Homo sapiens
tgaacgtctttaactttcgaatttgttctgcagcgaatgagaaaacagagtcatcctctgcacagcaagtagcagtgtcacgccttagcgcttccagctcyagctcagattccagctcctcctcttcctcgtcgtcgtcttcagacaccagtgattcagactcaggctaaggggtcaggccagatggggcaggaaggctcc

SEQ ID NO: 3206 - DNA, 201 bp, Homo sapiens; identical to SEQ ID NO: 383

SEQ ID NO: 3207 - DNA, 201 bp, Homo sapiens
gacagcatggtctgagatgcgagggaggctcgggacctggaatgatttcacagctcccaaggtttcgggtttctccagggtggcctcttccatcgcctccytcatcccctcccccagtcctgaacagttctctccttgtgtactgcgggggagggaacggaaaggaggaaagagttactttcccaaattactgagtagcag

SEQ ID NO: 3208 - DNA, 201 bp, Homo sapiens; identical to SEQ ID NO: 392

SEQ ID NO: 3209 - DNA, 201 bp, Homo sapiens
ccggccccctgatgggcctctgtcctggcctgcagagccccggtggagaaaagcagatttgggaggttgggccgctagggggaggggaaaaggcctctgcmaagttgctgtgtcattgccctccatgctgcagccacccaaacggggccgcttgtacttttgggggccagggcctgatccctggctgggggaaggggactc

SEQ ID NO: 3210 - DNA, 201 bp, Homo sapiens
gtctgagccgcagccgccgcctcctccgctcgccctcctccctggcgctgaccgatggaccagccgctccgtggggaggactccggaccctggtggggggscgggggggttctttcgcccccgtggcggagggcccctgagaggcggatacgggtgtgcctttgggggtgatgtggcgtgtggggggaaaggtccgagctc

SEQ ID NO: 3211 - DNA, 201 bp, Homo sapiens
tctgagccgcagccgccgcctcctccgctcgccctcctccctggcgctgaccgatggaccagccgctccgtggggaggactccggaccctggtgggggggsgggggggttctttcgcccccgtggcggagggcccctgagaggcggatacgggtgtgcctttgggggtgatgtggcgtgtggggggaaaggtccgagctcg

SEQ ID NO: 3212 - DNA, 201 bp, Homo sapiens
ggttctttcgcccccgtggcggagggcccctgagaggcggatacgggtgtgcctttgggggtgatgtggcgtgtggggggaaaggtccgagctcgcctggmgggggagggtttttcccttaagtcatccctcccaggacttgctttttctgctctgagccggacgccggaatggagtttgaggaagaggtgaggtgtgttg

SEQ ID NO: 3213 - DNA, 201 bp, Homo sapiens; identical to SEQ ID NO: 404

SEQ ID NO: 3214 - DNA, 201 bp, Homo sapiens
ctaggccgcgggtagtgggggagggggcgctgaggcaggaggtcagcacccgggcgcgggctcccgccccacgaaaagcgcgcgctccaagccccgccgcsggagatgcggttccggtccggacgcctgcgcactacggctctccccgcagcctctggccctccttccccctcccccagtcagggcgcacccttgcgcctg

SEQ ID NO: 3215 - DNA, 201 bp, Homo sapiens
ccccagtcagggcgcacccttgcgcctgcgctgtgtgtgttcctggtctgcggcagccatgctgaactcgtatggagaggcgagtgggggggacagagtcsaggactgcgggataggaagctggggatatggacaagcagcagcgttatagcgctctgggtttcgggacataggcctgggccatgcggcccccttggcccc

SEQ ID NO: 3216 - DNA, 201 bp, Homo sapiens
tttgagtttcttaactccacccattttgcttaagccccatccccatagggctgtagttctgagatgtcgtgccttgtcagaaacaatttgggagttttttwaaatatgaaaaagaacagatagagcctatcagacttaagaaggtgggatctagatagtatactaaaaatattaataaaaggaaggcggggccagcaataa

SEQ ID NO: 3217 - DNA, 201 bp, Homo sapiens
tctttctaggatgtatttgagttccgttatgccaagatgccagatgaaccactagaaccagggcctttaccagtctctactgccatgccccctggcttggycaaatcgtcttcagagtcctccagtgaggaaagtagcagtgagagctcctctgaggaagaggaggaggaagatgaggaggacgaggaggaagaagagagt

SEQ ID NO: 3218 - DNA, 201 bp, Homo sapiens
actggataaagaaaatgtggtgtatatatatacaatggatactagtcagccataaaaaagaatgaaatcctgtcatttccagcaacatggatggaactggmagtcattatgttaatgaaataagtcagacacagaaaaaaaaatatcacgttctcataagtgggagctaaaaaagttgatcttatggaggtagagggtaga

SEQ ID NO: 3219 - DNA, 201 bp, Homo sapiens; identical to SEQ ID NO: 382

SEQ ID NO: 3220 - DNA, 201 bp, Homo sapiens; identical to SEQ ID NO: 387

SEQ ID NO: 3221 - DNA, 201 bp, Homo sapiens
gcgagccgcgtgtgggaaggggatgttgcagggcggcggcacaggggtgtggggcgccgtgttgggagtactgagcggccccggcgcgctgctgttgcggygcagctgtcgactcggtcgcgcggagggaattgagcgacggttttggaacggtggtggcggctcggctactgctcgtggaggggaatacaggttgtcaat

SEQ ID NO: 3222 - DNA, 201 bp, Homo sapiens
cgtttccgcgagccgcgtgtgggaaggggatgttgcagggcggcggcacaggggtgtggggcgccgtgttgggagtactgagcggccccggcgcgctgctsttgcggcgcagctgtcgactcggtcgcgcggagggaattgagcgacggttttggaacggtggtggcggctcggctactgctcgtggaggggaatacaggt

SEQ ID NO: 3223 - DNA, 201 bp, Homo sapiens; identical to SEQ ID NO: 388

SEQ ID NO: 3224 - DNA, 201 bp, Homo sapiens; identical to SEQ ID NO: 391

SEQ ID NO: 3225 - DNA, 201 bp, Homo sapiens
ggttccccactgattccaaacttaacagcactggaaaccttctataatgtgttctctaatataaatttacctcccattttctcttctcctgctctacttcytgtagcttatgttctggccagactggactagactactctctgtgacaataacctgtgctgttctatgtctgtctttcctcacataattctaatgtctcag

SEQ ID NO: 3226 - DNA, 201 bp, Homo sapiens
gttctttcgcccccgtggcggagggcccctgagaggcggatacgggtgtgcctttgggggtgatgtggcgtgtggggggaaaggtccgagctcgcctggarggggagggtttttcccttaagtcatccctcccaggacttgctttttctgctctgagccggacgccggaatggagtttgaggaagaggtgaggtgtgttgc

SEQ ID NO: 3227 - DNA, 201 bp, Homo sapiens
tatttatttatttattttgtcccacagtttaattggggccgcagtttaagtaactgttcctttgatgcatagggggtgtgtgtgtgtgtgtgtgtgtgtgwgagagtcggggatcggtagtctccctataagcatttatttttctgtggttctgacctaacatttttttatttaggattatcacaaaattataaaacagcc

SEQ ID NO: 3228 - DNA, 201 bp, Homo sapiens
tcgagtcgcttaccgaatttgtgtgcattcacgtggacacggcctgtggggccttttgcccctgtagggtctttactgagcacgtgtctactccaggctgkggtgcttacaagctgaaagcttgaggtctgcttaggaacagaaaccaggcccaaggtgggtgctggcagtagggggtctagacagcatggtctgagatgc

SEQ ID NO: 3229 - DNA, 201 bp, Homo sapiens; identical to SEQ ID NO: 399

SEQ ID NO: 3230 - DNA, 201 bp, Homo sapiens
tatctagcggcggtctgttagccttttaggggggattcacggacacctctagcgccctgtagggttgccatggtgacggagcgcttaagggactggcaacsgggattcccagagaagggtaaagggatcactctcccgtgtgtgcaggttcctaatgcccagggcatgtcattaaatcttttgctttctttgggtgggtgg

SEQ ID NO: 3231 - DNA, 201 bp, Homo sapiens
agggactggcaacggggattcccagagaagggtaaagggatcactctcccgtgtgtgcaggttcctaatgcccagggcatgtcattaaatcttttgctttmtttgggtgggtgggttgtgtgtggtgtttgttggtgcagggattgttttttcctaacattaaaagtttgattcagggcaggagggtagagctaaggttcc

SEQ ID NO: 3232 - DNA, 201 bp, Homo sapiens
ctctgggccatatagtttgcctgttgctctaaatcaatgagtctagacttgtttttcatggcgtagtagtttttggttttttggtgtggttttgtgttttktttttttttgttagtttgttttttgtttttttttttttaaagactccaggctggagtgcagtggcgtgatctcggcttactgcaacctccacttctcggg

SEQ ID NO: 3233 - DNA, 201 bp, Homo sapiens
agtacgtttccgcgagccgcgtgtgggaaggggatgttgcagggcggcggcacaggggtgtggggcgccgtgttgggagtactgagcggccccggcgcgcygctgttgcggcgcagctgtcgactcggtcgcgcggagggaattgagcgacggttttggaacggtggtggcggctcggctactgctcgtggaggggaatac

SEQ ID NO: 3234 - DNA, 201 bp, Homo sapiens
gaaggggactctgctctcctgacgctcattttcccccgccctcccggggtttgccctactcggggggtcagaagacaggagattggcggccattttagacrcagtaaccgaggttggagttgaagggctactgcagaggagggagggtggcgtggttgcagctcaaggacctaggcccttacgagcccttcccgggcgagg

SEQ ID NO: 3235 - DNA, 201 bp, Homo sapiens
ggttttggaacggtggtggcggctcggctactgctcgtggaggggaatacaggttgtcaatttatacgctattaatgccgccgtggcccagtcttaaccgrgtcaggcagagctagtttgacggtggagtggagtgaggttgaacagcaggtttggcgtttggtgggtctggtatctagcggcggtctgttagccttttag

SEQ ID NO: 3236 - DNA, 201 bp, Homo sapiens; identical to SEQ ID NO: 408

SEQ ID NO: 3237 - DNA, 201 bp, Homo sapiens
caaagacacgtggcgatcagatttgttctctgggccatatagtttgcctgttgctctaaatcaatgagtctagacttgtttttcatggcgtagtagttttkggttttttggtgtggttttgtgttttgtttttttttgttagtttgttttttgtttttttttttttaaagactccaggctggagtgcagtggcgtgatctc

SEQ ID NO: 3238 - DNA, 201 bp, Homo sapiens
atttttctgtggttctgacctaacatttttttatttaggattatcacaaaattataaaacagcctatggacatgggtactattaagaggagacttgaaaayaattattattgggctgcttcagagtgtatgcaagattttaataccatgttcaccaactgttacatttacaacaaggtgagtttttctgtgtgttcattta

SEQ ID NO: 3239 - DNA, 201 bp, Homo sapiens
tcatcagactattgtgcagatgcactttttcctcatttggacgatattgccctaattttgttcccatctttacaggctccctggggaagggaatgcagggytgctggggctgggcccagaagcagcagcaccagggaagaggattcgaaaaccctctctcttgtatgagggctttgagagccccacaatggcttcggtgcc

SEQ ID NO: 3240 - DNA, 201 bp, Homo sapiens
actaaaggagtgccacctggctgactggcagatttgaatggagctccctccagcatggcttgccgaaggggcaggggttctgaggctcttgtagactgccrctgaaggtatttggcgccacctgttgggcgtgttacccacgattgcctcctgaatctattgtcatttttgtgtcctgcccccgaggttaggtggttcttc

SEQ ID NO: 3241 - DNA, 201 bp, Homo sapiens
tgagtatatactttcatgccactacagattgactccatcctgccttcttgactgtcttttattgacaaatgaagattcagacttgaacgtctttaactttygaatttgttctgcagcgaatgagaaaacagagtcatcctctgcacagcaagtagcagtgtcacgccttagcgcttccagctccagctcagattccagctc

SEQ ID NO: 3242 - DNA, 201 bp, Homo sapiens
ggaagaaagggctcatcgcttagcagaactacaggaacaggtattttgtcactcttgaaagtttttattgggtaagaggttcatgccctttgtcctcattwtttcttcttgttattttatctttatttactttttccacttcatgttttttttcctttagcttcgggcagtacatgaacaactggctgctctgtcccaggg

SEQ ID NO: 3243 - DNA, 201 bp, Homo sapiens
gtctcactgttctgtacagttgtaaattggagctatatcacttggtggctgggtatgtagggcactgtttatcagcatagttttgagtttgtgcctctttstaggatgtatttgagttccgttatgccaagatgccagatgaaccactagaaccagggcctttaccagtctctactgccatgccccctggcttggccaaat

SEQ ID NO: 3244 - DNA, 201 bp, Homo sapiens
aataagaataacctctcatgtgagtaagaggaactcatcatccttgccaagctttccaaccaaccccaaacttcaagtatttttgtgtccttgtacagtamgtgaatatttctacataataaaatatttctttcatctctttgccaaatgaggacattgctcattttgtcagacaagctaatgtttgatttgagattgaag

SEQ ID NO: 3245 - DNA, 201 bp, Homo sapiens
gggaaggagatgtgggaatggtagcatggaactaatgtgttgtcaccatgatttcattttttcctgggtcatcaccctaaagatactcacaaaatcccacyagctggtctccagcactgaatgagacgacagcttcttgctctcaatttatattctaggatcggggaaaggggcagcattagacaactagtcacacgattt

SEQ ID NO: 3246 - DNA, 201 bp, Homo sapiens
ctatcacgagaacagcatgggggaaactgcccccatatcaaaccttgagtcaaagttccaagtgcctaatgcaatgcctaatggcaaggtcccataagctygtgcacacatttttagaaaagattctacctttttccccaaacatgtccctcgcagtgagttctctaagtcagcagtccccagcttttttggcaccaagga

SEQ ID NO: 3247 - DNA, 201 bp, Homo sapiens
ttgccatggtgacggagcgcttaagggactggcaacggggattcccagagaagggtaaagggatcactctcccgtgtgtgcaggttcctaatgcccagggyatgtcattaaatcttttgctttctttgggtgggtgggttgtgtgtggtgtttgttggtgcagggattgttttttcctaacattaaaagtttgattcaggg

SEQ ID NO: 3248 - DNA, 201 bp, Homo sapiens
ttatggaggtagagggtagaatgatggttaccagagactgggaaagggagggggtggaggggggatgaagagagattcattaatggttacaaaaatatagytaaattgaaggaataaattctatagtgtttgatagcacagctgggtgactacagttaacattaatttactgtatattccaaaatagctagtagatttgaa

SEQ ID NO: 3249 - DNA, 201 bp, Homo sapiens
agagctttccaatagtggaagcttgatattttgttgactaaaggagtgccacctggctgactggcagatttgaatggagctccctccagcatggcttgccraaggggcaggggttctgaggctcttgtagactgccactgaaggtatttggcgccacctgttgggcgtgttacccacgattgcctcctgaatctattgtca

SEQ ID NO: 3250 - DNA, 201 bp, Homo sapiens
gggttgggatgtgtgcattctggaatttggggctttaatactggaaaagtgagacatttgcttagtatagtgtaccatagtaggaaacctggatagagacrtggaaattagaatcaggaatgtagtaaagcaaatggtttattttgctgtaaatgacaccacaaactaagtgtagggcaacaccacaaactaaatgtagga

SEQ ID NO: 3251 - DNA, 201 bp, Homo sapiens
tattccaacgattaaatcacaaaactgtgctttctgcatacccccttgtcttgctaaggggagagaagggttgtataaaaagtttagggggttgggatgtktgcattctggaatttggggctttaatactggaaaagtgagacatttgcttagtatagtgtaccatagtaggaaacctggatagagacgtggaaattagaa

SEQ ID NO: 3252 - DNA, 201 bp, Homo sapiens
aagactccaggctggagtgcagtggcgtgatctcggcttactgcaacctccacttctcgggttcaagcgattctcctgcctcagcctcccaagtagccagrattacaggcatgcgccaccacgcccagctaatttttgtatttttagtgcgcagctagtttatgtagttttagtggagacggggtttcgccatgttgggca

SEQ ID NO: 3253 - DNA, 201 bp, Homo sapiens
tctctttgcaaagataattctaaatggccagttaacagatacaataggctttgagcagtggtccccaacctttttggcaccagggaccagtttcgtggaasacagattttaccacagacagggtttgaggggatggtttttgggatgaaactgttccacctcagatcattgggccattggattcccataaggagcatgcag

SEQ ID NO: 3254 - DNA, 201 bp, Homo sapiens
ccttgcactctgctggacccccgctccttgctgttactgcagctcctccagcccagccccttgccaaggtatgatctgtggatttcctctgggcagcaggraggcaagggtcttaagtaaagtgggcttggagtgacaggttccctatcttgtttctttctgcagaaaaaaggcgtaaagcggaaagcagatactaccacc

SEQ ID NO: 3255 - DNA, 201 bp, Homo sapiens
atgaagatgacaaggggcctagggcaccccgcccacctcaacctaagaagtccaagaaagcaagtggcagtgggggtggcagtgctgctttaggcccttcyggctttggaccttctggaggaagtggcaccaagtgagttagagtaggaagcagagactagtttggctatttctgtctctctgggggatgccatctctctt

SEQ ID NO: 3256 - DNA, 201 bp, Homo sapiens
cttctgcacttggcctgcatgactaccatgacatcattaagcaccccatggacctcagcactgtcaaggtacccactgcatggggcagatgggatgctcargcagtgatgggagcctaggtgcaaaacaataagtctccttatgtgggcacacagcagtctttggttcttggcattttacttttataaaataatagtggaa

SEQ ID NO: 3257 - DNA, 201 bp, Homo sapiens
attttatctttatttactttttccacttcatgttttttttcctttagcttcgggcagtacatgaacaactggctgctctgtcccagggtccaatatccaarcccaagaggaaaagagagaaaaaagagaaaaagaagaaacggaaggcagagaagcatcgaggccgagctggggccgatgaagatgacaaggggcctaggg

SEQ ID NO: 3258 - DNA, 201 bp, Homo sapiens
tttatttactttttccacttcatgttttttttcctttagcttcgggcagtacatgaacaactggctgctctgtcccagggtccaatatccaagcccaagargaaaagagagaaaaaagagaaaaagaagaaacggaaggcagagaagcatcgaggccgagctggggccgatgaagatgacaaggggcctagggcaccccgc

SEQ ID NO: 3259 - DNA, 201 bp, Homo sapiens
gcctggagtaggaaattttctttaagatttgatgacaagatgactggtgggggtatggtaatggcctagggcctgaatgcctctgagaaagatggtgtgtrtctatcttctgttggcattttttaactttctttattgctgtctgtgttctcatagcccactgatgatattgtcctaatggcacaaacgctggaaaagata

SEQ ID NO: 3260 - DNA, 201 bp, Homo sapiens; identical to SEQ ID NO: 414

SEQ ID NO: 3261 - DNA, 201 bp, Homo sapiens
ccaaccaaccccaaacttcaagtatttttgtgtccttgtacagtaagtgaatatttctacataataaaatatttctttcatctctttgccaaatgaggacmttgctcattttgtcagacaagctaatgtttgatttgagattgaaggagaaaagggatttattctccagcgataagcatttttgctggtgtttgacaaaca

SEQ ID NO: 3262 - DNA, 201 bp, Homo sapiens
gagtgtatgcaagattttaataccatgttcaccaactgttacatttacaacaaggtgagtttttctgtgtgttcatttagtaggtggggagaaacagtaayttctattattgctggatatgttgtctacataaagtttaaatcctttgctactgaaggtgttatccaggtagggtagtcggagtcttaaaaacctgactct

SEQ ID NO: 3263 - DNA, 201 bp, Homo sapiens
tttatttatttatttattttgtcccacagtttaattggggccgcagtttaagtaactgttcctttgatgcatagggggtgtgtgtgtgtgtgtgtgtgtgwgtgagagtcggggatcggtagtctccctataagcatttatttttctgtggttctgacctaacatttttttatttaggattatcacaaaattataaaacag

SEQ ID NO: 3264 - DNA, 201 bp, Homo sapiens
ggacgatattgccctaattttgttcccatctttacaggctccctggggaagggaatgcagggttgctggggctgggcccagaagcagcagcaccagggaaraggattcgaaaaccctctctcttgtatgagggctttgagagccccacaatggcttcggtgcctgctttgcaacttacccctgccaacccaccacccccgg

SEQ ID NO: 3265 - DNA, 201 bp, Homo sapiens
tttcctccttaccggcgctcaaccaccatggcaaccaccaaacccctagtgaggaggaagcttggggtttgagtttcttaactccacccattttgcttaakccccatccccatagggctgtagttctgagatgtcgtgccttgtcagaaacaatttgggagttttttaaaatatgaaaaagaacagatagagcctatcaga

SEQ ID NO: 3266 - DNA, 201 bp, Homo sapiens
tcagggcgcacccttgcgcctgcgctgtgtgtgttcctggtctgcggcagccatgctgaactcgtatggagaggcgagtgggggggacagagtccaggacygcgggataggaagctggggatatggacaagcagcagcgttatagcgctctgggtttcgggacataggcctgggccatgcggcccccttggccccttggcg

SEQ ID NO: 3267 - DNA, 201 bp, Homo sapiens
cgggaggcagtgattttccggaatgcagggaataaacgagagcaatgtctggctgcccttttcctaaggcctagtattttctcagcctcctaagtttttaytccatggccggccccctgatgggcctctgtcctggcctgcagagccccggtggagaaaagcagatttgggaggttgggccgctagggggaggggaaaagg

SEQ ID NO: 3268 - DNA, 201 bp, Homo sapiens
gcctggccacccgaggctaccccgctaggccgcgggtagtgggggagggggcgctgaggcaggaggtcagcacccgggcgcgggctcccgccccacgaaawgcgcgcgctccaagccccgccgccggagatgcggttccggtccggacgcctgcgcactacggctctccccgcagcctctggccctccttccccctccccc

SEQ ID NO: 3269 - DNA, 201 bp, Homo sapiens
ttatttactttttccacttcatgttttttttcctttagcttcgggcagtacatgaacaactggctgctctgtcccagggtccaatatccaagcccaagagraaaagagagaaaaaagagaaaaagaagaaacggaaggcagagaagcatcgaggccgagctggggccgatgaagatgacaaggggcctagggcaccccgcc

SEQ ID NO: 3270 - DNA, 201 bp, Homo sapiens; identical to SEQ ID NO: 432

SEQ ID NO: 3271 - DNA, 201 bp, Homo sapiens
ctcctaagtttttattccatggccggccccctgatgggcctctgtcctggcctgcagagccccggtggagaaaagcagatttgggaggttgggccgctagkgggaggggaaaaggcctctgcaaagttgctgtgtcattgccctccatgctgcagccacccaaacggggccgcttgtacttttgggggccagggcctgatc

SEQ ID NO: 3272 - DNA, 201 bp, Homo sapiens
ttccggtccggacgcctgcgcactacggctctccccgcagcctctggccctccttccccctcccccagtcagggcgcacccttgcgcctgcgctgtgtgtrttcctggtctgcggcagccatgctgaactcgtatggagaggcgagtgggggggacagagtccaggactgcgggataggaagctggggatatggacaagca

SEQ ID NO: 3273 - DNA, 201 bp, Homo sapiens; identical to SEQ ID NO: 437

SEQ ID NO: 3274 - DNA, 201 bp, Homo sapiens
ccaagaaaggtgagtatatactttcatgccactacagattgactccatcctgccttcttgactgtcttttattgacaaatgaagattcagacttgaacgtytttaactttcgaatttgttctgcagcgaatgagaaaacagagtcatcctctgcacagcaagtagcagtgtcacgccttagcgcttccagctccagctcag

SEQ ID NO: 3275 - DNA, 201 bp, Homo sapiens
cagctcaattctactaaaaagccccccaagaaaggtgagtatatactttcatgccactacagattgactccatcctgccttcttgactgtcttttattgasaaatgaagattcagacttgaacgtctttaactttcgaatttgttctgcagcgaatgagaaaacagagtcatcctctgcacagcaagtagcagtgtcacgc

SEQ ID NO: 3276 - DNA, 201 bp, Homo sapiens
gatgtcagcggacagctcaattctactaaaaagccccccaagaaaggtgagtatatactttcatgccactacagattgactccatcctgccttcttgactstcttttattgacaaatgaagattcagacttgaacgtctttaactttcgaatttgttctgcagcgaatgagaaaacagagtcatcctctgcacagcaagta

SEQ ID NO: 3277 - DNA, 201 bp, Homo sapiens; identical to SEQ ID NO: 406

SEQ ID NO: 3278 - DNA, 201 bp, Homo sapiens
cctgtggatgtcaagaatcttttttatttatttatttattttgtcccacagtttaattggggccgcagtttaagtaactgttcctttgatgcatagggggkgtgtgtgtgtgtgtgtgtgtgtgtgagagtcggggatcggtagtctccctataagcatttatttttctgtggttctgacctaacatttttttatttagga

SEQ ID NO: 3279 - DNA, 201 bp, Homo sapiens
tggatgtttatcagtgcaatatttaaaaacaagaagaccgaagtcacaagaagcagcaccaaaaccacctttttaaccctccactttaggtagagaaaaayagagttagaaaaattggctatcttgagaaaataaaaagtaccgaggcctgtagctaaccagacactaaaatgattgatcactgtccagatattagtaagc

SEQ ID NO: 3280 - DNA, 201 bp, Homo sapiens
atgatggttgacctgaaatcaccaaggcaggactgctcatctccaggtctaatggaaaacagtatctggtgaaaccaaagaaaataattccagtaacccaytgggagctgcttggcttaagcacctaccctgtgcctaagatacaacccatcaagcccagctaaaactgatccagtttccacagggccagagaagaattgc

SEQ ID NO: 3281 - DNA, 201 bp, Homo sapiens; identical to SEQ ID NO: 481

SEQ ID NO: 3282 - DNA, 201 bp, Homo sapiens; identical to SEQ ID NO: 483

SEQ ID NO: 3283 - DNA, 201 bp, Homo sapiens; identical to SEQ ID NO: 477

SEQ ID NO: 3284 - DNA, 201 bp, Homo sapiens
gatcaaaaaataagaataggaaataataatatttgattcttccaaagttgcaaagagaagctttctaagaatgcatacttatgtgcagttttcctcctgarttgtttctaatatgccacttgaggtatacttgacatgcaataagttgtacagatataaagtgtacaatttcatgagtgtctcaccatgtgatactcatca

SEQ ID NO: 3285 - DNA, 201 bp, Homo sapiens
cattgaaatactcaagagccctttaactaaataagcactaaggcttaaggaatcatgagaggacaaacaggggcccttctatgttgagttcctggttgacrctcagtgtagtaacaatcctgctttcccttacatcttcttccacttccggtagcatcagagagtggctgatgagatctcaaaggggatgcacagggtgtg

SEQ ID NO: 3286 - DNA, 201 bp, Homo sapiens
caagtttatattaaatagtaatacatgtaaatattccggagactttggaaatattttctctgtacatgtgagaagaggtagaaatctatctattgtctcayaaagcagtcattgtgtttgaatgagttcatccacatggcaagaattcttattctgtgcctctcccctgcccagtagggcatattgcttcatcagcaccaa

SEQ ID NO: 3287 - DNA, 201 bp, Homo sapiens; identical to SEQ ID NO: 484

SEQ ID NO: 3288 - DNA, 201 bp, Homo sapiens
cttttggagattacctctcactaccttgcagctgctttctgaattcccatttgcctctaaggttgcaattttatttctctctctctctctctctctctctstgtgtgtgtgtgtgcgtgcgtgtgtatgaatatgtatattgtattttattaaatctagaatgcatagactagaagacatgtcattgttttatgtaccacc

SEQ ID NO: 3289 - DNA, 201 bp, Homo sapiens
atcacacttttaactcctctgtgggctttggtgctggcgtctccggatattttgacagtgtgctgcatcttcttgcgatgtttccacatggagaagatgargagaagaaacattgccagggacaaagtaaagggtatgaaaatgaacacagtgctggttaatacaataagactggaaaatcgtgtaaagttacttgaatca

SEQ ID NO: 3290 - DNA, 201 bp, Homo sapiens
attgagagtgtgggcttcaacacatggattttggagacaaacaagtcagtccataacagtctttctgaagcagattggttattagcattttcagtaaggasgtatgtttagtaaacagccctcatctttttttaaggggagaggggaatgttattatttaattcaaaccccagaacaaatttttagcaaagaattcaggat

SEQ ID NO: 3291 - DNA, 201 bp, Homo sapiens
atgatcatcttaataaacagcaaaaaatttgatagtttttaacagagattttattacaatactatacacaggaagataggaaacaaatattctccctgaakaatatttttaaaagaatttatctcaaagctagagtcagtattacgtttattgttaaaacactagaaaacactccatttgcaaagacagcagttacgatca

SEQ ID NO: 3292 - DNA, 201 bp, Homo sapiens
tatctattgtctcataaagcagtcattgtgtttgaatgagttcatccacatggcaagaattcttattctgtgcctctcccctgcccagtagggcatattgyttcatcagcaccaaataccttcacatttttttcacatatactcactctcccagcaacatctactccatgatcctcactacagggaccaatgtagataaag

SEQ ID NO: 3293 - DNA, 201 bp, Homo sapiens
gaacaaagaaaatgatattaaggaggggggctgtagaagggatagagggcaaaaggatggttttgcatcttcctcaccgcagtaaaccaatgaggtattasacatttcctgccatgtcaagtcttgcctataatcttccttgtctttttcaggaagtgaataagaagatgacagtgtttcaaatgccttgaaacataatgt

SEQ ID NO: 3294 - DNA, 201 bp, Homo sapiens
agatcctactttatattccattcagagagcttccgggtcttcaaaaaagatttagtcatgtgggtgtgaaagagctgagtcatgaaatttggaccttattrtaagtccagaaggaaaaacaaggggtttgaagcacaagggtgatatgatctaatttctacttttaaatgatcactctgattgtcgtgagggaactgatat

SEQ ID NO: 3295 - DNA, 201 bp, Homo sapiens
tgattgtcgtgagggaactgatatgggatgtactgggggaagaatgttaccaggaccaggtcgaggctgttaaagacctccaggagagagcattgtgggcygaacaacaagcttctagtaaagatcatgcaagtggacacatttgagatgtattttgaaggtggaagaaattagataagctaatgggtagtgcctggaggg

SEQ ID NO: 3296 - DNA, 201 bp, Homo sapiens
tgtgtttgaatgagttcatccacatggcaagaattcttattctgtgcctctcccctgcccagtagggcatattgcttcatcagcaccaaataccttcacatttttttcacatatactcactctcccagcaacatctactccatgatcctcactacagggaccaatgtagataaaggatgacatactgtctagccaagacgg

SEQ ID NO: 3297 - DNA, 201 bp, Homo sapiens
cctgtattgtacagcaccaacgcttgcctgagtgtagtgagattcacagagtttggaaatttcctgtagcatgaggaggctgcggggcagccttctgtcayctatgtgtacccagcagtgtgctgtcctcacacaactcacggataagcagaaagcatctctattacatgaaaaatttagctaaatatacaaatatccatg

SEQ ID NO: 3298 - DNA, 201 bp, Homo sapiens
aaaacacagacacacaccagcttccgaatattaaccaaaccaggctaattcgagagattgccaaagcagtgaggatccgatcaaccgaagagatctttctwcccttgacccagtcaatacagttcaccagtgctatgaaactatttcctaaatttccaattataaattccacaattaaaacgaatgtaaatatgctcttta

SEQ ID NO: 3299 - DNA, 201 bp, Homo sapiens
cgccattgtcctgcttgtctttataaagggagctgacacgtttctcccagcataaagttgggagtgacaccagagccttctgcaagatgcttctgattctsctgtcagtggccctgctggccttcagctcagctcaggacttagatgaaggtaagccgaattgggggaagatattgtgactctgattggggtttacgggcg

SEQ ID NO: 3300 - DNA, 201 bp, Homo sapiens
aataggctatcaaaagagtcagacatattgaccgtcttcactgttagctgtaggattgctgcccaaccccctgacacacccacacaaactcacatacacasaaatgaaaagcacagtggaaagcagaatagcagtctttccaaacagattgaaaaacaaatgatgtctaaagttcaatcctgacactgtgctgattgcttg

SEQ ID NO: 3301 - DNA, 201 bp, Homo sapiens
aagacagattcagggaagtgcagctgtgaagatcctatactgatcccagtagacagggatgatggtggccttgctggacagtggatgagtatccatgaagkagataaacacatgtcagagctattgctgaggcagagaattgggtaaacacttgcctctgtctacatagagttagagaatcaccagagtgaaatattgtca

SEQ ID NO: 3302 - DNA, 201 bp, Homo sapiens
tactttcttgatatgctagtctcttttgctgattgttgacattggagaaggtcatggaagggacctgagctgagcgacctttaggagcatttcctgttctyttcctgtactctgctgccaaggagaaatctgtctttcaccaggcttgcagctttctccgttacccacatcatcaggcaatatctgtctggcacccctctt

SEQ ID NO: 3303 - DNA, 201 bp, Homo sapiens
ttcctttttgacatgatggttgacctgaaatcaccaaggcaggactgctcatctccaggtctaatggaaaacagtatctggtgaaaccaaagaaaataatyccagtaacccattgggagctgcttggcttaagcacctaccctgtgcctaagatacaacccatcaagcccagctaaaactgatccagtttccacagggcca

SEQ ID NO: 3304 - DNA, 201 bp, Homo sapiens
ctggtgagagcatagctggtatttatactttcttgatatgctagtctcttttgctgattgttgacattggagaaggtcatggaagggacctgagctgagcracctttaggagcatttcctgttcttttcctgtactctgctgccaaggagaaatctgtctttcaccaggcttgcagctttctccgttacccacatcatcag

SEQ ID NO: 3305 - DNA, 201 bp, Homo sapiens
agaatggtatataaatggaatcatacatcattgtgttttctctgtgcccacagatgcctgtttcttcctctttttataaagacaccagtcctattgtactrcggcctcactgtatggcctaatttaaccttaactacctacttaaaagccttatatccaaatacagtcacattgagagtgtgggcttcaacacatggattt

SEQ ID NO: 3306 - DNA, 201 bp, Homo sapiens
taaagttcaatcctgacactgtgctgattgcttggacacagttccgtcaaaacatttgtccaagtcatagttgtaccttttagaaattagccacaaacaayatcctccccaacccttcctgctaggctagagtcccagaagaaatgagggatacacttgacctgaagtaagcaaagcagaacccagtctctgaggcgagga

SEQ ID NO: 3307 - DNA, 201 bp, Homo sapiens
gatcactctgattgtcgtgagggaactgatatgggatgtactgggggaagaatgttaccaggaccaggtcgaggctgttaaagacctccaggagagagcaytgtgggccgaacaacaagcttctagtaaagatcatgcaagtggacacatttgagatgtattttgaaggtggaagaaattagataagctaatgggtagtgc

SEQ ID NO: 3308 - DNA, 201 bp, Homo sapiens
atccattgatactggcatttatatggatgtttatcagtgcaatatttaaaaacaagaagaccgaagtcacaagaagcagcaccaaaaccacctttttaacyctccactttaggtagagaaaaatagagttagaaaaattggctatcttgagaaaataaaaagtaccgaggcctgtagctaaccagacactaaaatgattga

SEQ ID NO: 3309 - DNA, 201 bp, Homo sapiens
taccgagtagtatattttatgaattgaggaacagggaatttctaggtatcacagagcaatcagcagctgagaagaggagtaccaatccaggaccctggaargatttttcagaaacttaatagtttattgtccaattgtagagacaaaaatgaaaataaagatagtgaggagtaccatacaccattgcttagaagattaaat

SEQ ID NO: 3310 - DNA, 201 bp, Homo sapiens
caaatgcgccattgtcctgcttgtctttataaagggagctgacacgtttctcccagcataaagttgggagtgacaccagagccttctgcaagatgcttctrattctgctgtcagtggccctgctggccttcagctcagctcaggacttagatgaaggtaagccgaattgggggaagatattgtgactctgattggggttta

SEQ ID NO: 3311 - DNA, 201 bp, Homo sapiens
aaagaaatttgatttttcaccaccctaatgtggattaagaggagttctaattaggaagccttgggaaggggggaggttgggagttgagaggcaggtcaggsagagaggggccggccgtgtggtgaagacagagagatatgaagacaggagggttttccagcatgagctcagctcttcttgtttcaactcacacagatggag

SEQ ID NO: 3312 - DNA, 201 bp, Homo sapiens
atttattgattgcacaaatagaacccaataaagaatttgtaccgggggagtgagagagtgagatttgcatttatagagacatgggactgctgggaaggatrtggagaatgcaagacagattcagggaagtgcagctgtgaagatcctatactgatcccagtagacagggatgatggtggccttgctggacagtggatgagt

SEQ ID NO: 3313 - DNA, 201 bp, Homo sapiens
taagaggagttctaattaggaagccttgggaaggggggaggttgggagttgagaggcaggtcagggagagaggggccggccgtgtggtgaagacagagagrtatgaagacaggagggttttccagcatgagctcagctcttcttgtttcaactcacacagatggaggagactctgagcagttcatagatgaggagcgtcag

SEQ ID NO: 3314 - DNA, 201 bp, Homo sapiens
aaatattctcaccataaaaaaatatttgttacctgttatctgttatatttattatcatttgaatacgttaattagtttcatttaattattccacatagtaktcataaatcataacaacacctgatacctcataaatgtatgcaagtaaaatatgtcaatttacaataaaaataaagaaaataaagaaaaatcagatggttt

SEQ ID NO: 3315 - DNA, 201 bp, Homo sapiens
ggggagtgagagagtgagatttgcatttatagagacatgggactgctgggaaggatatggagaatgcaagacagattcagggaagtgcagctgtgaagatmctatactgatcccagtagacagggatgatggtggccttgctggacagtggatgagtatccatgaaggagataaacacatgtcagagctattgctgaggca

SEQ ID NO: 3316 - DNA, 201 bp, Homo sapiens
atgatataattttctatctgcaaagccaagagaatgagcaaagcaaatgtggtagtttagtaaggcagctggcttctaattcaacaaacgaagcaaattasttttttgcatacacgctaatcaggtactaaatattatacaaaaattaaaaacacttaatataggtactaaaattccatattcttttatgtactttatcta

SEQ ID NO: 3317 - DNA, 201 bp, Homo sapiens
ataaattccacaattaaaacgaatgtaaatatgctctttatgacaccacccattgcctgtaagagcatgccccaatgtctaatatcactgctgaagacttyttaatgcattcatctaaaatgctatgtatatctgattcttgaaaattcaataatatattccctttaaaaagggaatgttaaaccagcaaccatccagatt

SEQ ID NO: 3318 - DNA, 201 bp, Homo sapiens
atggagaatgcaagacagattcagggaagtgcagctgtgaagatcctatactgatcccagtagacagggatgatggtggccttgctggacagtggatgagyatccatgaaggagataaacacatgtcagagctattgctgaggcagagaattgggtaaacacttgcctctgtctacatagagttagagaatcaccagagtg

SEQ ID NO: 3319 - DNA, 201 bp, Homo sapiens
aatgtggtagtttagtaaggcagctggcttctaattcaacaaacgaagcaaattacttttttgcatacacgctaatcaggtactaaatattatacaaaaawtaaaaacacttaatataggtactaaaattccatattcttttatgtactttatctaccagattgagatgtaagtttaagaagcctatttttagtaactgtg

SEQ ID NO: 3320 - DNA, 201 bp, Homo sapiens
  misc_feature (1)...(201): n = A,T,C or G, or insertion/deletion polymorphism (see Tables 1-2)
aagatcctatactgatcccagtagacagggatgatggtggccttgctggacagtggatgagtatccatgaaggagataaacacatgtcagagctattgctnaggcagagaattgggtaaacacttgcctctgtctacatagagttagagaatcaccagagtgaaatattgtcatttttttctctcctgcatgtagtatttt

SEQ ID NO: 3321 - DNA, 201 bp, Homo sapiens
acagttccgtcaaaacatttgtccaagtcatagttgtaccttttagaaattagccacaaacaacatcctccccaacccttcctgctaggctagagtcccaraagaaatgagggatacacttgacctgaagtaagcaaagcagaacccagtctctgaggcgaggaggcccacctggtagggagctcaaatgcgccattgtcc

SEQ ID NO: 3322 - DNA, 201 bp, Homo sapiens
atttaattattccacatagtagtcataaatcataacaacacctgatacctcataaatgtatgcaagtaaaatatgtcaatttacaataaaaataaagaaartaaagaaaaatcagatggttttttaaagttaagtctgtaaagggacttattcatagttatccaaagctcctcctacaaagtagcagagttttctaataat

SEQ ID NO: 3323 - DNA, 201 bp, Homo sapiens; identical to SEQ ID NO: 476

SEQ ID NO: 3324 - DNA, 201 bp, Homo sapiens; identical to SEQ ID NO: 478

SEQ ID NO: 3325 - DNA, 201 bp, Homo sapiens
aagaactctttatagtattcgcattcttctctgtatggtaatatacatactttcatatatcctaatttgtgatatgtttggatggtgttgattccaagcayatctttgtaaaattcacaaagttatacacaatgaaagaatcttaaggaagtataaatttatataacatacaagaatttcttaggagctattttttttcta

SEQ ID NO: 3326 - DNA, 201 bp, Homo sapiens
tatttcttagctttcacatgagtttatttagatctcttcagtgtttattggttagtttttttttttacaattatatatgatgctattgtttggtttttccrtaatttacttaaccaatccttgtcactgaacattaaggctgctttcacactgtccctattacaggatatgttgcagtccccatctttctgaaaataaccc

SEQ ID NO: 3327 - DNA, 201 bp, Homo sapiens
ttccacatggagaagatgaggagaagaaacattgccagggacaaagtaaagggtatgaaaatgaacacagtgctggttaatacaataagactggaaaatcrtgtaaagttacttgaatcagaactgcaagtcttgtttcttctgtatccattgatactggcatttatatggatgtttatcagtgcaatatttaaaaacaag

SEQ ID NO: 3328 - DNA, 201 bp, Homo sapiens
cccacctcctcctggaaagccccagggaccacctccccaagggggccgcccacaaggacctccacaggggcagtctcctcagtaatctaggattcaatgayaggtatgattccagtttattatccatcaaaggctccaactgctacagttctccaacttcattgtgccagtgaatctattgaaaagctgttaatatttccg

SEQ ID NO: 3329 - DNA, 201 bp, Homo sapiens; identical to SEQ ID NO: 482

SEQ ID NO: 3330 - DNA, 201 bp, Homo sapiens
cctggagcatctttttgccttctctctctctctcttttttttttttatatgaagtctcgctctgtcaccaggctggagtgctgtggcgcgatctaggcttrctgcaacctccaactccctggttcaagtgattttcctgcctcagcctcccgagtagctgggattacaggtacatgccaccacgcccagctaattttttgt

SEQ ID NO: 3331 - DNA, 201 bp, Homo sapiens
tttgagcctggagcatctttttgccttctctctctctctcttttttttttttatatgaagtctcgctctgtcaccaggctggagtgctgtggcgcgatctrggcttactgcaacctccaactccctggttcaagtgattttcctgcctcagcctcccgagtagctgggattacaggtacatgccaccacgcccagctaatt

SEQ ID NO: 3332 - DNA, 201 bp, Homo sapiens
tcaccatattgcccaggctagtcttgaactcctgggctcaagcgatcctcctatcttgacctcccaaagtgctgggattacaggcatgactcactgtgccyggcccattttattttttttcatgtaacaaacaatgctgcaatgaatcactttgagcctggagcatctttttgccttctctctctctctcttttttttttt

SEQ ID NO: 3333 - DNA, 201 bp, Homo sapiens
ggtgtcgggctggggggacgatcagatctttcccatcccacgaggccatgtttcagactatcccatggggagaaatcttggacagtacctgactttccagrgcagaggtccctgcggctttctgcagtgcattgtgcccctggttactcgagaatggagaatggcgatgacttttaccaagcacactgcctgcaaacattt

SEQ ID NO: 3334 - DNA, 201 bp, Homo sapiens
ggcatggtcccatgcgcctgtaatcccagctacttgggaggctgaggcaggagaatcgcttgaacccgggaggtggaggttgcagtgagccgagatcgcaycactgcactccagcctgggcaacaagagcaaaactccgtttcaaataaataaataaataaataaataaataaataaataaataaaagtttcccatctcat

SEQ ID NO: 3335 - DNA, 201 bp, Homo sapiens
ccgagacattcagttcccaggggcaggcaggagacagaggccttcctcttagctcaactgcaagaggccttcctcttttactaatcctcctcagcacagayccttcacgggtgtcgggctggggggacgatcagatctttcccatcccacgaggccatgtttcagactatcccatggggagaaatcttggacagtacctga

SEQ ID NO: 3336 - DNA, 201 bp, Homo sapiens; identical to SEQ ID NO: 492

SEQ ID NO: 3337 - DNA, 201 bp, Homo sapiens; identical to SEQ ID NO: 487

SEQ ID NO: 3338 - DNA, 201 bp, Homo sapiens
ccaggaagctctgccgccccctccctgtccctcatgccgctcctcagctccctcagctcctagagggggaagaggagagacccccaacaaggggacaggasggtcactgtgccaatcctgtcatcaccctcctgtggatgtacaggcagtgctcaataaatgcttcgaggctgatgaggctgctggctcagggtgcgtggg

SEQ ID NO: 3339 - DNA, 201 bp, Homo sapiens
ccactgcactccagcctgggcaacagaggaagactccctctcaaaaaaaaaaaaaaaaaaaaaaaaaagggcatttctccccttgaatctcctgaatctcmgtatggctggctcctcctcttccttccagcctgcctaaaataggaagcaccctattttatttccttgtgtatcattcatattccctacttagaatcttag

SEQ ID NO: 3340 - DNA, 201 bp, Homo sapiens
aagacggtcatctgcaaactaggaagtgaatctgctggtgccttgatcttggacttcccagcttccggaactgttgttcataagctaccccagtttacggyatatttgttatagcagcctgaacaaacatttggagacatctgctctctacccagggctgctcccaccacagggcctttgcacatgctgttcccactcctg

SEQ ID NO: 3341 - DNA, 201 bp, Homo sapiens
gtgatctcggctcaactgcaaactctacctcccaggctcaagtgattctcctgcctcagcctcccaagtagctgggattacaggcatgcgccaccacaccyggctaattttgtgtatttagtagagatggagtttctccacgttggtcaggctagtctcaaactctggacctcaggtgatccgcccacctcagcctcccaa

SEQ ID NO: 3342 - DNA, 201 bp, Homo sapiens
caagcacactgcctgcaaacattttattagcaaagcacatcctgcacagccctagatcccttaaaccttgattccatacaacacatatttctgtgagctcraggttggggctaaagttacagattaacagcatctcagggcaaagcaattgttcagggtatgggtcaaaatgaagttttttatgtcttccttttctacata

SEQ ID NO: 3343 - DNA, 201 bp, Homo sapiens
ggtcggtgttcgaatcttcccagctctggttggcccgcagcctggttagcaggtcctcgtagcgtttccgcaactctcggaatctggagtcttcggagtgyaactctgagggtcccgggaaacttgcgcggctcgcctcggccagagacagggcgcccccatgcggcagccacgagagcaccagcaacaccaggagcatct

SEQ ID NO: 3344 - DNA, 201 bp, Homo sapiens
gctgaacaaaccctgggctgctcaggatgggcccaagcccggtttaggcttgcagccacggtacggcagccggagcgcccccaagccccaagtggccgtgmcatcctgcccctccactcccgactatgagaacatgtttgtgggccagccagcagccgagcaccagtgggatgaacaagggtaagtaagccactgagacac

SEQ ID NO: 3345 - DNA, 201 bp, Homo sapiens
gtggcttatgtcagtaatctcagcactttgggaggccgaggtgggtggattgtttgagcccaggagttcgagacaagtctgggcaagatggcaatacctcrtctctaaaaaaaagaattctgcgccgggcacggtggctctcgcctgtaatcccagcactttgggaggccgaggcacgtggatcatctgacgtcaagagtt

SEQ ID NO: 3346 - DNA, 201 bp, Homo sapiens
aaacaaaggaagcagaggagaacgggctagatggagccaggaagggcaaccttgatgtgtcatgcctctctgccatgcctgtttcctcaccaggaaaaaarggactgagactctcactggagaggtggtcaaatgaggggtaaagcacagggccagacacataggaggcacttgataaactgggtgttattgcagttactc

SEQ ID NO: 3347 - DNA, 201 bp, Homo sapiens
tctagcaagagggaagcgggactctggtccacccctccctcttgccctccatccacctctggtgagaaccttgaggccctgcaagggggcggatctctgtyttcattcttcccctctgcactccacccagacaccagttcctcttccccctgagtcgctgggtgcagagccagaggaacgccagcgaccccagcagcgctg

SEQ ID NO: 3348 - DNA, 201 bp, Homo sapiens
ccccagacccacctccaaaactcactatcccagaccccaggcctgcctgtcccccaccacctgcagcctcgggtctggcacttcctcatttctttatttcwaagaggcctcagaactgggcgtggaggacgtgcagctgcatgaggctcactgctggctgggctcctccatccctctgctccttataaaagaggccccaag

SEQ ID NO: 3349 - DNA, 201 bp, Homo sapiens
ctttgggaggccgatgcaggtggatcacttgaggtcaggagttcaagaccagcctggccgatatgtggccaatatggtgaaacgcccgcttctactaaaamtaccaaaaattagctgggcatggtggctggcgcctgtgatcccagctactcgggaggctgaggcagaagaatggcttgaatcggggcggtggaggttgca

SEQ ID NO: 3350 - DNA, 201 bp, Homo sapiens
gctgacgccgcagcggtcgtgtcacgtcccacgaccttgacgccgtcggggacagccggaacagagcccggtgaaggcgggaggcctcggggagcccctcrggaagggcggcccgagagatacgcaggtgcaggtggccgccggatcccagccgcactgtgggaagacagatagggaagctggtcacccacaggcctaccg

SEQ ID NO: 3351 - DNA, 201 bp, Homo sapiens
aagattctgccagcagttggtccgactgcgacggcggcggcgacagtcgcaggtgcagcgcgggcgcctggggtcttgcaaggctgagctgacgccgcagmggtcgtgtcacgtcccacgaccttgacgccgtcggggacagccggaacagagcccggtgaaggcgggaggcctcggggagcccctcgggaagggcggccc

SEQ ID NO: 3352 - DNA, 201 bp, Homo sapiens
ctcaggacccttagattccaggactctcagacccctggatccccagacctcagagtccccaaatctcaggaccccacagacctcagactccaaggcccccrgctcccccagacccacctccaaaactcactatcccagaccccaggcctgcctgtcccccaccacctgcagcctcgggtctggcacttcctcatttcttta

SEQ ID NO: 3353 - DNA, 201 bp, Homo sapiens
cccctggcggcttgcggccgcaagtgcaactccagctggggccgtgcggacgaagattctgccagcagttggtccgactgcgacggcggcggcgacagtckcaggtgcagcgcgggcgcctggggtcttgcaaggctgagctgacgccgcagcggtcgtgtcacgtcccacgaccttgacgccgtcggggacagccggaac

SEQ ID NO: 3354 - DNA, 201 bp, Homo sapiens
tccccttcactcaaccaggctccgcaaagtggggtggtccttgtgtgtctttttacagctgtgtccggggcctggcataaagtgggcactcactgaatacrttaaggggaacctgcagtcattcaggttggcctgtgggtgatggcattcccagcagatacacctcactgctggaagtgggtactctgtccctcaagacac

SEQ ID NO: 3355 - DNA, 201 bp, Homo sapiens
atgggattgtagctggcgggcacgcagcagggcgctggcaccgtgtcgggcttcaggcggtgcaggctcgtcttgatctgcgcgtgcatgtttgccgcccsgaactggctcgggcacgcgccgatgcacatggtcacttgcacctcccgtggcgacagcacccaatcggcccagcccaggtcttccagcgacgcgcggacc

SEQ ID NO: 3356 - DNA, 201 bp, Homo sapiens
ttaagaggtggctgtctatgcccatgggatttcctctcttctctttttggttggggtcaaaggctaaagatggtgaaaaacaaaggaagcagaggagaacrggctagatggagccaggaagggcaaccttgatgtgtcatgcctctctgccatgcctgtttcctcaccaggaaaaaaaggactgagactctcactggagag

SEQ ID NO: 3357 - DNA, 201 bp, Homo sapiens
taaacactccaatgaccacagctgggcggggtctgggggtgtatttagggggaggatctttaggtgggggcgctcctagtaaagctagggcacatttctgrgcctcagtatcctcttcctcgatatgaggacaccattccagcctgggagtctttttggaggaaaaaaagacattgttactatgtgaaaaattccagacaa

SEQ ID NO: 3358 - DNA, 201 bp, Homo sapiens
gggcggtggaggttgcagtgagccaagatcgtgccactgcactccagcctgggcaacagaggaagactccctctcaaaaaaaaaaaaaaaaaaaaaaaaargggcatttctccccttgaatctcctgaatctcagtatggctggctcctcctcttccttccagcctgcctaaaataggaagcaccctattttatttccttg

SEQ ID NO: 3359 - DNA, 201 bp, Homo sapiens
tacccctggtctgtctgtccccccagggctcacccttcagaggacaatgacttttacatcaactacaaggacatcgacctggcttcccagcctgtctactrtaacctgcagtcactgggccaggccccaatggatgaagaggagtacgtgatccccgggcactgagcctaagatgtcctaacctccacccagaaccccttc

SEQ ID NO: 3360 - DNA, 201 bp, Homo sapiens
taaataacagacttatataaatacagctgtttgggcaggaatcgggtgtctcaggaaccttgagcccattccacagggcaggacaactgaggtcgcgtccyccgcgcaggtgcacagtggaaggaccaggactgctcatatgcagtggcagtctttggctaacaagtcatcataggtctggagcgacaccccggtgtcggt

SEQ ID NO: 3361 - DNA, 201 bp, Homo sapiens
ataataaataacagacttatataaatacagctgtttgggcaggaatcgggtgtctcaggaaccttgagcccattccacagggcaggacaactgaggtcgcstcccccgcgcaggtgcacagtggaaggaccaggactgctcatatgcagtggcagtctttggctaacaagtcatcataggtctggagcgacaccccggtgt

SEQ ID NO: 3362 - DNA, 201 bp, Homo sapiens
ccccctacaaccacttaggggttggtgggcaattcgtactagagtataattgactgatagatgctgttaacacaaagtagcccttttgcctttttttttttcccgctctgtcgcccaggctagagtgcaatggcatgatctcggctcactgcaaccttcacctcccgggttcaagtgattctcctgcctcctgcctcagcc

SEQ ID NO: 3363 - DNA, 201 bp, Homo sapiens
gagtccccaagaaggtcaccccaataaattaataataaataacagacttatataaatacagctgtttgggcaggaatcgggtgtctcaggaaccttgagcscattccacagggcaggacaactgaggtcgcgtcccccgcgcaggtgcacagtggaaggaccaggactgctcatatgcagtggcagtctttggctaacaag

SEQ ID NO: 3364 - DNA, 201 bp, Homo sapiens
ccagagttttaaataaatacacagttccatcagaccagcccccgagtccccaagaaggtcaccccaataaattaataataaataacagacttatataaatrcagctgtttgggcaggaatcgggtgtctcaggaaccttgagcccattccacagggcaggacaactgaggtcgcgtcccccgcgcaggtgcacagtggaag

SEQ ID NO: 3365 - DNA, 201 bp, Homo sapiens
gtccccttcactcaaccaggctccgcaaagtggggtggtccttgtgtgtctttttacagctgtgtccggggcctggcataaagtgggcactcactgaataygttaaggggaacctgcagtcattcaggttggcctgtgggtgatggcattcccagcagatacacctcactgctggaagtgggtactctgtccctcaagaca

SEQ ID NO: 3366 - DNA, 201 bp, Homo sapiens
tgaactgatgggttgaatccccagcacaaatcttactgcaatcaactactttcttaggatttactcatttgtccccttcactcaaccaggctccgcaaagkggggtggtccttgtgtgtctttttacagctgtgtccggggcctggcataaagtgggcactcactgaatacgttaaggggaacctgcagtcattcaggttg

SEQ ID NO: 3367 - DNA, 201 bp, Homo sapiens; identical to SEQ ID NO: 489

SEQ ID NO: 3368 - DNA, 201 bp, Homo sapiens; identical to SEQ ID NO: 491

SEQ ID NO: 3369 - DNA, 201 bp, Homo sapiens
atgttgtccaggctggtcttgaactcatgatctcaggtgatccacccacctcagcctcccaaagtgctggattacaggcgtgagtcagagcacctggcccrctctggactttctcaaagctcatgtgcctgtcccctgagtcctccccctcccacacttacccctggtctgtctgtccccccagggctcacccttcagagg

SEQ ID NO: 3370 - DNA, 201 bp, Homo sapiens
acctcccgtggcgacagcacccaatcggcccagcccaggtcttccagcgacgcgcggaccgtgtgcagacggcagcaacgcccgggcccgagcggacagtsgtccccgttgcgcgcacgcgctctgcggcgccccctggcggcttgcggccgcaagtgcaactccagctggggccgtgcggacgaagattctgccagcagt

SEQ ID NO: 3371 - DNA, 201 bp, Homo sapiens
agtagctgggactacaggcctgtgccaccatgcctggataatttttgtatttttagtagagacgaggtttcatcatgttgtccaggctggtcttgaactcmtgatctcaggtgatccacccacctcagcctcccaaagtgctggattacaggcgtgagtcagagcacctggcccactctggactttctcaaagctcatgtg

SEQ ID NO: 3372 - DNA, 201 bp, Homo sapiens
cccgggaaacttgcgcggctcgcctcggccagagacagggcgcccccatgcggcagccacgagagcaccagcaacaccaggagcatctgagagccattcascgtcctgagttcttgcccgggcatggctgtgcaggttgcggctctgagctgggactgaccagatgctgccggaccggcctttatagtccccggactttgt

SEQ ID NO: 3373 - DNA, 201 bp, Homo sapiens
caggctggtacaagtgttagggagactggggagactggggtttgagggtgccttaacctagttgctaggcttagcaagggtgagaggtttgccggagtcayacggcacagatgggtttagggcgggctaagagtgtgcccctctgcctgccccctcctgggtcccaccacagcccagacctcatccagtgccctgcacccc

SEQ ID NO: 3374 - DNA, 201 bp, Homo sapiens
acgaggtcggtgttcgaatcttcccagctctggttggcccgcagcctggttagcaggtcctcgtagcgtttccgcaactctcggaatctggagtcttcggwgtgcaactctgagggtcccgggaaacttgcgcggctcgcctcggccagagacagggcgcccccatgcggcagccacgagagcaccagcaacaccaggagc

SEQ ID NO: 3375 - DNA, 201 bp, Homo sapiens
ttcaagaccctggtgcaatgccacctcctttgagaagctgtccctggtttcttctcaggcagagttaatgactcacagatgtctgtatttcaagagttttktcaggctcatgcctcaactgggtttcctatcagctggtcccagcccaatcctccaacctgggggagatagaactagagacaagtaccctcagtcctggga

SEQ ID NO: 3376 - DNA, 201 bp, Homo sapiens
accttccttaactgcatgggactaggagtgtctatgtccagctctgtcctctcttaagatagctccttgaggacctggtcagggctgaggcctcttggggscccagcgtgggtgatgcttgttgaatgaataaatgactgcatgagctgggaaccagccaagctgagatcaagaagcgagttgatgaggtggcagtcggtt

SEQ ID NO: 3377 - DNA, 201 bp, Homo sapiens
tccagcatagaggtgccactgtgcaagaactcagtgggagaggcttggaggagcttggagagccaatgataggtttggggaatcttagtgaactcctactyatgcgttgaagccccaactgtaatgcctcctcctccaggaagccttccaggaccctgtctttccctctggaccttccttaactgcatgggactaggagtg

SEQ ID NO: 3378 - DNA, 201 bp, Homo sapiens
ccttccctaaatcactgccctcccgcagcctcctcagagagaggtggggttggctaggagtcagaacgctagcccgtgccagtttccccatatgtaaataytcggggtggactgagccactctgaagctttctttttttttttccttctgagatagagtcttgctctgtctcccaggctgaagtgcaatggcacgatctcg

SEQ ID NO: 3379 - DNA, 201 bp, Homo sapiens
gcacagaatgtcattgcattgttggatttttgccaatttgattggtgaagacaaacagtttgtgatttgcagttttcttattaagtgtgaacttttttttktttttgagacaggtctcactctgttgcccaggctggaatgcagtggagtgatcttggctcactgcagcctccacctcctgggttcaaacaattctcctgc

SEQ ID NO: 3380 - DNA, 201 bp, Homo sapiens
tggtggaaccctgtttctactaaaaaatacaaaaattaggccgggcacggtggctcatgcctgtaatcccaacactttgggaggccaaggcaggaggatcmcgaggtcaggagttcgagaccagcctggccaatatggtgaaaccctgtctctactaaaaatacaaaaattagccgggcatggtcgtgggtgcctgtaatc

SEQ ID NO: 3381 - DNA, 201 bp, Homo sapiens
accggcttctggatgattttgctgggcttagacaaatgagttgaacttttctaggttggtgtggggtgcggtggctcatgcctataatcccagcacttttygaggccaaggcgaggtcagatcacctgtggtcaggacctcaagaccagcctgaccaacatggtggaaccctgtttctactaaaaaatacaaaaattaggc

SEQ ID NO: 3382 - DNA, 201 bp, Homo sapiens
cacggtgaaacccagtctgtactaaaaatacaaaaattagccaggtgtggtggcgggcgcctgtggttccagctactgaggaggctgaggcaagagaatckcttgaacctgggagtcagaggttgcagtgagccaagttcatgccattgcactccagcctgggtgacagagtgagactccatctcaaaaataaaatcaata

SEQ ID NO: 3383 - DNA, 201 bp, Homo sapiens
ctggccaacacggtgaaacccagtctgtactaaaaatacaaaaattagccaggtgtggtggcgggcgcctgtggttccagctactgaggaggctgaggcargagaatctcttgaacctgggagtcagaggttgcagtgagccaagttcatgccattgcactccagcctgggtgacagagtgagactccatctcaaaaataa

SEQ ID NO: 3384 - DNA, 201 bp, Homo sapiens
gcggatcacttgaagtcaggagtttgagaccagcctggccaacacggtgaaacccagtctgtactaaaaatacaaaaattagccaggtgtggtggcgggcrcctgtggttccagctactgaggaggctgaggcaagagaatctcttgaacctgggagtcagaggttgcagtgagccaagttcatgccattgcactccagcc

SEQ ID NO: 3385 - DNA, 201 bp, Homo sapiens
acaggtgtgagccaccacgcctgactttgccttctcaaaaaaacaaacctgcaacatacacacaacataaaattgaacattttagccaatttatttatttrttattattattttgagatggagttttgctcttgttgcccaggctggagtgcagtgccgtgatctcggctcaactgcaaactctacctcccaggctcaagt

SEQ ID NO: 3386 - DNA, 201 bp, Homo sapiens
gatctgctcacttcagcctcccaaagtgttgggattacaggtgtaagccactgcacctggcaagaatgagcatctctggacatgttgaaaagcagtttccygctttttcttcaaggtctccgttcaaagcctttgaccatttcttggagtttggcgatgtgaaggacagaggccgaaaagaggggaaaacgtgggggagtg

SEQ ID NO: 3387 - DNA, 201 bp, Homo sapiens
tttatttatttattatggtcttgctgttacccaggctggagtgcagtggggcactcatggctcagtgcagcctcaatctcctggattcaagtgctcctccygcctcagcctcctgaataactgagactacaggcacacaccatcatgtctggctaattttttttaaacatttttggtagagatggattctcgctatactgc

SEQ ID NO: 3388 - DNA, 201 bp, Homo sapiens; identical to SEQ ID NO: 490

SEQ ID NO: 3389 - DNA, 201 bp, Homo sapiens
cctcagcctcccaaagtgctggattacaggcgtgagtcagagcacctggcccactctggactttctcaaagctcatgtgcctgtcccctgagtcctccccstcccacacttacccctggtctgtctgtccccccagggctcacccttcagaggacaatgacttttacatcaactacaaggacatcgacctggcttcccagc

SEQ ID NO: 3390 - DNA, 201 bp, Homo sapiens
ttaccaagcacactgcctgcaaacattttattagcaaagcacatcctgcacagccctagatcccttaaaccttgattccatacaacacatatttctgtgarctcgaggttggggctaaagttacagattaacagcatctcagggcaaagcaattgttcagggtatgggtcaaaatgaagttttttatgtcttccttttcta

SEQ ID NO: 3391 - DNA, 201 bp, Homo sapiens
cttttactaatcctcctcagcacagacccttcacgggtgtcgggctggggggacgatcagatctttcccatcccacgaggccatgtttcagactatcccayggggagaaatcttggacagtacctgactttccagagcagaggtccctgcggctttctgcagtgcattgtgcccctggttactcgagaatggagaatggcg

SEQ ID NO: 3392 - DNA, 201 bp, Homo sapiens
atacgtctcgcctcccgccatagggcggtttttctcctatctcagaattgaacaaatgtacaatcgggttttataccgagacattcagttcccaggggcargcaggagacagaggccttcctcttagctcaactgcaagaggccttcctcttttactaatcctcctcagcacagacccttcacgggtgtcgggctgggggg

SEQ ID NO: 3393 - DNA, 201 bp, Homo sapiens
atcccagcactttgggaggccgatgcaggtggatcacttgaggtcaggagttcaagaccagcctggccgatatgtggccaatatggtgaaacgcccgcttytactaaaaataccaaaaattagctgggcatggtggctggcgcctgtgatcccagctactcgggaggctgaggcagaagaatggcttgaatcggggcggtg

SEQ ID NO: 3394 - DNA, 201 bp, Homo sapiens
ctcacacctgtaatcctagcactttgggaggccaaggcaggcggatcacttgaagtcaggagtttgagaccagcctggccaacacggtgaaacccagtctstactaaaaatacaaaaattagccaggtgtggtggcgggcgcctgtggttccagctactgaggaggctgaggcaagagaatctcttgaacctgggagtcag

SEQ ID NO: 3395 - DNA, 201 bp, Homo sapiens
atggtggctcacacctgtaatcctagcactttgggaggccaaggcaggcggatcacttgaagtcaggagtttgagaccagcctggccaacacggtgaaacscagtctgtactaaaaatacaaaaattagccaggtgtggtggcgggcgcctgtggttccagctactgaggaggctgaggcaagagaatctcttgaacctgg

SEQ ID NO: 3396 - DNA, 201 bp, Homo sapiens
ggactggacatggtggctcacacctgtaatcctagcactttgggaggccaaggcaggcggatcacttgaagtcaggagtttgagaccagcctggccaacayggtgaaacccagtctgtactaaaaatacaaaaattagccaggtgtggtggcgggcgcctgtggttccagctactgaggaggctgaggcaagagaatctct

SEQ ID NO: 3397 - DNA, 201 bp, Homo sapiens
ggggagaggactggacatggtggctcacacctgtaatcctagcactttgggaggccaaggcaggcggatcacttgaagtcaggagtttgagaccagcctgrccaacacggtgaaacccagtctgtactaaaaatacaaaaattagccaggtgtggtggcgggcgcctgtggttccagctactgaggaggctgaggcaagag

SEQ ID NO: 3398 - DNA, 201 bp, Homo sapiens
tgacaccatctgctgccttttggtattgagtttaattttgaagcctcctaggtgcccattttcaacagctttgctgtgactgaagtgagcctgctcccatmtcagggcctttgcacttgctgtttgcatttacttgcaatgtccaccctcaactaccccctccccgactccttttcttcctccaggtctcagctcaaatgt

SEQ ID NO: 3399 - DNA, 201 bp, Homo sapiens
gcaacaggttctagattccagcaaaatggtttgtgacactgagctgcccatgaggactctatgggaaagcccattatagcacaggacagctgggggaccaygttgggtccaatctctgcatgaactcaggaatcacaagggctgcctcctcccacgggcttctcatcccccaagacttcaccgtgcttttctgtgtcattc

SEQ ID NO: 3400 - DNA, 201 bp, Homo sapiens
ggcctcagcgcctgccctcggggcctgctgcagctctggggctggcacaggtctcgctggcccctagagggagctcgaagcccctccagctctgatctgtmccttccaaggagaagagcaggtaagctccggaggtctgtgtggcatcctgggcccaaattaaggaggaggtgtcccgccgactgcgctctctttggaccc

SEQ ID NO: 3401 - DNA, 201 bp, Homo sapiens
cttgtctgggccctgcaagtgatgaggaggggctgacagcctgcagcaggggggtgacaggacacctctgggcttctgtcccagctctgtgccttcccctkatgtgtggtcaggtacacggaggaggtgcaccccagggagggccgtgagtggagttattcctcacatcctttttttttgcatttattattatttttagtt

SEQ ID NO: 3402 - DNA, 201 bp, Homo sapiens
tgccttcagctcctgtaagccccagagccctgaatggtgccaggcacgtggaaggtgcttcattcattcactcgttcatttgttcgttcggttttgaacasccagccaggcggggatctgggctgagggtgttcagagataggccacattcagctcttcaccccgagctcacaattggctggggagccaggtccccatgac

SEQ ID NO: 3403 - DNA, 201 bp, Homo sapiens
ggctctggattttgcatctgggagaccttaggctggtaccttcttctcactgggcctcagtttccccctgagtcagatgagagggttggaccagatggtawcaggcttttcatctgtggcttgcttgtgaccatcaaaaaaagcaaaaacacgttaaagcctcgccagtcatcattttccaagtttcccctggatttttcc

SEQ ID NO: 3404 - DNA, 201 bp, Homo sapiens
tgagaggcaccctggtgctgaagaagctctggggaggaggccccaagctgcctccttcccagaaggttgtgcctagtccctccactgctctcatttgaccmcatctggtccctccagtcctgcccacccctccaggagagccccagccttcagcaggaggccagccttgcctcagcagccctctcctcccataccctggac

SEQ ID NO: 3405 - DNA, 201 bp, Homo sapiens
tttagggcgagacaggatggggctgagatcctgtttctgactcgactactagctggatgcccttgggcaagtttctgaacccacctgagctcatctacacwtcatcaaccagcagccaataatggggtctgacacggggggtgtgcctgggcctcgggtggaagcctctaccgtccagcccagtaccatgtgccatttttt

SEQ ID NO: 3406 - DNA, 201 bp, Homo sapiens
atgtgggtctttagaaaatccaaatagataatctctgtcttttacttgatgtttaagtcatttacgtttaacacaataattgatatgtttggatttaggtstacgttttattgttgtttgttgtcctctctacttttgtttttcttttcttttctgccttctttttttttcttaaatttcttttaaattaatctactggca

SEQ ID NO: 3407 - DNA, 201 bp, Homo sapiens
agaggggtggggtagtgcatagctgaagagtaattggagataatgtaactgtttacacagtaagtgatgttgtttcattttgtgctacattttgccctaaygctagaaaacatcgtgctgaaaaaacagacattacaatctccctcacatcttaggtttttgctaaagattaaaaatgttacttctctaatctgtttctga

SEQ ID NO: 3408 - DNA, 201 bp, Homo sapiens
ctgcacccggcaccatgtttggcttttaaatagagtgtggggctaaggcaaatattgaagttaacagaagtgtgttctttataatcaagtgaagagagaaragaagattcttcagttgaatggagactttccctttaggcaggtagagagatgacacttttgctcatgtccagatactgaaacctcaagatgtcaggaaag

SEQ ID NO: 3409 - DNA, 201 bp, Homo sapiens
ggtctcccaaagtgctgggattacaggcgtgagccaccgtgcccagcctgttctcaatctttcaatcttgctcttttgagagtctgtctagtcagtcagamaacagataattcacactgcttgggaatatatgtatttcgggccatttctctctccatgcaattgagagatggagagtggatgactgcctggactctcagg

SEQ ID NO: 3410 - DNA, 201 bp, Homo sapiens
cttctttctgttataaaaacaattcaagcaaaaaaaaaaaaacggggaaaatgtagcaataatccatgtttccattatccatctatcttttaacctccttyctcccctctcttctctcaccttttctcttgtgcttcttctttcttaaggcaaatgattacagatagagctagagtcttttttttatacacccctcacccc

SEQ ID NO: 3411 - DNA, 201 bp, Homo sapiens
tttcatcttgcattgccatgcagggcagactcatcctggtttttgcctccgttgtcagctggttgtagagatcaccccctcccaccccaaagaggccatasggtgagctgagggagatgcattggcatgacataggtgggtgacatgagggtctgggccagcagtttgtattgcttgcttgtgtttttgaacctgcttgtg

SEQ ID NO: 3412 - DNA, 201 bp, Homo sapiens
ttgctttaaacattttggtgaatttctatttaatcttttcctccctcccctatcttttccttctttctgttataaaaacaattcaagcaaaaaaaaaaaaacggggaaaatgtagcaataatccatgtttccattatccatctatcttttaacctccttcctcccctctcttctctcaccttttctcttgtgcttcttctt

SEQ ID NO: 3413 - DNA, 201 bp, Homo sapiens
gagtttgtttttgtctgcctaattgtttaatcaccatttgttgaaggcattatgtttttctcagttgacttgcctttgcacttttgtcaaaaatcagttgrccacctttgtctgtgtctatttctggagtttctttattttccatagatctatatgtctatcttgccacgagtatcacactctcttggttactgtagcttt

SEQ ID NO: 3414 - DNA, 201 bp, Homo sapiens
tagccacaggagaagactatggatgtatattctcacccatcctgtgtgagtgaaactgcctcttatgctccttgatgaagattcaaacaagtccagtagaycaatagctgcattactacatagcagaagctgtgttgatctgttctaggtaaacacaccatatctggcaaagtagctgtgactggggttacacttggttaa

SEQ ID NO: 3415 - DNA, 201 bp, Homo sapiens
gttgctttaaacattttggtgaatttctatttaatcttttcctccctcccctatcttttccttctttctgttataaaaacaattcaagcaaaaaaaaaaaaacggggaaaatgtagcaataatccatgtttccattatccatctatcttttaacctccttcctcccctctcttctctcaccttttctcttgtgcttcttct

SEQ ID NO: 3416 - DNA, 201 bp, Homo sapiens
ttttgactggctaatatatttagaactttattttgaatctgtactttccaacaaattatccctcttctgaggaaaagtacacacacacacacacacacacatgcatgcacacacacacacacatgcatacacttatatacttttatatctggcatcacttctctcagaaacatttctcaggtgacaggtagtccctgcaaa

SEQ ID NO: 3417 - DNA, 201 bp, Homo sapiens
acatttattcctatactacgttttaatattttcataaggtgtgaggtgtggatgggtcagtagagtttgtttttgtctgcctaattgtttaatcaccattkgttgaaggcattatgtttttctcagttgacttgcctttgcacttttgtcaaaaatcagttggccacctttgtctgtgtctatttctggagtttctttatt

SEQ ID NO: 3418 - DNA, 201 bp, Homo sapiens
ggtattagttttgattgcttgggtcagggggcaatttcaggagctggcgttcggcctttcctactatgttagctgctaggtatgtccatcctggtgatgtrttccggaatggaggaaatgcccacttggtgggtctgtggacctgcgggacccactgagagaaagactggactgcattcactgcttgcactcacatacctt

SEQ ID NO: 3419 - DNA, 201 bp, Homo sapiens
tttgtttatccattcaccagttgaagatattcaccttgtttgtagttttttgattattacgaatagagttgctatataaacatttatgtacaggatttgaygtgaacataagttttcatttgtattagttaaatacctaagcttaggattgctggattatatggtaaatgcatgtttacctttatgagaaactgctaccct

SEQ ID NO: 3420 - DNA, 201 bp, Homo sapiens
tactagtttatagtagtgtagaagtgttccctgttcaccacgtccatgccaacatctattttttgatgtgttgattactggccagacatttttgttcaatygcccttcttttactttaggagggccagtatttcctagttagaccttactgagactccaccctggttattgttcttgtggccagtgggggtgagggtagag

SEQ ID NO: 3421 - DNA, 201 bp, Homo sapiens
caaatacatatttttttatgtaaaatttatttcccagaaaatcccttaaaaacaaaaaagagagattgtgaaacacatcaggagtttatagtcatttttawaaaaaaaaattcatttcaagtttcgagttttctcaaaagtttcaaatttagtctattggctcctttctttgaaagatgagatgttgatttactcacctcc

SEQ ID NO: 3422 - DNA, 201 bp, Homo sapiens
tgtggtgaaggaagatcttgaggaggaaagacagtcttacaagagattgtcaccactgaggcctctgagtagatttcaagcaagggcatttgctgtctccygcaaaggaatagcccaccacttctgcaggtagagagagttccagggaatctggaggtttagtgttttcaactctccacccagatgtctctaccccatttc

SEQ ID NO: 3423 - DNA, 201 bp, Homo sapiens
tcaaatacatatttttttatgtaaaatttatttcccagaaaatcccttaaaaacaaaaaagagagattgtgaaacacatcaggagtttatagtcatttttwaaaaaaaaaattcatttcaagtttcgagttttctcaaaagtttcaaatttagtctattggctcctttctttgaaagatgagatgttgatttactcacctc

SEQ ID NO: 3424 - DNA, 201 bp, Homo sapiens
gtttttgaagatggctatgtattttacaacttcttgaattacattttgcttttcatactggcatgagtttgaagcagggatgcctccaaacagaaacatayaacccaatcctgagtgggtcagtctttttctatatctacatttaaaagtagccaatgcttctaaggtacctaaatctcaattgtgcattttggtatgtgg

SEQ ID NO: 3425 - DNA, 201 bp, Homo sapiens
taatcttcactttattttatagatgaaaaaacagaggcttagaaggtaagctagaaaattacagtgaatgaaagagcaagattagacctcagattttgtgwctccatatctgatgttctttattccacttagctgtctctccattcactcacatactcactcactcactcattcacttactcattcacttgaatattgggc

SEQ ID NO: 3426 - DNA, 201 bp, Homo sapiens
cctgggtgctgggaacctgaggatcagggagggagacagctgaggtccttgctgctttggagctcccaggtcagcaggagagacaagtgccaggatggaargggccacacaggggctgggggtgccagttgaggattaggggaggcctaagggatcgggggagccaggtaacaaggaggaaggggcaagcatttctggaag

SEQ ID NO: 3427 - DNA, 201 bp, Homo sapiens
tggggggccctcatgcaataccaaatctgctggggccttgatattagacttcccagcctccaggtgtgagcaataaacttctgttgtttacaagtctctcytagtctctggtatttttgttatggcagccgaaatggatgaagacaacacctgaatgcgcccgttcctaggcccttctccaagtcttggcttggtgtttgc

SEQ ID NO: 3428 - DNA, 201 bp, Homo sapiens
agctctggctctgctgctcacgagggtgggacagacatgacacaatgggcgccaccggtcctggctgcagcagatggggccctacttgtctcctcctttastgactcatgtgggctgggccttttacaatccagggcatttaggaaaagctgctataggatacgaaggtcctgagaagtcctgcaagtaagagcctggcca

SEQ ID NO: 3429 - DNA, 201 bp, Homo sapiens
ggccctgcctggacccatgagtgatggggcagctctccgggccctcctcacgtcggtcctgcccagcactgtcctggctgcagctcctctcacttgccacyatcccagttccatgctgggacctgcacttcaggccttcctcagctctgagaggcaccctggtgctgaagaagctctggggaggaggccccaagctgcctc

SEQ ID NO: 3430 - DNA, 201 bp, Homo sapiens
ccaggcccggcagggctcactcatgggcctgtggttgtctgcgggttggcaaggtggctgtgggatcttcttccacctagggcccttggctgggcccctgrggccagtgtggctctgctccacgcatctcctcctccagcaggccaacctgggcctgtcctcctggtggaagtagaagcgccaaagagagtggcagctcag

SEQ ID NO: 3431 - DNA, 201 bp, Homo sapiens
cataggtattcacttatgaggcagaagccccagttcagggtgtggctctttactggggaaggaggaggccccagccagtgggtgctgcgtgttcctggggktcttaggctcaggtgtgtgggagttgaggtgctgggatgatgatggcttcccacaaccagctctcaccacgtgccaggcactgtgctaggcgtgtgaaaa

SEQ ID NO: 3432 - DNA, 201 bp, Homo sapiens
tgtgaattgtgtgtgtgtgtgtgtgtgtgtgtgtgtgtgtgatgcttatgcgtcattactggggtcatcaggatcgtcataggtattcacttatgaggcasaagccccagttcagggtgtggctctttactggggaaggaggaggccccagccagtgggtgctgcgtgttcctggggttcttaggctcaggtgtgtgggag

SEQ ID NO: 3433 - DNA, 201 bp, Homo sapiens
tgtgtgtgaacttgtgtgagtgtgcatgtgtgagactgtgtgtgagactatgtacaggcatgtgaattgtgtgtgtgtgtgtgtgtgtgtgtgtgtgtgtsatgcttatgcgtcattactggggtcatcaggatcgtcataggtattcacttatgaggcagaagccccagttcagggtgtggctctttactggggaaggag

SEQ ID NO: 3434 - DNA, 201 bp, Homo sapiens
ctcccactgccgagggacccacccaccctgccctgcactcagcctcagccaggtgccagaacggtcagcctgggtcttctctggaactttaaaaagcagamccagtagggcaatgcttaacccaacagggtagctctgcagcagtgaagagcaggctttcttcctataaattatgtcccctgctggtccctaggtgctctg

SEQ ID NO: 3435 - DNA, 201 bp, Homo sapiens
aggacagactgtatacttaacaaaaaattgctttgacattatggagaattaagaggctggggccagatggatctcagcagatcgatctgttggagataaamtctgctatttccccgtgcgcttccttcaccttaatggcaaggctggtgattagaaatcatggagccagctcgtcatgaccaagggtcggccagagggtca

SEQ ID NO: 3436 - DNA, 201 bp, Homo sapiens
ctgtctcctcctggagccaggggtcaaagactggtcacctctgagtgctggggggtcccttaccaaggctggcagggcagggcgggcttgcagtaccgacrtctgctcttggagctcagaatcatgcacagggtcatgttgagcatttccacagcataaaaagtcacattccaggagctgtgtgtgagtgtgtgtgtgtgt

SEQ ID NO: 3437 - DNA, 201 bp, Homo sapiens
aggccagctgtctcctcctggagccaggggtcaaagactggtcacctctgagtgctggggggtcccttaccaaggctggcagggcagggcgggcttgcagyaccgacgtctgctcttggagctcagaatcatgcacagggtcatgttgagcatttccacagcataaaaagtcacattccaggagctgtgtgtgagtgtgtg

SEQ ID NO: 3438 - DNA, 201 bp, Homo sapiens
ctttcaggctatattggtataattgccatccataatcactgtatgtgggcaccaacagatgtctcagtggattcctatgtcccaaatttactttttcctgwtcccactctgtatcatgaaccctatctcctcctgacaatcctgccagtatgggaaatcctttcttttcctgctgacctactggtatgggagccccaaatg

SEQ ID NO: 3439 - DNA, 201 bp, Homo sapiens
actttgtcgcccaggcatgcagtggcacgatcttggctcactgcaacctccacctcctgagttcgagcgattctcctgccttactcagcctcctgagtagytgggattacaggcatgcaccaccatacccagctaatttttatatttttagtagcgacagggttgcaccatgttggccaggctggtctcaaactcttgacc

SEQ ID NO: 3440 - DNA, 201 bp, Homo sapiens
gtgccatcacactgcatcttcagagccttgggctgtttgcttccttgtcacaggcaggatcagttgggtttggggatggtctagagaaggtgaacaccacrggagaaactccaggcagggcctgtttcaccccagacatttttccagccaacatgtcccgaagactgatcatttatctagcatgtgtctcatgatatgctg

SEQ ID NO: 3441 - DNA, 201 bp, Homo sapiens
tttttgactggctaatatatttagaactttattttgaatctgtactttccaacaaattatccctcttctgaggaaaagtacacacacacacacacacacacatgcatgcacacacacacacacatgcatacacttatatacttttatatctggcatcacttctctcagaaacatttctcaggtgacaggtagtccctgcaa

SEQ ID NO: 3442 - DNA, 201 bp, Homo sapiens
ctgccccatcctgctttcttctaagggcacactttccctcctggggtcacaattctgggcccgacttccctttcttcctcatttctcagaacagtcctccytcccttgctgggctgctcttgagggcagagtggatggtgacccttcccctccacgccaggcaggcttggggtggccagaaagacctgctccccaggactt

SEQ ID NO: 3443 - DNA, 201 bp, Homo sapiens
gtgaggagacggccatctatgaatcagcaagagggccctctcaagacaccgactctgccttggtcttggacttcccagtctccagaactgtgagaaaaaaaggtgttgtttaagccacccagtatatgggattttgttataatagcctgaacagattgagacagatggccatgggtcatatagagggtggttaggtgcaca

SEQ ID NO: 3444 - DNA, 201 bp, Homo sapiens
ttccaggctggagtgtagcggcgccatctcggctcactgcaacctccacctcccaggttcaagagactctcatgcctcagcctcctgagtagctgagattrtaagcatgtgctaccatgcctggtgaatttttctgttttttgtagagactgggtttcaccatgttggccaggctggtctcgaactcctggcctcaagtga

SEQ ID NO: 3445 - DNA, 201 bp, Homo sapiens
gggcagagtggatggtgacccttcccctccacgccaggcaggcttggggtggccagaaagacctgctccccaggacttgccctagccgcagaagaggggaycccctgcccgtgcagccccagggcttctttccctcccctgctgcctggaaggtggcgtccgagagctctcagaggcttggggcccagcatgtggatttgt

SEQ ID NO: 3446 - DNA, 201 bp, Homo sapiens
ttctgttattattactttgcaacatataatgaaataattacacaatttaccatcatgtagaatcagtgggagccctgagcttgttttcctgcaactagacrgtcccatcttggggtgatgggagacagtggcagatcatcaggcattagattttcataaagagtgtgcaacctagatccctcgtgtgtgcagttcacaata

SEQ ID NO: 3447 - DNA, 201 bp, Homo sapiens
agaccaaaatgcaccaggcagtcgttagaaaagcaaataatactcgctcctcatttgcctaaaactgtcaaacgatcgtgcaatctgtgaatagcactctrtctatcccctgagtcctgtgtgcatttgggaaattaattatgactctcttataagcacataaaagtgatgcacatggccatcagtttgttccatttctac

SEQ ID NO: 3448 - DNA, 201 bp, Homo sapiens
agggttagaaggggagagggggagagagagagagagagagagagagagagagagagagggagagagagagagagagagagagagagagagagagagagagmgagagagagcgcatgtgagtgagatcccaggagccgtgggaaaaatgcttctcagaaagcctgtctctgggtccttgtgcacagtgagggactggggcag

SEQ ID NO: 3449 - DNA, 201 bp, Homo sapiens
gctctcagaggcttggggcccagcatgtggatttgtaggccataaggggcaggaggacaagcagggaaatgggtggaggggcctgcaggggacaggcagayatggaatggggtgttggggggcgggcctgagatgctggggattggcagggcctggagccacattgccctcccgcattcctggggtgggagctgctgggct

SEQ ID NO: 3450 - DNA, 201 bp, Homo sapiens
caggctggagctattaagcctgtgagaggctgtgtgagcagtcgccaggctgcgtgtgctctggggggtggagtgggcacaggcagggggcggttggggggaaggagtgaggagaggggagaccttggtggtggggaggatagaggaaggttcagcagcaaacttgggagcaccaggctctgcaacctgggaggacaaggc

SEQ ID NO: 3451 - DNA, 201 bp, Homo sapiens
ggcggctgaatagtaattaactaatcaccatgtcacttcttccctgttaggaacaacctcattaattccagtctgccgggctgctggtgtcttttgccatmccccctcctccaccccctgcgctctctccccctctctttttggccgctcttgacttataatcaaatatgaaagtcatgcattttttaataacttctcagc

SEQ ID NO: 3452 - DNA, 201 bp, Homo sapiens
catggccccaggccctgggcagccgcctcttggggttggccaattaattaaggagctctctgaaatctaaaggacatacatgcatttgctcttctgacacmtccttggggtggtagctgttttattatattggataaactcgctggctgaaatggctgccagcaggcagcaggagccacccgtgaaacagaacaagtatat

SEQ ID NO: 3453 - DNA, 201 bp, Homo sapiens
ctcagtcactgcttcagctgaggctgggaaaggcagccagagggttagaaggggagagggggagagagagagagagagagagagagagagagagagagggrgagagagagagagagagagagagagagagagagagagagagagagagagcgcatgtgagtgagatcccaggagccgtgggaaaaatgcttctcagaaagc

SEQ ID NO: 3454 - DNA, 201 bp, Homo sapiens
agattcttcagttgaatggagactttccctttaggcaggtagagagatgacacttttgctcatgtccagatactgaaacctcaagatgtcaggaaagccayggggacacggagatcccagatccgctcaagatctgggtcggggcctctttgagcttgtgtaaagatggctttgctgagggatgttctggcccagccccac

SEQ ID NO: 3455 - DNA, 201 bp, Homo sapiens
tctattgttggatagtatccactgtatgtgtagaccacaatttgtttatccattcaccagttgaagatattcaccttgtttgtagttttttgattattacraatagagttgctatataaacatttatgtacaggatttgacgtgaacataagttttcatttgtattagttaaatacctaagcttaggattgctggattata

SEQ ID NO: 3456 - DNA, 201 bp, Homo sapiens
gtatgtaatattttcataagtacattaaatagcttcattatatttcttgctagcttttacagctgctatgaatgactctttaaaaaataacatttttaatsgttcattgttggattctagaagagttactgattttatgtgctgatcttgattttaggattcttgatgaactttatttttctatgtatttataatatatat

SEQ ID NO: 3457 - DNA, 201 bp, Homo sapiens
ttgtgaaatggtttttctttcttttcaagcatcatgggttctgtgttgcctgtgtccttcatgctagagaatgcctgtctcttgatttttatattttaagkacaacttgaagcatatttggttttccctttaaagctgcctttccatgggttttgcactagtgtgaggattccctccccctccccttctttccctgcatct

SEQ ID NO: 3458 - DNA, 201 bp, Homo sapiens
tctttacattgtttacactttcttttaaaaattgtcttgtctgtccttcctgtcactcagcacgaatttaggatcagattgctaagcttcattacaaaaawgtgttaacattctaagggagattgttcttattttatagttcaatataagaaaattagatgtgcttatgataatgtcttctcatccatgaacatagtacat

SEQ ID NO: 3459 - DNA, 201 bp, Homo sapiens
ttttatatttacttgagtctgtttcagcgctttctccttgttccgctaatctatttgtctgttcctgtataatgccacattgtttcagtgatgccaactcyataacaaatcttattactggttacatcctctttacattgtttacactttcttttaaaaattgtcttgtctgtccttcctgtcactcagcacgaatttagg

SEQ ID NO: 3460 - DNA, 201 bp, Homo sapiens
tctattatcaaaaagacaagcgatgacaaatgttggtgagatgtggagaaaagagaacccttgtgcactgctggtgtgaacataaatggcacagctattayggaaaacagtagggagtttcctcaaaacattaaaaatagaactggtgtatgatccagtgaccccacctctgggtatatattcaaaggaaatgacatcagt

SEQ ID NO: 3461 - DNA, 201 bp, Homo sapiens
agtgtgtagtggacgctgagtgtcagggagggagggaaggagatggatcatggatctctccatggcctcgtggccctcattctttttctgggctctgggcktctgggtgggagagcaggggtctcaggaaacatggtccccagggatgggtctgtgggaagctgggcactgtgccacctccagaatagcctggcagtaggg

SEQ ID NO: 3462 - DNA, 201 bp, Homo sapiens
tatcttgatgagtgcagtcccatgaggacacaaacctcattcctccctcttgccctgcatctgcctctcctgtcatttctgccacttgactgacctctgcragggtgctggagtttgagatgtctccaaacctaaatgctccatacataggaaaggaaggaaatgctttctaccaggatttttgactggctaatatattta

SEQ ID NO: 3463 - DNA, 201 bp, Homo sapiens
agagacggtggaagtgttgccctgcctccacccttgctctggcttctggctttaaaccatggctgagtctctgccatctcccagctccctgacaagtatgyctgctttctgggaagccacaattaggacccctctgagacactgcaacaattactgcctgccatgccccccatcctcctttgggtctggcatagccctctt

SEQ ID NO: 3464 - DNA, 201 bp, Homo sapiens
caccatcacagcccgggcagagactgagaccacctggttgtaaagcctgtgtgggtgtttgccagtctctgaccaccacagtcacttacttataccagatsgtttctgccacactctcagcctactacttcttgggatccatttgttggggtgagggggaatgacagcatatgacaataggtagtcccagaacttctccag

SEQ ID NO: 3465 - DNA, 201 bp, Homo sapiens
agctcaggcctcaaagctcttcttaaaggcagagaggagagtaccttttaagcttcaaagcattcccttggggagcaggctggggtgatagggaaaggcargcaggagggtaggacatcttcttggctgatttgggagggctgatcctcagtccccagatgctgcagagagtgggtagaggggcccagtggtgttttggag

SEQ ID NO: 3466 - DNA, 201 bp, Homo sapiens
tctctgccctggcggctgtcactgttgcatgtcgggggagggctgtgtgggtgtctgaacctttgtcaggctccccaaatcctccccaccctcaccaggascctttctagctgtccagaggtgcctggttctgcctccaggtctctgtcactgcctcccactgtgtcccacttcagacctttccagggcagctgctgagct

SEQ ID NO: 3467 - DNA, 201 bp, Homo sapiens
atcaggagtttatagtcatttttaaaaaaaaaaattcatttcaagtttcgagttttctcaaaagtttcaaatttagtctattggctcctttctttgaaagwtgagatgttgatttactcacctccccgtcattttaccatcctatctcccaagagttgttagcttttttacttttaccttgtccagcttaattaatttcac

SEQ ID NO: 3468 - DNA, 201 bp, Homo sapiens
agatgaaagcatgtagaaaatggtaggttagaggtggtgacattcttgctccctcctttcctcctcctttttcttttcttcaatggatatatttctttatrccagaaggctccctggggagctgagcctttgcctggagagttaaagaacaggtggaaggcagaggtaggcagcaggtctgcatcttgggggagcccaagc

SEQ ID NO: 3469 - DNA, 201 bp, Homo sapiens
cagagagcctcattaccgacagcgcaagcaggacaggtcttcgctactccccaagagagctcagtcctctgcctccgcctctggtgtaaccacagttcacwttcccatctggaaacccttacctacactggctctgctctctgcattctcactctctttctctctctggcaaactgggctccatctgtacaatcctaacca

SEQ ID NO: 3470 - DNA, 201 bp, Homo sapiens
cccaggggttcgggacccctgatctaaacaacaacaacaacaacaacaacaacaacaacaacaacaacaacaacaaacagcagcagcagcagcagcagcarcagcaatgtagtatctcctttaggaaatgtctctgaccatgaagctgacttaatttctcctcttctcatggccatctccctccaaaacacctagcaaaga

SEQ ID NO: 3471 - DNA, 201 bp, Homo sapiens
aattcatggcattacacagcccctttcaataatgtttactcattttacatttctcgtctacatgtttggtgctgtctgcccttaccgacaagctgttggcrctgtcttggagagtgttggggccagtctggggccatcttgggcaatgaaagaggctcttcccaggatgcatctgtgatttcctggcggtcacataggttg

SEQ ID NO: 3472 - DNA, 201 bp, Homo sapiens
ccagtggtccctaatctatttggcactggggaccggtttcatggaagacagtttttccacagaccaggggagggggatggtttggggatgattcaagtgcrttacatttattgtgcactttatttctgttattattactttgcaacatataatgaaataattacacaatttaccatcatgtagaatcagtgggagccctga

SEQ ID NO: 3473 - DNA, 201 bp, Homo sapiens
agaaggggagagggggagagagagagagagagagagagagagagagagagagggagagagagagagagagagagagagagagagagagagagagagagagmgagcgcatgtgagtgagatcccaggagccgtgggaaaaatgcttctcagaaagcctgtctctgggtccttgtgcacagtgagggactggggcagggagct

SEQ ID NO: 3474 - DNA, 201 bp, Homo sapiens
gatgtgcactccagcgccccattgctgtgttgtgctcaggcctctgacctagtgtgtccctgtgaccagagactgccctttggtggagatgcaggtgctgmtgttggctggatggggaatgccaagggagggagtgagcgcagcccagcagtgtcggaggtggcactgacctcccaccttcccctctcctactgctctgcc

SEQ ID NO: 3475 - DNA, 201 bp, Homo sapiens
ggaagctgtgtgttgtcctccagctcccactcatcacgtgctgagggctgctcctggagatgtgcactccagcgccccattgctgtgttgtgctcaggcckctgacctagtgtgtccctgtgaccagagactgccctttggtggagatgcaggtgctgatgttggctggatggggaatgccaagggagggagtgagcgcag

SEQ ID NO: 3476 - DNA, 201 bp, Homo sapiens
gtgcctgtggtcccagctactcaggaagctgagacaagaggatcacttgagcctgggaggtggaggctgtagtgagctatgattgcaccactgcattccakctggatgacagagtgagaccctgtctcaaaaaaatacctgtggggacagtgatagaggacgggggagagttgggcaccctcatgccagctgtggggatgc

SEQ ID NO: 3477 - DNA, 201 bp, Homo sapiens
tagtgagctatgattgcaccactgcattccatctggatgacagagtgagaccctgtctcaaaaaaatacctgtggggacagtgatagaggacgggggagarttgggcaccctcatgccagctgtggggatgcttgtgagacttgaagtgcctgtgagctatgttccccatgggttcgcaaactcacctgagtttttaatct

SEQ ID NO: 3478 - DNA, 201 bp, Homo sapiens
accactgcattccatctggatgacagagtgagaccctgtctcaaaaaaatacctgtggggacagtgatagaggacgggggagagttgggcaccctcatgcyagctgtggggatgcttgtgagacttgaagtgcctgtgagctatgttccccatgggttcgcaaactcacctgagtttttaatctatttcaagtttgggtga

SEQ ID NO: 3479 - DNA, 201 bp, Homo sapiens
gctcagatcctggctttgccttggccttgcagagcttcgtttttctcatctgtaaaatgggtgtactggcattgctgcctgcagtgggtgaatggggggaytggttttgagagccagtcagtcagcacctggggtgtggccctaacagcaacagtccacatgttggtgcatacgccttgctagctttggtgatgtgaggat

SEQ ID NO: 3480 - DNA, 201 bp, Homo sapiens
cttctgggccctgtgggagagaattccagacccgaggccactgtatatgcatttctgggcataaggggggcccagcaagtttgagcccttcctgaccccamggagcacttggtccagattcctgcctagactctacagatgtgttaccaaaacaccaggttttggtttaggtcctgttgcttgccacacagaaagccagtg

SEQ ID NO: 3481 - DNA, 201 bp, Homo sapiens
cctctcctttttacagacaagaaaccgagctcgacgcaagaagaagtagctggagccccagccctgaggtccctgccactgcctacttagctcctcactcytgggcttgagggtcccaggctggagaggacaaagggcttgccccattcccaggtcttcctgcacaggcctacaggggccaccacccatcttccttccctg

SEQ ID NO: 3482 - DNA, 201 bp, Homo sapiens
gacgcaagaagaagtagctggagccccagccctgaggtccctgccactgcctacttagctcctcactcctgggcttgagggtcccaggctggagaggacaragggcttgccccattcccaggtcttcctgcacaggcctacaggggccaccacccatcttccttccctgcacagcaaggcctccctgcctcctggacaagt

SEQ ID NO: 3483 - DNA, 201 bp, Homo sapiens
tcttccttccctgcacagcaaggcctccctgcctcctggacaagtgtgtcttctgcgtggacttccaggccaccctgtcccggaattggctcctgctgagrtgcctcagtgctggcgtgttctcaaattcgaggtgcacgtgttagtcctcatcttgactttctagcttattaggctgagctctgctttctgaagctctgg

SEQ ID NO: 3484 - DNA, 201 bp, Homo sapiens
gatgagctgagatgtggtgcagggcgctgtccagcatatcaggttgcccatacgccttgaagcctgtaacaccttcttttggtcatccctgggcatccacrggacataggttccaggacctgctttggttccccaaatccaaggatgctcaaatctgtgatgtaaaatggcttgcatttgcacatagcctacacacatctt

SEQ ID NO: 3485 - DNA, 201 bp, Homo sapiens
tggatatgaaacatggagtcaaaggagattattttggagatttaagatttaatgagtgccctgccaggttttggacttacatggggcctgtggccccttgrttttggccaatttggaatgagagcgtttgctcaatgcctgtaccgttattgtatcttggaagtaactaacttgtttttgagtttacaggctcataagtgg

SEQ ID NO: 3486 - DNA, 201 bp, Homo sapiens
cctgtgcaacagtgggtcatttgtggctctacggatctgagccaggcccggcagggctcactcatgggcctgtggttgtctgcgggttggcaaggtggctrtgggatcttcttccacctagggcccttggctgggcccctggggccagtgtggctctgctccacgcatctcctcctccagcaggccaacctgggcctgtcc

SEQ ID NO: 3487 - DNA, 201 bp, Homo sapiens
tcctccccacacctcctctctgcagagcctttctacggcccagagtcagaaggcctgatgtggtgtctgctctgttgtgagactctggcctcagcttcatyatctgcaaaatggggctggacagacctcttcttcctcaggatcaaacatgatggaggctgagggactttggaaagggttggggggacatcgaggggctct

SEQ ID NO: 3488 - DNA, 201 bp, Homo sapiens
atgctgcaaaggccgagatttaggccgaggaagaggccaggagctccagaagccctgccaggctcactctctgcctctgctgcctatagcctgagactgcyagaggggatcccatgccctgccaggcctcacaggagtcctccccacacctcctctctgcagagcctttctacggcccagagtcagaaggcctgatgtggt

SEQ ID NO: 3489 - DNA, 201 bp, Homo sapiens
tcgtagtcccaccactcctcacaataggaacttcagggattcagccactggagttctgccactttttgttttcaaatcatatcttattcttgcagtgtttrtttttgaagatggctatgtattttacaacttcttgaattacattttgcttttcatactggcatgagtttgaagcagggatgcctccaaacagaaacatat

SEQ ID NO: 3490 - DNA, 201 bp, Homo sapiens
cttagaaagcaaaccctttcttctaagctaagcttcctcttaggcctatgggattagcacatagtccagattaatggggtccaaattaatgtgatttatcrtcatggttttcaaaagatgtggtctacttatacagctaccacttttttttttggacccaaatttaggacacttggaccaacaaaagatattttcttctca

SEQ ID NO: 3491 - DNA, 201 bp, Homo sapiens
ggcccggatgtccagaatatcagcgtctctcccacaatccaggcgtttaaatcacaacagcttagcaaggtgcttttacaaagagcatttattgtttttgtcagctcataaaagcgatacatgtttgctggggataattcggaaaatatgaaaaaaatgtaaataaaagaataaaattctccactatgccctaccctgaga

SEQ ID NO: 3492 - DNA, 201 bp, Homo sapiens
accttaatgcggggtggagggcatttgtgttttgagccttcaggtatgaatgttagctctgatgctgtatccaacagcacactgaagatataaacttcttcccttttccaaggcacaattacttgtaacaggggtaactgctgttgtttatacctcctgtggcatcgcagtgtcttttctcaagagagcctctccttcaat

SEQ ID NO: 3493 - DNA, 201 bp, Homo sapiens
ttctttaaggacagcatctgcttctaagtaggttacgcttgctgtggcttgtttgcatctttctttgcttagaaagcaaaccctttcttctaagctaagcytcctcttaggcctatgggattagcacatagtccagattaatggggtccaaattaatgtgatttatcatcatggttttcaaaagatgtggtctacttatac

SEQ ID NO: 3494 - DNA, 201 bp, Homo sapiens
gggcaccgtgaatgtggcagcttctctagcttacaaggacccctgtgggctgagggggattggaggactggagtcaggggacaggaatgtacagtttgacytcagaataggccctgttctgcccctgcatttggggctgctgtcatggtgggtttgggactttggggaatgttgcatacgtatccaatatgatttctcccc

SEQ ID NO: 3495 - DNA, 201 bp, Homo sapiens
caccttaatgcggggtggagggcatttgtgttttgagccttcaggtatgaatgttagctctgatgctgtatccaacagcacactgaagatataaacttcttcccttttccaaggcacaattacttgtaacaggggtaactgctgttgtttatacctcctgtggcatcgcagtgtcttttctcaagagagcctctccttcaa

SEQ ID NO: 3496 - DNA, 201 bp, Homo sapiens
ggaccagggagcctccaggagcatttccacttctgatgccagttttggaggaagtgctgtggttgcttggaatgggtgagggactcgagtttcataggacrctgtaggtaggctggctgatggcgaaggtggaggatgagctggggtttaggactcacaggcagtgtagcttattgcacacctttttctttaaggacagca

SEQ ID NO: 3497 - DNA, 201 bp, Homo sapiens
ttacacagagtacagagttggagctcaggccagtcttacccagacctcagtgggaagggaggctcctgcctccctctgcggtgcatacatgagcacatggwgactcgatggggtcaaggaatttgtctaacatccccaagtaagagtccaggctgagtttaaaaactcagtctggaggagtcaaaacttgagctctaatca

SEQ ID NO: 3498 - DNA, 201 bp, Homo sapiens
tcaccttaatgcggggtggagggcatttgtgttttgagccttcaggtatgaatgttagctctgatgctgtatccaacagcacactgaagatataaacttcttcccttttccaaggcacaattacttgtaacaggggtaactgctgttgtttatacctcctgtggcatcgcagtgtcttttctcaagagagcctctccttca

SEQ ID NO: 3499 - DNA, 201 bp, Homo sapiens
ggtgagaaaacaaacaaacaaaaagtaatgatgtagtattagtttgttctcatgctgttataaagacatatgcgagactgggtaatttataaagaaaaaakgtttaattggcacaaagttctgcaggctgtacaggcttctgcttctgaggaggcctcaggaaacttccaatcatggagaaaggcaaaggggaagcaggca

SEQ ID NO: 3500 - DNA, 201 bp, Homo sapiens
gggggtgagtgttgggaagagaccatgatcgtctttgctttaaactataaatgaaattcctcccatagtgagcttggcctacatgcagagatcagcaatarcagttaacctagaagatatcatgtgggggtaggttaggagcaaaacggagctggtcatgcgaggccttctttcactgccacacaatggctgtagcatggg

SEQ ID NO: 3501 - DNA, 201 bp, Homo sapiens
tggttgccagcctggctcaggtctgcacctgcttgcctgcctgttcacacagctttcctggcagactctggccagctgcagtctctcctcctccaggaagmcttcctcctgcttgcttcctcctaacatgttggactgcccttgtttttgtccctacatgaagaactgccctcgtgtctggctttaagctcttatttcagg

SEQ ID NO: 3502 - DNA, 201 bp, Homo sapiens
ctgccatagacacctgttcaacttgattcaatccaccctgtcccactttttcttaatgggagaatcacaccatccccttttgcccaacccagccctgtatrggaactgtattcagccattcttgtgttgtcttgtgttgctataaaggaacacctgagactgggcagtttataaagaaaagaggtttatttggctcgcagt

SEQ ID NO: 3503 - DNA, 201 bp, Homo sapiens
aggttgggagaagaaaagagggataatcagatgggagatttggaaaagcagagaaagacgatttagcaatttaggagacagacacacatgcacgcgtgcaygcatgtgcgtgtgcacacacacagacagagagacagaaagagagagagagggagagaggtgtgaggggagagagggggcgcccctgtctggatccacatc

SEQ ID NO: 3504 - DNA, 201 bp, Homo sapiens
cccccgctatgcccagaaggattttgagaaactggctgaggtgtggctaaatggtctgcaggacttggagcagcccttgcagatgggtcggggggcacatrtgccaccagctctgggtctgaatcgtgtgccgatggagagggcctagagtgggcagacgctgtgcagttcatgatatgctgcaggccccaggtgtttgag

SEQ ID NO: 3505 - DNA, 201 bp, Homo sapiens
ctcactcatcacatgtgacttatggctccctattggacaggatgaaaaggagtgacgaggactcaccagggggcgagggaagggaagggcattctacacayagggctcagcacaatcacaggtgtgaaggtgaggagcagcacagcacatgacagggagcctggtatggcagaggacgggcttagggcaggggctgggcta

SEQ ID NO: 3506 - DNA, 201 bp, Homo sapiens
tcttgtagatcccagtgtctgttgatcccatctccatgtccatgtgtacctggtgtttacctcccacttgtaagtgagaatatgtggtatttggttttctrttttggtgttaattcccttaggatatagcctccagctgcatccacgttgctgcaaaggacacaatttcattcttttttatggctgcatagtattccatgc

SEQ ID NO: 3507 - DNA, 201 bp, Homo sapiens
gcacgcaccaccataccgggctaatttttgtatttttagtagagatagggtttcactatgttggcaaggctggtcttgaactcttgaccttggctgagtcrcccacctctgcctcccaagtgctgggactacaggtgtgagccaccgtgcccggcttgcaaaacatttatgaatgagatagttcacattctttgttctgtc

SEQ ID NO: 3508 - DNA, 201 bp, Homo sapiens
cctctccctgtctgtcccgctctccctccctctccctccctctctccctctctgtctctctccctccctctctctctctccctctctgtctctctccctcygtctctctctctccctcccccccatccccctctctccttccctccctctctctcagctgctgtggtttggaggggcctggactcttccacctccctgtgg

SEQ ID NO: 3509 - DNA, 201 bp, Homo sapiens
acctggaactcacgctggcccccgagagccgcgcagccccagttcccgcacttcccacctgcgcctctccctcctcacctcccggaaagctaactggctcyggcctcaaccagcccagagaggggctcccacagtgcagcggcaggctgaagggctcctcaagcatggccagagcagacacgaggctgaggaggtgctgag

SEQ ID NO: 3510 - DNA, 201 bp, Homo sapiens
gtcacgcggcagcccaccgcacggggctcgggcatggtgggctgcaggtcccaagccctgccccctggggaggcggctgaagcctggcaagaatttgagcktggcgccggcaggccaacagtgctgggggatccggggccccctctgcagctgctggcccgggtgctaagcacttcactgcccagggcgggtggcgctggc

SEQ ID NO: 3511 - DNA, 201 bp, Homo sapiens
agtcacgcggcagcccaccgcacggggctcgggcatggtgggctgcaggtcccaagccctgccccctggggaggcggctgaagcctggcaagaatttgagygtggcgccggcaggccaacagtgctgggggatccggggccccctctgcagctgctggcccgggtgctaagcacttcactgcccagggcgggtggcgctgg

SEQ ID NO: 3512 - DNA, 201 bp, Homo sapiens
tagctagacaaaagttctccaagtccccactagattagctagacacagagcactgattggtgcatttacaaaccttgagctagacacagggtgctgattgrtgcatttacaaaccttcagctagacacagagtgctgattggtgcatttacaatcctctagttagacataaaagttctccaagtccccaccggattagcta

SEQ ID NO: 3513 - DNA, 201 bp, Homo sapiens
ctctgcatcacagagctcaccacgctgcctgccacggccaccccgatgggcacatgccccatcaccttggcaggttatgattactcagggaagtgttagayagaaccctgctgggctgcatggagctaaaacaatccaggatctgtgcctctgtgaggctgtgtggggctggtgggagggtttccctggaggcatccactg

SEQ ID NO: 3514 - DNA, 201 bp, Homo sapiens
aagtctaagttctagagccattttgtaaaataatcaaaagacgtgatgctggtccacagtgcagttgattctgagcctgtcccaccagccaggagaggccrcatcagagctgtccagggtcccccctcagcgtgatcttggtctcctccaccttctctccccattggagcatttcccctcttagcgcctcaagttagggac

SEQ ID NO: 3515 - DNA, 201 bp, Homo sapiens
aatcaaaagacgtgatgctggtccacagtgcagttgattctgagcctgtcccaccagccaggagaggccacatcagagctgtccagggtcccccctcagcrtgatcttggtctcctccaccttctctccccattggagcatttcccctcttagcgcctcaagttagggactgtgtagacacagccattaggttagtcagtg

SEQ ID NO: 3516 - DNA, 201 bp, Homo sapiens
cctgtttgcagtgaatcgtggttatgtgaagctatggacttgagagtatttcatgatcattttgtttctagtcctgattaatcatcaatgggaactaacayggttttcccctccctccatccacagctataaaatgcctgtggggtcgctgtgcacagagacctggaggcagatcctcttgtaatgtggttgatggggcca

SEQ ID NO: 3517 - DNA, 201 bp, Homo sapiens
ttgtccccagcaaggcgggctgtgaggatggccagagccggctctgcaccatttggggacaagccggagcagagatcccgagagctgactcccgcgatgcagccgtgctgggagagaggtgcaccctgcattcctcaattccgtggaccttactaccttcctgttgcattccacactccagttggagctcagttttctgaa

SEQ ID NO: 3518 - DNA, 201 bp, Homo sapiens
ctgcccagttggctgtgcccggggggcttgcttctgccagggcctggctactgtgtgcccagcctcggggctctcactcattacctatcatgagctgttawtatagggctgtgagctggggtgcttgtcaataccattttgtggatggattcactggactctcagaggcactttaaaaagcgctatttaaaaagactgccc

SEQ ID NO: 3519 - DNA, 201 bp, Homo sapiens
aaatttatttattttaatgctcaggtcctcttggagttgggtttcagtattcttgtctcggatgacctttcttgtcctccctgtaccatgtacggcaacaytgattttgggtaatgtattttgattttaagatgcagcccatccataaagttttctatcaataatcccagcacactctgtgtacccgacagcttataggaa

SEQ ID NO: 3520 - DNA, 201 bp, Homo sapiens
agacctgagccacaagccccatcacctacaaaggggcttccaaggggtccttcctgcctgtctcttctcattccaattagtcgcaggaccctgggtacacktggagagaacagatgcttttctcctgtatagagcctgtgttgtgatgagaaatggagcatgagcaagatccagcatacctggagataacaacccctgtct

SEQ ID NO: 3521 - DNA, 201 bp, Homo sapiens
ttgtctcggatgacctttcttgtcctccctgtaccatgtacggcaacattgattttgggtaatgtattttgattttaagatgcagcccatccataaagttktctatcaataatcccagcacactctgtgtacccgacagcttataggaaaataggagatttatgggggcttttatttttggccagtttagtcattcacacg

SEQ ID NO: 3522 - DNA, 201 bp, Homo sapiens
gcatgaaatggattaagataatgtgcaagtagtttattatggtaatgctcctagggagcgtgctagggaggtggggcagggaagggaggaagccagcaagrtgtgatctcaggcagagtcccacagagggtggcctcagcctgattccacagggagttctgcagtggaagtatgcttcagcattgtgcagattcaggtcta

SEQ ID NO: 3523 - DNA, 201 bp, Homo sapiens
ttcttcataaattacccagtcttaggtagttctttaaaggaatgcaaagatggactaatacagtttcaagaactacatgaatgcaatttttgcattttatytcagtgctttaaaattattctagccgacctgcaggaacaggtaaaggccccttaaacaaaaatggagtgagtgctgttagttcttttgctgctccactgt

SEQ ID NO: 3524 - DNA, 201 bp, Homo sapiens
agaaaatgtaagtgaagtgaaactgagggaactgtgaacttcaaatacatatttttttatgtaaaatttatttcccagaaaatcccttaaaaacaaaaaaragagattgtgaaacacatcaggagtttatagtcatttttaaaaaaaaaaattcatttcaagtttcgagttttctcaaaagtttcaaatttagtctattgg

SEQ ID NO: 3525 - DNA, 201 bp, Homo sapiens
gaggggtggggtagtgcatagctgaagagtaattggagataatgtaactgtttacacagtaagtgatgttgtttcattttgtgctacattttgccctaackctagaaaacatcgtgctgaaaaaacagacattacaatctccctcacatcttaggtttttgctaaagattaaaaatgttacttctctaatctgtttctgaa

SEQ ID NO: 3526 - DNA, 201 bp, Homo sapiens
ccagagtgtggagaggctgggcaggccctcgggagggctgctgcccgcatttgtgggcctgcccaccatagtagctgctgacatctgggatagaccaaggrcaccgaaaacacctgcgccgctacctcatggtgttggtttagcataagcccaaacccatggacatcgagagacaagtagtcgggacaaggaagacgactt

SEQ ID NO: 3527 - DNA, 201 bp, Homo sapiens; identical to SEQ ID NO: 494

SEQ ID NO: 3528 - DNA, 201 bp, Homo sapiens
cactccagcctgggtgacagagcgagactccatctcaaaaaaaaaaaaaaaaagtgactgaggaccgcggacagcctgctccagtaagggtccagggaggytgtgcaatcttctgcccgtgttcaggttccagggatgcatcttgaacacgtggtgttgctcgtgggatgccctccttatctccttgggggtgagtgttgg

SEQ ID NO: 3529 - DNA, 201 bp, Homo sapiens
ttagtagagatggggtttcaccatgttggccggaatgctcttgatctcttgatcttgtgatctgcccgcctcggcctcccaaagtgctgagatcacaagcrtgagccaccgcgcctggccttgcatgggcaattttgtaaaataaattatacttttaatatttaatgattattgttagtatgaattcacctaattatcacc

SEQ ID NO: 3530 - DNA, 201 bp, Homo sapiens
ttgttgctgggatctagaaggcagccttggagaacgtgggcctgggacagggtttcttggcttcagcactcctggcttttggggctgaatgattctttgtwgtgggggctgcccttgcattgtaagatgtttatagtatccctggcctccacactctagatgccaatagtattcccccaggtgtgacaacaagaatgcctc

SEQ ID NO: 3531 - DNA, 201 bp, Homo sapiens
tccccttctccagctccgcagtggcctggcagataaatgctaggttgtttttttttaatttttttttccccttcaagtttccatctgttcacgcagtcacygaatttatgcatgttcaggcaccatctgcgactgcaaccccatttccaaatccgaaagcatttttcctttttgtacttaacatgcacagcggcgcggcgg

SEQ ID NO: 3532 - DNA, 201 bp, Homo sapiens
cttgaacccgggaggcagaggctgcaataagctgagatcaagccactgcactccagcctgggtgacagagcgagactccatctcaaaaaaaaaaaaaaaaagtgactgaggaccgcggacagcctgctccagtaagggtccagggaggctgtgcaatcttctgcccgtgttcaggttccagggatgcatcttgaacacgtg

SEQ ID NO: 3533 - DNA, 201 bp, Homo sapiens
tgtatttttagtagagatggggtttcaccatgttggccggaatgctcttgatctcttgatcttgtgatctgcccgcctcggcctcccaaagtgctgagatyacaagcatgagccaccgcgcctggccttgcatgggcaattttgtaaaataaattatacttttaatatttaatgattattgttagtatgaattcacctaat

SEQ ID NO: 3534 - DNA, 201 bp, Homo sapiens
ctcatgaatgggattagtggccttataaaagagatctcagagagctccatcatctcttctaccatgtgaggacacagtgaggagacggccatctatgaatyagcaagagggccctctcaagacaccgactctgccttggtcttggacttcccagtctccagaactgtgagaaaaaaaggtgttgtttaagccacccagtat

SEQ ID NO: 3535 - DNA, 201 bp, Homo sapiens
tgagacactgcaacaattactgcctgccatgccccccatcctcctttgggtctggcatagccctcttccaacctggcttgctctgacttcccctcaggacycactgccttgcctggttggggctggggatggagttcagcaatcagaatcaggtgacttgagtctagccaaggtccctggggcaaagtggaacaggacatc

SEQ ID NO: 3536 - DNA, 201 bp, Homo sapiens
tctatgtgtttcctgtttcagtaaatggtaaaacatattttaaatgtttttcattgctagtatatagaaatacaattgatttgttgtttattgatcttgtrtttaatgtatttaatttaacatcatgttatctgaaaataaagggatatttatttcttcttttgcaatctgtatgctttttatttccctttcttgccttgt

SEQ ID NO: 3537 - DNA, 201 bp, Homo sapiens
atgggaacagcacagcagccctgacccctccgggggcctgcaccgcaatggatgtgactcctcatgtgagcagacgctttcctgcctcttcctggattctsggtgctggactcccctgctgaagctgaggtcatgagggatgggacagtttataacagatcttcaggcccagacggaaagaactgggattttagcccaagt

SEQ ID NO: 3538 - DNA, 201 bp, Homo sapiens
acttttgttgcaagatttgttatttgtaaatattccttatcttcttgaaaataatgcacactttgtatttgttgacggattctttgtatatctattagacyaagcttgctacgatgttgtacaagttttctatgttataagtaatttttgtctgctggagcaatttccaatacagtgagccagaatctcccactctgatta

SEQ ID NO: 3539 - DNA, 201 bp, Homo sapiens
tctacaggtaacagcagagcactcagctgaagcctggcccagccctgggtgctgggaacctgaggatcagggagggagacagctgaggtccttgctgcttyggagctcccaggtcagcaggagagacaagtgccaggatggaaggggccacacaggggctgggggtgccagttgaggattaggggaggcctaagggatcgg

SEQ ID NO: 3540 - DNA, 201 bp, Homo sapiens
ctgtaatcccagctacttgagaggctgaggtgggagaattgcttgaacccgggaggcagaggctgcaataagctgagatcaagccactgcactccagcctsggtgacagagcgagactccatctcaaaaaaaaaaaaaaaaagtgactgaggaccgcggacagcctgctccagtaagggtccagggaggctgtgcaatctt

SEQ ID NO: 3541 - DNA, 201 bp, Homo sapiens
ccctggggccagtgtggctctgctccacgcatctcctcctccagcaggccaacctgggcctgtcctcctggtggaagtagaagcgccaaagagagtggcakctcagcctcgcattggcacacacactcactgccactgggttctgtcagccacagcaggtcaccctgctaggttggagaagtagatgccacctcctcaggg

SEQ ID NO: 3542 - DNA, 201 bp, Homo sapiens
cccatagctcacagctgagtgacaaaggagtacaaaaccctggccctctttctgtcctgctaaggacacaacccaagtctactcccttcaacaaagcctgsaacacttagaaagttgtgtgtgcggccaggagcggtggcttgcgcctactgtaatcccagcactttgggaggccgaggcaggtggatcacctgaggtcag

SEQ ID NO: 3543 - DNA, 201 bp, Homo sapiens
taagggaaaggggaagcgggggaggttgggatgaaaaagtgaccaagggccaggtgcggtggctcacgcctgtaatcccagtactttgggaggccaaggcrgatggatcacctgaggtcaggagtttgagaccagcctggccaacatggtgaaactctgtctctactaaaaatgcaaaaattagccgattagccgggcatg

SEQ ID NO: 3544 - DNA, 201 bp, Homo sapiens
ctctgaatcatagtttctgagttttgaactgtagttctgggtttgtgctgagactctccccaacccccattctctccagagccagaaattgctttggagtsggagtgtggtgaaagaaggtaggtcagtgtcagttgtcacaaaatcgctgcataaaaaccactgagacctggtgacatgcaattgtaaacatgtgttttt

SEQ ID NO: 3545 - DNA, 201 bp, Homo sapiens
cctgcgccgctacctcatggtgttggtttagcataagcccaaacccatggacatcgagagacaagtagtcgggacaaggaagacgactttattttggagarccagcagccaagaggagggtagatgaatgccctacagaaccatcctaagtcagtacaaatctcaggctgttttgatgttaagggaaaggggaagcggggg

SEQ ID NO: 3546 - DNA, 201 bp, Homo sapiens
gtcctagccccagagaggagcacagtctcgggcagggctcagtgcacaaaaatacttatgtaaaggactagatagcacatatttttggctttttgggccayatcgtctctatcagtattgtagtctgatggtagccatagtcaataagtaaatgaataggcttggctctgtttcaattaaactttatttgccaaatgagag

SEQ ID NO: 3547 - DNA, 201 bp, Homo sapiens
ctcccacgttggaagacttcatcctgtatccctggaagaagcctggtagccagagtgtggagaggctgggcaggccctcgggagggctgctgcccgcattygtgggcctgcccaccatagtagctgctgacatctgggatagaccaagggcaccgaaaacacctgcgccgctacctcatggtgttggtttagcataagccc

SEQ ID NO: 3548 - DNA, 201 bp, Homo sapiens
ccatgggccaagggttacttctgccccacttctgggtgagcagccccaggtcttggcccagctcccacgttggaagacttcatcctgtatccctggaagargcctggtagccagagtgtggagaggctgggcaggccctcgggagggctgctgcccgcatttgtgggcctgcccaccatagtagctgctgacatctgggat

SEQ ID NO: 3549 - DNA, 201 bp, Homo sapiens
ggagaagagcaggtaagctccggaggtctgtgtggcatcctgggcccaaattaaggaggaggtgtcccgccgactgcgctctctttggaccctctagtgcmcgtatgggactcttgttttttggctacagtcctggcgagccctcctctggactcactgacaggttcagatgcagaaagcaagaaccagccacaggcctgg

SEQ ID NO: 3550 - DNA, 201 bp, Homo sapiens
ggggaggctgcagtggaagtccagggtccagagggtcagacgaggagaagggattctggagtggcctccataggaagggccctgggaggaagctggtccgygtgcaggtgtgttactcactgctgcagaagcaacttgctgaaggggttggcccctgacgcggaggtttcggagctctagaaggcccagcacctgcagcct

SEQ ID NO: 3551 - DNA, 201 bp, Homo sapiens
cacttttctaatgtggccggcactctgtgcttgcaatcacatatgtgccacagacaggatttctatcaaacaaacaagaagaacagatggatgccaagccygttgtcactttcctggtgcgtttaacaggagccaggggagaagtccagtttggggcgtcttgggaagtttccacatcatccatgaaattctgtggtggac

SEQ ID NO: 3552 - DNA, 201 bp, Homo sapiens
ctaatgtggccggcactctgtgcttgcaatcacatatgtgccacagacaggatttctatcaaacaaacaagaagaacagatggatgccaagcccgttgtcwctttcctggtgcgtttaacaggagccaggggagaagtccagtttggggcgtcttgggaagtttccacatcatccatgaaattctgtggtggacttgtcac

SEQ ID NO: 3553 - DNA, 201 bp, Homo sapiens
ctcctcatcccccctccttcgccctcatactccctgtccttcctcttcatcctctttctccttcctcctcaccctccctcttcttcctcttcatccccctytccttcctccttttctcccctccttcctcctcatccttgctctccttcctcctcattccctatcttcttcctccttatcctccctctccttcatcctcat

SEQ ID NO: 3554 - DNA, 201 bp, Homo sapiens
acatcttctggtggggcctcaggcccaagctgttctctcagaggaaccttggtctgtcctggtctcatcctaggtggtggcctctgcactgtgggactgcrgtaggcacagtactggggtttgaggacagtcacaacctccggatttgacatcatctttggcttcagaggtcagttcattcccccactgcagagagcacat

SEQ ID NO: 3555 - DNA, 201 bp, Homo sapiens
ctgattggtgcatttacagtcctctagctagacaaaagttctccaagtccccactagattagctagacacagagcactgattggtgcatttacaaaccttsagctagacacagggtgctgattgatgcatttacaaaccttcagctagacacagagtgctgattggtgcatttacaatcctctagttagacataaaagttc

SEQ ID NO: 3556 - DNA, 201 bp, Homo sapiens
ggtggggcctcaggcccaagctgttctctcagaggaaccttggtctgtcctggtctcatcctaggtggtggcctctgcactgtgggactgcagtaggcacmgtactggggtttgaggacagtcacaacctccggatttgacatcatctttggcttcagaggtcagttcattcccccactgcagagagcacatgtggcaaat

SEQ ID NO: 3557 - DNA, 201 bp, Homo sapiens
gagctagacacagagtgctgattggtgcatttacagtcctctagctagacaaaagttctccaagtccccactagattagctagacacagagcactgattgrtgcatttacaaaccttgagctagacacagggtgctgattgatgcatttacaaaccttcagctagacacagagtgctgattggtgcatttacaatcctcta

SEQ ID NO: 3558 - DNA, 201 bp, Homo sapiens
accccacccacatcctgctgattggtccattttacagagagctgattggtccattttacagagagctgattggtccattttgacagggtgctgattggtgyatttacaatccctgagctagacacagagtgctgattggtgcatttacagtcctctagctagacaaaagttctccaagtccccactagattagctagacac

SEQ ID NO: 3559 - DNA, 201 bp, Homo sapiens
tattcccttatctgaccccacccacatcctgctgattggtccattttacagagagctgattggtccattttacagagagctgattggtccattttgacagrgtgctgattggtgtatttacaatccctgagctagacacagagtgctgattggtgcatttacagtcctctagctagacaaaagttctccaagtccccacta

SEQ ID NO: 3560 - DNA, 201 bp, Homo sapiens
tgggttcttggtctcactgacttcaagaacaaagccatggaccctcgtggtgagtgttacagttcttaaagacagtgcgtccagagtttgttccttctgaygtttggacggtttcacaatttctttcttctggtgggttagtggtctggctggcttcaagagtagaactgcagacttttgaagtgagtgttccagctcata

SEQ ID NO: 3561 - DNA, 201 bp, Homo sapiens
actatgtcttgatctgggtgatggttacacagtggattcttgggctaaaattagttcagccagacactggagatacttgattgcaggtatgttatatctaraaaaaataacaaacaatacaatttgagtcacagctgtggtcctgtggcctctccccactgcacccctgaggatgcccgcaactcccccgcactctgagcc

SEQ ID NO: 3562 - DNA, 201 bp, Homo sapiens
gacaagctgttggcgctgtcttggagagtgttggggccagtctggggccatcttgggcaatgaaagaggctcttcccaggatgcatctgtgatttcctggyggtcacataggttgggtagatggcatttctccctgggcgtttcactgaggccggtgagtgccctgtggtctgttttccacgtttgccgtatcccatctcc

SEQ ID NO: 3563 - DNA, 201 bp, Homo sapiens
caagtattggtggggacacgaagcacctgggacattccaagtggaaatgagaagtggcacaaccattttggaaaactgtttggcgtttcctcccaaagctraacacatatacaccttatgcctcattgacggcactcccaggtatatacccagggaataatggctatgtgtaccgaagacagaaacaagagttcacagcag

SEQ ID NO: 3564 - DNA, 201 bp, Homo sapiens
ttggagagtgttggggccagtctggggccatcttgggcaatgaaagaggctcttcccaggatgcatctgtgatttcctggcggtcacataggttgggtagmtggcatttctccctgggcgtttcactgaggccggtgagtgccctgtggtctgttttccacgtttgccgtatcccatctccatgtttttgcgtgtgtcgtg

SEQ ID NO: 3565 - DNA, 201 bp, Homo sapiens
catggtggctgtagtcctagctactcaggaggctgaggcaggaggatcacttgagcccaggagttagaggctgcagggacctatgactatacccctgcacrccagccttggcaacagaatgagaccctgtctctaaaaagaacaaagaacaaaaccaaaaccattcgtgtagacaggcattgtcaagacccccttgattca

SEQ ID NO: 3566 - DNA, 201 bp, Homo sapiens
ggccagtctggggccatcttgggcaatgaaagaggctcttcccaggatgcatctgtgatttcctggcggtcacataggttgggtagatggcatttctccckgggcgtttcactgaggccggtgagtgccctgtggtctgttttccacgtttgccgtatcccatctccatgtttttgcgtgtgtcgtgactgcctctcgttg

SEQ ID NO: 3567 - DNA, 201 bp, Homo sapiens
gccaaaatcctgccattgcactccagcctgggtgacagagtgagaccctgtctcaaacaaaacaaaacaacaaacaaacagaaccagaaacaaaaaaaaamcgagcccttatcaagacaacagatggccatttaaaactgaagggcacctgagaccttattccacttgttgtctggtaaataaaattgcccaccatttatt

SEQ ID NO: 3568 - DNA, 201 bp, Homo sapiens
gaggttgcagtgagtcaagatcacaccactgtactccagcctgggctacagagcaagattccctctcaaaaacaaaacaaaacaaaacacaacacaacaamccagcctggccaacatggtgaaaccctgtctccactaaaaatacaaaaattagccggatgtggtagcccatgcctgtactcccagctacttgggaggttg

SEQ ID NO: 3569 - DNA, 201 bp, Homo sapiens
aagaggtgagcagtgggtcctgcctggggaggcttcctgagttccgcctaagtgcagagtagaatctggctgagctaggtgggaaggggttagggtacatyggcatcccagacaagcagctgcctatgcaagggggtacaggcaggagatctggggacttcactgggacaaagagaaaactccaagaaagcaggatcagca

SEQ ID NO: 3570 - DNA, 201 bp, Homo sapiens
cgtctccttcctcctgatcccccctccttcctcctcatcccctctctcctttctccttatacccctcttcttcctcctcattccttctttccttcctcctyatcccccttccttcctcctcattcttgttctccttcttcctcatccccctctgcttcctcctgatcccccctccttcctcctcatccccccctttctcct

SEQ ID NO: 3571 - DNA, 201 bp, Homo sapiens
cagtttacatgatcccctatctctcctagaagggctcaatgatctgcaaacagcctcacctaccaaccctattggcatgtcatctgccccttcctggaggkcccagacttcaccttcctgggattgtgggtcccacgtgttctgcagctgagccctggagggcctggtgtgcagggagcttctgctggaacctggggtgaa

SEQ ID NO: 3572 - DNA, 201 bp, Homo sapiens
ctccttcctcctcatcccctctctcctttctccttatacccctcttcttcctcctcattccttctttccttcctcctcatcccccttccttcctcctcatycttgttctccttcttcctcatccccctctgcttcctcctgatcccccctccttcctcctcatccccccctttctccttacacccctcttcttcctcctca

SEQ ID NO: 3573 - DNA, 201 bp, Homo sapiens
tttcctaggccgcgcagggcgtgctggggcgtgggtctaccctccaatcagacggagttctgaaggctctgtctggccttgttccaccatgtcctgctacyctcctcacttagggagtccaaacttttatttatttatttatttatttatttatttatttatttatttatttttgagacagagtctcactctgtcacccag

SEQ ID NO: 3574 - DNA, 201 bp, Homo sapiens
ggcgtgggtctaccctccaatcagacggagttctgaaggctctgtctggccttgttccaccatgtcctgctaccctcctcacttagggagtccaaactttyatttatttatttatttatttatttatttatttatttatttatttttgagacagagtctcactctgtcacccaggctggagtgcaatggcgtgatctcggc

SEQ ID NO: 3575 - DNA, 201 bp, Homo sapiens
ctgggcatggtggcttatgcctgtaatcccagcacttcgggaggccgaggcaggtggatcacctgaggcctggagttcgacaccagcctggacaacatggkgaaaccccatctctactaaaaaataaaaaaattagccgggcttggtggtggccacctgtaatcccagctacttgggaggctgaggcaggagaattgcttg

SEQ ID NO: 3576 - DNA, 201 bp, Homo sapiens
atagtcatttttaaaaaaaaaaattcatttcaagtttcgagttttctcaaaagtttcaaatttagtctattggctcctttctttgaaagatgagatgttgrtttactcacctccccgtcattttaccatcctatctcccaagagttgttagcttttttacttttaccttgtccagcttaattaatttcacactttgttctg

SEQ ID NO: 3577 - DNA, 201 bp, Homo sapiens
accatgagtcaaacaaacctcttctctttataagttccccagccttgggtattcctttatagcaacacaaagtggatgaacacaccccagaatcactttgktctcactacaccccctgctccccatagctcacagctgagtgacaaaggagtacaaaaccctggccctctttctgtcctgctaaggacacaacccaagtct

SEQ ID NO: 3578 - DNA, 201 bp, Homo sapiens
gctgacacggagatgctctgaggccatggccctgaagtgggcatcatgcactttgctgagtgctgtcttcttgttggcaccagcagcatccttcctcttgsgggggacatcttcccttactcaccatccaggtcctgggggcaaggatggggctggcacccaaggaagggcacatgccccaagctccaagccagcacctca

SEQ ID NO: 3579 - DNA, 201 bp, Homo sapiens
cagttcctgagctgctgctccctgccctggctgctgtgtgttggctgttgcccttcatatagtttggatgtctgtcccctccaagtctcattttgaactgygatccccaatgctggaggtggagcctggggggaggtgtttcataggagtggatcccccatgaacggcttggtgctgtccccttggtgatgagtgagttct

SEQ ID NO: 3580 - DNA, 201 bp, Homo sapiens
ctgcaaagtgttgcttggcccgacccctcctgctttccaccccagaattttccttcctagcaattagtgggagagttgagacccttccctcgaggtctttwgaagcagaagtaggcccaggggcaaagagggtggcctctgtcaccttgccagaggtggcttttttgaagggtgagcctggtgactggatgggggcatgtg

SEQ ID NO: 3581 - DNA, 201 bp, Homo sapiens
ttgctttggaaatgccatcatcaagaccaaaatgcaccaggcagtcgttagaaaagcaaataatactcgctcctcatttgcctaaaactgtcaaacgatcrtgcaatctgtgaatagcactctgtctatcccctgagtcctgtgtgcatttgggaaattaattatgactctcttataagcacataaaagtgatgcacatgg

SEQ ID NO: 3582 - DNA, 201 bp, Homo sapiens
cactagtgtgaggattccctccccctccccttctttccctgcatcttccctcccccaaccccaatatccagtttccttttccttgtgattcactttgcccrgatgtaactatcacagagattttaaagacacgcacatggctgcggcactccctgagttcttccaggctctttgagaatgtttgcctgtggctttttggct

SEQ ID NO: 3583 - DNA, 201 bp, Homo sapiens
tggcgatttatcgactcagtcaacaaaaggtcaggcttcaggcatggcttgatccaggggctggctctctctctctctctctctctctctctctctctctstctgtgtgtgtgtgtgtgtgtgtgtgtgtgtgtgtgtgtgtctctctccctgtctatgtgtctgtctactttgctgtttgggtttaatccagagattctc

SEQ ID NO: 3584 - DNA, 201 bp, Homo sapiens
tatagagacagggtttcgccatgttggccaggctggtctcgaactcctggcctcaggtgatccaccagccttagcctcccaaagtgctgggattacaggcrtgaaccaccgtgcctggctgcgagtccagccattcaaggagacaggcagcatcgtccttgaagctgtccctctgctaggacgaaggggaaattcttcacc

SEQ ID NO: 3585 - DNA, 201 bp, Homo sapiens
ttttaaaaagaggattatttggcgtatggttctgcaggcaccagcatcttcttctggagaggcctcaggaagtttctaatcttggtggaaagtggaggggkagcaggcacatcatgtgacgagagagggagaaggaggtgccagtctcctttaaactcctgaactaatagagcgagaagtcactcatgaccacgaggaggg

SEQ ID NO: 3586 - DNA, 201 bp, Homo sapiens
ttcagttctcatcatttttttcatgacttttccattccaaggctttttcctctatgttgaggctctattttattgtgaaatggtttttctttcttttcaarcatcatgggttctgtgttgcctgtgtccttcatgctagagaatgcctgtctcttgatttttatattttaagtacaacttgaagcatatttggttttccct

SEQ ID NO: 3587 - DNA, 201 bp, Homo sapiens
ggcatggcttgatccaggggctggctctctctctctctctctctctctctctctctctctctctgtgtgtgtgtgtgtgtgtgtgtgtgtgtgtgtgtgtstctctctccctgtctatgtgtctgtctactttgctgtttgggtttaatccagagattctcccttccctagtgattctggcaaaagtcttagaatgagtgg

SEQ ID NO: 3588 - DNA, 201 bp, Homo sapiens
gttggccaggctggtctcgaactcctggcctcaggtgatccaccagccttagcctcccaaagtgctgggattacaggcatgaaccaccgtgcctggctgcragtccagccattcaaggagacaggcagcatcgtccttgaagctgtccctctgctaggacgaaggggaaattcttcacctcctcttttttttcaatggaga

SEQ ID NO: 3589 - DNA, 201 bp, Homo sapiens
ggcattgctataaaggaatccctgaggctgggcaatttatttttaaaaagaggattatttggcgtatggttctgcaggcaccagcatcttcttctggagargcctcaggaagtttctaatcttggtggaaagtggagggggagcaggcacatcatgtgacgagagagggagaaggaggtgccagtctcctttaaactcctg

SEQ ID NO: 3590 - DNA, 201 bp, Homo sapiens
gagagagagagagagagagagagggagagagagagagagagagagagagagagagagagagagagagagagagagcgcatgtgagtgagatcccaggagcygtgggaaaaatgcttctcagaaagcctgtctctgggtccttgtgcacagtgagggactggggcagggagctttgctcatcttccctcctgggccaagcct

SEQ ID NO: 3591 - DNA, 201 bp, Homo sapiens
taatatattatatataatatatattttaaatatattatatataaaatatatattaaatatatattttatatatattatatataatatatattatatataawatatatatataatatatatattttattatatataatatatattttattatatatattatatatattttatatattatatataatcaaggtatcacattgt

SEQ ID NO: 3592 - DNA, 201 bp, Homo sapiens
cttcaaatttctgggaaaaaaatacttaaaagaagaggacaagtcagacaaactatgatcttcactacaacagttggttttgaggctgtactggatactcrgcagctccctcctcagccacccactgtagattctcttctcctggtctcagtggcttgcctagacttgacctttatctcctgtggtgtctgaacgtattct

SEQ ID NO: 3593 - DNA, 201 bp, Homo sapiens
acaaaggaagcaatcagtgaaatgaaaaggcaacctatggaacggaaaaaaatatttgtcaaccatatatttgataagaggccaatatccaaaatatatartgaactcatacaactcaataccaaaaatacaaagaacctgattttaaaaatgggcaagtagattttctcaaagaagacatacaaatggtcaacaggtata

SEQ ID NO: 3594 - DNA, 201 bp, Homo sapiens
agtgctgggattacaggcatgaaccaccgtgcctggctgcgagtccagccattcaaggagacaggcagcatcgtccttgaagctgtccctctgctaggacraaggggaaattcttcacctcctcttttttttcaatggagaaacctgaggccagattagggaaggggctggcccagggtcacacaggggtcagaggtggag

SEQ ID NO: 3595 - DNA, 201 bp, Homo sapiens
tggagggacagcttaatccatattgtggctattgaggtgtacatgggaaaactgagacccaggaaagctgcctgatggcccaggatcccacagacggtgayggaggccacgctgcagacaggcctggggtcctagcctgtgtccactctcctgggaaggggcgacgaggaaggggagtgagacccccagcgtgacagtctg

SEQ ID NO: 3596 - DNA, 201 bp, Homo sapiens
ctggcgtggagggacagcttaatccatattgtggctattgaggtgtacatgggaaaactgagacccaggaaagctgcctgatggcccaggatcccacagasggtgacggaggccacgctgcagacaggcctggggtcctagcctgtgtccactctcctgggaaggggcgacgaggaaggggagtgagacccccagcgtgac

SEQ ID NO: 3597 - DNA, 201 bp, Homo sapiens
aaatcttcatggctgcagctcaggccatgatgggtctttccctggggatgtttcagggagtgtcttggtgaggggttgcaggcacacccagggatccagcrtactctagttcccagacctgctgacctctctaccctgtgagtgccaggaccctgggcagcccatcactgtcccactgtgcccttgctcttcactcctcac

SEQ ID NO: 3598 - DNA, 201 bp, Homo sapiens
ctgcctccacccttgctctggcttctggctttaaaccatggctgagtctctgccatctcccagctccctgacaagtatgcctgctttctgggaagccacarttaggacccctctgagacactgcaacaattactgcctgccatgccccccatcctcctttgggtctggcatagccctcttccaacctggcttgctctgact

SEQ ID NO: 3599 - DNA, 201 bp, Homo sapiens
ggcttttcatctgtggcttgcttgtgaccatcaaaaaaagcaaaaacacgttaaagcctcgccagtcatcattttccaagtttcccctggatttttccatyggaagacaaaacgtgatgagaccatatgtcaggctaattgttccccaaacagaatttaaacatttgaatatgcttgcaacagggaagggcaggaaagaaa

SEQ ID NO: 3600 - DNA, 201 bp, Homo sapiens
tgtgccccacagcagctctccttggctgtggccatgtaaggggtccatggcagtatcctcctgccaactcctggctgctgagcatgggggactctgttcaytctcccaggactttgccaagactgcagagctgggttagtgtgaggagaggtggggtggcacccctcctgaggagtgtgggcccttggttccaacttttct

SEQ ID NO: 3601 - DNA, 201 bp, Homo sapiens
caatcacctcccaccgggttcctcccatgacacatgggaattgttgagttacagttcaaaatgagatttggatggggacacagctaaaccatgtcaggggktgctggtaacatatgccacatgaacggcctgtcaccatcaccctgactggctgggtgtcatcatgggattttatcttgatgagtgcagtcccatgaggac

SEQ ID NO: 3602 - DNA, 201 bp, Homo sapiens
tacatgtagaaatgtgtaataatcaaatcagggtaattagcatatccatcacctcaaacatttattatttctttgggttgggaacattcaaaattcgttcytgcagctatttgaaaatatacaatacattgtgttaatgatagtcatcttacagtgttatagaacactagaacttattcctcctgtctagatgtagttcta

SEQ ID NO: 3603 - DNA, 201 bp, Homo sapiens
gcagagagcaagggctggttggcttctctcctgacagaggtcagtggctacatattggtctctgagggcagtgggtctcgctggccacatgccagtggctkcaggggaggctgtgaaaaagaggctagagagactctcccgggtctccgccctgtggggaacagccatgtaggtcactcttggccctgcacaagggcaggt

SEQ ID NO: 3604 - DNA, 201 bp, Homo sapiens
tatataatatatatattttattatatataatatatattttattatatatattatatatattttatatattatatataatcaaggtatcacattgtacaccytaaatatatacaattttatttgtcagttacgtgttactaaatacagagggaaaacagaaattctctagattacatttttacattcaaaatgttaaaattc

SEQ ID NO: 3605 - DNA, 201 bp, Homo sapiens
gctgagaagcactgatactctgctttatgaggtgggtttatggagggattaaaaggccccaaaaataatggtaggggtggcaaagtgggcagagagcaagrgctggttggcttctctcctgacagaggtcagtggctacatattggtctctgagggcagtgggtctcgctggccacatgccagtggcttcaggggaggctg

SEQ ID NO: 3606 - DNA, 201 bp, Homo sapiens
ccagttcctgagctgctgctccctgccctggctgctgtgtgttggctgttgcccttcatatagtttggatgtctgtcccctccaagtctcattttgaactrtgatccccaatgctggaggtggagcctggggggaggtgtttcataggagtggatcccccatgaacggcttggtgctgtccccttggtgatgagtgagttc

SEQ ID NO: 3607 - DNA, 201 bp, Homo sapiens
ggtcctctgggggagggtctggacactgctgagaagcactgatactctgctttatgaggtgggtttatggagggattaaaaggccccaaaaataatggtargggtggcaaagtgggcagagagcaagggctggttggcttctctcctgacagaggtcagtggctacatattggtctctgagggcagtgggtctcgctggcc

SEQ ID NO: 3608 - DNA, 201 bp, Homo sapiens
taaacatcagttctatggggaacctggctggtttcagatgcctcaggcagcctccgcagggtccagcctcagtgctctgcaggtgtttatggggtgggtgwgtggacagcaaggggctgactgggagtgtgtgggatggacatgtggaaaagtgtgtcatcaggagcccgggctcctggcctggctctgcttggtggccct
